United States Patent Application Publication US 2011/0183924 A1 - sequence listing, part 110

SEQ ID NO: 324893 - DNA, 1241 bp, Homo sapiens
ggggaagggaagaaaaaactataggctaggtacgaggctgggtgtcgggagaggccgtgtagcgtcgccgttactccgaggagataccagtcggtagaggagaagtcgaggttagagggaactgggaggcactttgctgtctgcaatcgaagttgagggtgcaaaaatgcagagtaataaaacttttaacttggagaagcaaaaccatactccaagaaagcatcatcaacatcaccaccagcagcagcaccaccagcagcaacagcagcagccgccaccaccgccaatacctgcaaatgggcaacaggccagcagccaaaatgaaggcttgactattgacctgaagaattttagaaaaccaggagagaagaccttcacccaacgaagccgtctttttgtgggaaatcttcctcccgacatcactgaggaagaaatgaggaaactatttgagaaatatggaaaggcaggcgaagtcttcattcataaggataaaggatttggctttatccgcttggaaacccgaaccctagcggagattgccaaagtggagctggacaatatgccactccgtggaaagcagctgcgtgtgcgctttgcctgccatagtgcatcccttacagttcgaaaccttcctcagtatgtgtccaacgaactgctggaagaagccttttctgtgtttggccaggtagagagggctgtagtcattgtggatgatcgaggaaggccctcaggaaaaggcattgttgagttctcagggaagccagctgctcggaaagctctggacagatgcagtgaaggctccttcctgctaaccacatttcctcgtcctgtgactgtggagcccatggaccagttagatgatgaagagggacttccagagaagctggttataaaaaaccagcaatttcacaaggaacgagagcagccacccagatttgcacagcctggctcctttgagtatgaatatgccatgcgctggaaggcactcattgagatggagaagcagcagcaggaccaagtggaccgcaacatcaaggaggctcgtgagaagctggagatggagatggaagctgcacgccatgagcaccaggtcatgctaatgagacaggatttgatgaggcgccaagaagaacttcggaggatggaagagctgcacaaccaatgtgggacagcatatcgaccatcaacacgaactcgagctcgagacagacgccgggccccgtaagtagtagtagcggcag

SEQ ID NO: 324894 - DNA, 2518 bp, Homo sapiens
ggggaagggaagaaaaaactataggctaggtacgaggctgggtgtcgggagaggccgtgtagcgtcgccgttactccgaggagataccagtcggtagaggagaagtcgaggttagagggaactgggaggcactttgctgtctgcaatcgaagttgagaggcccagtatttaggcgacagtgaatttattactctgaagagggttctgcacatatttccaaattatattggtggtcatcagaagtaggtgataggaagaaatacttctcaagggtgcaaaaatgcagagtaataaaacttttaacttggagaagcaaaaccatactccaagaaagcatcatcaacatcaccaccagcagcagcaccaccagcagcaacagcagcagccgccaccaccgccaatacctgcaaatgggcaacaggccagcagccaaaatgaaggcttgactattgacctgaagaattttagaaaaccaggagagaagaccttcacccaacgaagccgtctttttgtgggaaatcttcctcccgacatcactgaggaagaaatgaggaaactatttgagaaatatggaaaggcaggcgaagtcttcattcataaggataaaggatttggctttatccgcttggaaacccgaaccctagcggagattgccaaagtggagctggacaatatgccactccgtggaaagcagctgcgtgtgcgctttgcctgccatagtgcatcccttacagttcgaaaccttcctcagtatgtggaacgagagcagccacccagatttgcacagcctggctcctttgagtatgaatatgccatgcgctggaaggcactcattgagatggagaagcagcagcaggaccaagtggaccgcaacatcaaggaggctcgtgagaagctggagatggagatggaagctgcacgccatgagcaccaggtcatgctaatgagacaggatttgatgaggcgccaagaagaacttcggaggatggaagagctgcacaaccaagaggtgcaaaaacgaaagcaactggagctcaggcaggaggaagagcgcaggcgccgtgaagaagagatgcggcggcagcaagaagaaatgatgcggcgacagcaggaaggattcaagggaaccttccctgatgcgagagagcaggagattcggatgggtcagatggctatgggaggtgctatgggcataaacaacagaggtgccatgccccctgctcctgtgccagctggtaccccagctcctccaggacctgccactatgatgccggatggaactttgggattgaccccaccaacaactgaacgctttggtcaggctgctacaatggaaggaattggggcaattggtggaactcctcctgcattcaaccgtgcagctcctggagctgaatttgccccaaacaaacgtcgccgatactaataagttgcagtgtctagtttctcaaaacccttaaaagaaggaccctttttggactagccagaattctaccctggaaaagtgttagggattccttccaatagttagatctaccctgcctgtactactctagggagtatgctggaggcagagggcaagggaggggtggtattaaacaagtcaattctgtgtggtatattgtttaatcagttctgtgtggtgcattcctgaagtctctaatgtgactgttgagggcctggggaaaccatggcaaagtggatccagttagagcccattaatcttgatcattccggtttttttttttttggtccatcttgtttcatttgcttgccccgcccccgagacggagtcttactctgtcgcccaggctggagtgtagtggcatgatctcggctcactgcaatctctgcctcccgggttcaagcttgtccaggttgatcttgaactcctgacctcgtgatctacccacctcggcctcccaaaatgctgggattacaggggtgagccaccgtgcccaacctcacttgcttcttatccttacactcccccagccccagagaaactgccacatacaccacaaaaaccaaacatcccccaatgaccttagccccattgctccattcactcccaggtgagaattcaggcaaacgtccacaaaggtcacaggcagcgtacatacggttctgttataccccatatattaccccttcatgtcctaaagaagacattttctcttagagattttcattttagtgtatctttaaaaaaaaatcttgtgttaacttgcctccatctttttcttgggtgaggacacccaggaatgacccttttgtgtctatgatgttgctgttcacagcttttcttgataggcctagtacaatcttgggaacagggttactgtatactgaaggtctgacagtagctcttagactcgcctatcttaggtagtcatgctgtgcattttttttttcattggtgtactgtgtttgatttgtctcatatatttggagtttttctgaaaaatggagcagtaatgcagcatcaacctattaaaatacattttaagccttttaa

SEQ ID NO: 324895 - DNA, 1889 bp, Homo sapiens
ggggaagggaagaaaaaactataggctaggtacgaggctgggtgtcgggagaggccgtgtagcgtcgccgttactccgaggagataccagtcggtagaggagaagtcgaggttagagggaactgggaggcactttgctgtctgcaatcgaagttgagaggcccagtatttaggcgacagtgaatttattactctgaagagggttctgcacatatttccaaattatattggtggtcatcagaagtaggtgataggaagaaatacttctcaagggtgcaaaaatgcagagtaataaaacttttaacttggagaagcaaaaccatactccaagaaagcatcatcaacatcaccaccagcagcagcaccaccagcagcaacagcagcagccgccaccaccgccaatacctgcaaatgggcaacaggccagcagccaaaatgaaggcttgactattgacctgaagaattttagaaaaccaggagagaagaccttcacccaacgaagccgtctttttgtgggaaatcttcctcccgacatcactgaggaagaaatgaggaaactatttgagaaatatggaaaggcaggcgaagtcttcattcataaggataaaggatttggctttatccgcttggaaacccgaaccctagcggagattgccaaagtggagctggacaatatgccactccgtggaaagcagctgcgtgtgcgctttgcctgccatagtgcatcccttacagttcgaaaccttcctcagtatgtgtccaacgaactgctggaagaagccttttctgtgtttggccaggtagagagggctgtagtcattgtggatgatcgaggaaggccctcaggaaaaggcattgttgagttctcagggaagccagctgctcggaaagctctggacagatgcagtgaaggctccttcctgctaaccacatttcctcgtcctgtgactgtggagcccatggaccagttagatgatgaagagggacttccagagaagctggttataaaaaaccagcaatttcacaaggaacgagagcagccacccagatttgcacagcctggctcctttgagtatgaatatgccatgcgctggaaggcactcattgagatggagaagcagcagcaggaccaagtggaccgcaacatcaaggaggctcgtgagaagctggagatggagatggaagctgcacgccatgagcaccaggtcatgctaatgagacaggatttgatgaggcgccaagaagaacttcggaggatggaagagctgcacaaccaagaggtgcaaaaacgaaagcaactggagctcaggcaggaggaagagcgcaggcgccgtgaagaagagatgcggcggcagcaagaagaaatgatgcggcgacagcaggaaggattcaagggaaccttccctgatgcgagagagcaggagattcggatgggtcagatggctatgggaggtgctatgggcataaacaacagaggtgccatgccccctgctcctgtgccagctggtaccccagctcctccaggacctgccactatgatgccggatggaactttgggattgaccccaccaacaactgaacgctttggtcaggctgctacaatggaaggaattggggcaattggtggaactcctcctgcattcaaccgtgcagctcctggagctgaatttgccccaaacaaacgtcgccgatactaataagttgcagtgtctagtttctcaaaacccttaaaagaaggaccctttttggactagccagaattctaccctggaaaagtgttagggattccttccaatagttagatctaccctgcctgtactactctagggagtatgctggaggcagagggcaagggaggggtggtattaaacaagtcaattctgtgtggta

SEQ ID NO: 324896 - DNA, 2374 bp, Homo sapiens
ggtctttgcgcggctcgtaggtggctcttcgtgctggcagcggtgcacatggcctgtctgcactgtaaccacaggctgggatgtagccaggacttggtctccttggaagacaggtctgatgtttggccaatccagtccttcagaccctgtctgaaacttgtatcttacgtgaacttaaagaataaaatgcatttctaccccacgcgccggctcgtgagaagctggagatggagatggaagctgcacgccatgagcaccaggtcatgctaatgagacaggatttgatgaggcgccaagaagaacttcggaggatggaagagctgcacaaccaagaggtgcaaaaacgaaagcaactggagctcaggcaggaggaagagcgcaggcgccgtgaagaagagatgcggcggcagcaagaagaaatgatgcggcgacagcaggaaggattcaagggaaccttccctgatgcggtatatctcccatgtgcccgtgatgtaccagaccagtcctgataaactcaccatgaattgtctgctaggttaccggttatgaccaattttcccgtgttgtgaaataaccctttagaaaaaagaattcataagaaggagaggtaaggtttgaagaggagatcttgcctcacaagcaatataggatgaaaaactgggtctgctgtattctgtttagactcagtgactataggaagagatatgcaaccttggctagtcctctgctgtccttgcaattgtacaagttggagcttcagaagcaatctcttccccctttcacctctctgttgctaataggaggctctggcttacgtcctagtagctctgtgaccttgaatttgttgcacaactagcaagggttgtgctcctcagctttctcagtgctgtttggacgtgttatcactctatctacttcccttagtgtgtggtccttgatggattgtggtagaatgcactgctgtcttggactgtcttgagtattttttgtttttcagagagagcaggagattcggatgggtcagatggctatgggaggtgctatgggcataaacaacagaggtgccatgccccctgctcctgtgccagctggtaccccagctcctccaggacctgccactatgatgccggatggaactttgggattgaccccaccaacaactgaacgctttggtcaggctgctacaatggaaggaattggggcaattggtggaactcctcctgcattcaaccgtgcagctcctggagctgaatttgccccaaacaaacgtcgccgatactaataagttgcagtgtctagtttctcaaaacccttaaaagaaggaccctttttggactagccagaattctaccctggaaaagtgttagggattccttccaatagttagatctaccctgcctgtactactctagggagtatgctggaggcagagggcaagggaggggtggtattaaacaagtcaattctgtgtggtatattgtttaatcagttctgtgtggtgcattcctgaagtctctaatgtgactgttgagggcctggggaaaccatggcaaagtggatccagttagagcccattaatcttgatcattccggtttttttttttttggtccatcttgtttcatttgcttgccccgcccccgagacggagtcttactctgtcgcccaggctggagtgtagtggcatgatctcggctcactgcaatctctgcctcccgggttcaagcttgtccaggttgatcttgaactcctgacctcgtgatctacccacctcggcctcccaaaatgctgggattacaggggtgagccaccgtgcccaacctcacttgcttcttatccttacactcccccagccccagagaaactgccacatacaccacaaaaaccaaacatcccccaatgaccttagccccattgctccattcactcccaggtgagaattcaggcaaacgtccacaaaggtcacaggcagcgtacatacggttctgttataccccatatattaccccttcatgtcctaaagaagacattttctcttagagattttcattttagtgtatctttaaaaaaaaatcttgtgttaacttgcctccatctttttcttgggtgaggacacccaggaatgacccttttgtgtctatgatgttgctgttcacagcttttcttgataggcctagtacaatcttgggaacagggttactgtatactgaaggtctgacagtagctcttagactcgcctatcttaggtagtcatgctgtgcattttttttttcattggtgtactgtgtttgatttgtctcatatatttggagtttttctgaaaaatggagcagtaatgcagcatcaacctattaaaatacattttaagccttttaa

SEQ ID NO: 324897 - DNA, 1128 bp, Homo sapiens
gggagaagaaattatccaagatacttgacagaacaaagatattgtcaacataactgtaaatcaaaaggttgcgttttataaagggaatgtagatgggtaaatttttgggaaaagctcatcacattcttaccaagaaatttcagtaaattgtgtaggaatataatttcagtagtagataagatgctatatctaattaaatagttgtccatcttgaggtctgacacttcacagacctttaaaaaagataaagaagtactttttatggatttgttaagcaaaaaattacagaacagctcaggcaacatgacgaaaccccacctctaccaaaaaatacaaaaaattaggtgggtgtggtggcgggcacctgtggtcccagctactcgggaggctgaggtgggaggatcacttgagcccagaagacagaggttaaagtgagccgagatcactccactgaactccagcctaggagacagagaccccaactccaaaaaaaaaaaaaaagaaaaaaagaaaaatacctaggtggtattaaaaaatgtatacacacacacacacacacacacttaattactaccataaccacacatcaacacacatacaaaatgactgttcacatcctttattagtttcctaatgccttaaaattaccttaaacaaattaccataaacttagtggcttaaaacaacagaaatgtattatcttacagttctggaggtcagaaattcaaaatgggtcttagcgggctaaaatagagatgtcggcatggctgcattcctaaagagtctgttttcttgcctttttcagcttctagagctcatgaactattctttggctcatggcctccttccaccttcagagtcagcaatggctttctcacatctcatcattgacacggattcttctgcttcccctttacacacttaaaggaccatgtaattaggcctcctcaggtgatccagaataatctattttcagatcatctgagtagcaaccctaatttttatctgcaacttgaattatctctcaccgtgtaacataacatattcacaaatcccagagagattaggacatgtacatctttggacatctttggtaggccattattctgcctaccatatgtatgaata

SEQ ID NO: 324898 - DNA, 780 bp, Homo sapiens
  misc_feature (27)..(27): n is a, c, g, or t
  misc_feature (31)..(31): n is a, c, g, or t
aaagttaggctaggtacgaggcctggntgtngtaatcggccgaggagtcatggaggagaatgaccagctcaagaagggagctgctgttgacggaggcaagttggatgtcgggaatgctgaggtgaagttggaggaagagaacaggagcctgaaggctgacctgcagaagctaaaggacgagctggccagcactaagcaaaaactagagaaagctgaaaaccaggttctggccatgcggaagcagtctgagggcctcaccaaggagtacgaccgcttgctggaggagcacgcaaagctgcaggctgcagtagatggtcccatggacaagaaggaagagtaagggcctccttcctcccctgcctgcagctggcttccacctggcacgtgcctgctgcttcctgagagcccggcctctccctccagtacttctgtttgtgcccttctgcttcccccattcccttccacagctcatagctcgtcatctcggcccttgtccacactctccaagcacattacaggggacctgattgctacacgttcagaatgcgtttgctgtcatcctgcttggcctggccaggcctggcacagccttggcttccacgcctgagcgtggagagcacgagttagttgtagtccggcttgcggtggggctgacttcctgttggtttgagcccctttttgttttgccctctgggtgttttctttggtcccgcaggagggtgggtggagcaggtggactggagtttctcttgagggcaataaaagttgtcatggtgtgta

SEQ ID NO: 324899 - DNA, 332 bp, Homo sapiens
  misc_feature (123)..(123): n is a, c, g, or t
gagttagttgtagtccggcttgcggtggggctgactcgtgctctccacgctcaggcgtggaagccaaggctgtgccaggcctggccaggccaagcaggatgacagcaaacgcattctgaacgngtagcaatcaggtcccctgtaatgttccacgcctgagcgtggagagcacgagttagttgtagtccggcttgcggtggggctgacttcctgttggtttgagcccctttttgttttgccctctgggtgttttctttggtcccgcaggagggtgggtggagcaggtggactggagtttctcttgagggcaataaaagttgtcatggtgtgta

SEQ ID NO: 324900 - DNA, 1627 bp, Homo sapiens
  misc_feature (27)..(27): n is a, c, g, or t
  misc_feature (31)..(31): n is a, c, g, or t
aaagttaggctaggtacgaggcctggntgtngtaatcggccgaggagcccgaggcgcctcttcctctcccgctcggagcgccggccctccgctccggggcggggtgggaagcggaggtgggcggagcctccggggcctcgcgagggctggtgggcggtgcccggcgggcgcttccggtttccggccgcggtatgaggggcggggccggggctgctgtgggagagttcggttgctgcggcggggcctgcacgttgactgtgggaaactcggtgagcgggctccgcgcgccgggctgggctccgggaccgcggaggctccccggcccatcgacgagggagagaggcgagcggcgcggggaggcccgggggccggggaatctcggggcccgcagcctacctgcgtgaaacaagctcacatcttcctgtgggaaaccttctagcaacaggatgagtctgcagtggactgcagttgccaccttcctctatgcggaggtctttgttgtgttgcttctctgcattcccttcatttctcctaaaagatggcagaagattttcaagtcccggctggtggagttgttagtgtcctatggcaacaccttctttgtggttctcattgtcatccttgtgctgttggtcatcgatgccgtgcgcgaaattcggaagtatgatgatgtgacggaaaaggtgaacctccagaacaatcccggggccatggagcacttccacatgaagcttttccgtgcccagaggaatctctacattgctggcttttccttgctgctgtccttcctgcttagacgcctggtgactctcatttcgcagcaggccacgctgctggcctccaatgaagcctttaaaaagcaggcggagagtgctagtgaggcggccaagaagtacatggaggagaatgaccagctcaagaagggagctgctgttgacggaggcaagttggatgtcgggaatgctgaggtgaagttggaggaagagaacaggagcctgaaggctgacctgcagaagctaaaggacgagctggccagcactaagcaaaaactagagaaagctgaaaaccaggttctggccatgcggaagcagtctgagggcctcaccaaggagtacgaccgcttgctggaggagcacgcaaagctgcaggctgcagtagatggtcccatggacaagaaggaagagtaagggcctccttcctcccctgcctgcagctggcttccacctggcacgtgcctgctgcttcctgagagcccggcctctccctccagtacttctgtttgtgcccttctgcttcccccattcccttccacagctcatagctcgtcatctcggcccttgtccacactctccaagcacattacaggggacctgattgctacacgttcagaatgcgtttgctgtcatcctgcttggcctggccaggcctggcacagccttggcttccacgcctgagcgtggagagcacgagttagttgtagtccggcttgcggtggggctgacttcctgttggtttgagcccctttttgttttgccctctgggtgttttctttggtcccgcaggagggtgggtggagcaggtggactggagtttctcttgagggcaataaaagttgtcatggtgtgta

SEQ ID NO: 324901 - DNA, 1899 bp, Homo sapiens
tctcgcccctcggcggggcccctcccgcaccacagagacgtgggacggccgcgcggactagagaagcggccctcgccggcccgacaaagccccgccccgccccgcccgcgtgctcgctccaccccgccctgctcgcccggagcccgaggcgcctcttcctctcccgctcggagcgccggccctccgctccggggcggggtgggaagcggaggtgggcggagcctccggggcctcgcgagggctggtgggcggtgcccggcgggcgcttccggtttccggccgcggtatgaggggcggggccggggctgctgtgggagagttcggttgctgcggcggggcctgcacgttgactgtgggaaactcggaaacaagctcacatcttcctgtgggaaaccttctagcaacaggatgagtctgcagtggactgcagttgccaccttcctctatgcggaggtctttgttgtgttgcttctctgcattcccttcatttctcctaaaagatggcagaagattttcaagtcccggctggtggagttgttagtgtcctatggcaacaccttctttgtggttctcattgtcatccttgtgctgttggtcatcgatgccgtgcgcgaaattcggaagtatgatgatgtgacggaaaaggtgaacctccagaacaatcccggggccatggagcacttccacatgaagcttttccgtgcccagaggaatctctacattgctggcttttccttgctgctgtccttcctgcttagacgcctggtgactctcatttcgcagcaggccacgctgctggcctccaatgaagcctttaaaaagcaggcggagagtgctagtgaggcggccaagaagtacatggaggagaatgaccagctcaagaagggagctgctgttgacggaggcaagttggatgtcgggaatgctgaggtgaagttggaggaagagaacaggagcctgaaggctgacctgcagaagctaaaggacgagctggccagcactaagcaaaaactagagaaagctgaaaaccaggttctggccatgcggaagcagtctgagggcctcaccaaggagtacgaccgcttgctggaggagcacgcaaagctgcaggctgcagtagatggtcccatggacaagaaggaagagtaagggcctccttcctcccctgcctgcagctggcttccacctggcacgtgcctgctgcttcctgagagcccggcctctccctccagtacttctgtttgtgcccttctgcttcccccattcccttccacagctcatagctcgtcatctcggcccttgtccacactctccaagcacattacaggggacctgattgctacacgttcagaatgcgtttgctgtcatcctgcttggcctggccaggcctggcacagccttggcttccacgcctgagcgtggagagcacgagttagttgtagtccggcttgcggtggggctgacttcctgttggtttgagcccctttttgttttgccctctgggtgttttctttggtcccgcaggagggtgggtggagcaggtggactggagtttctcttgagggcaataaaagttgtcatggtgtgtaaaaaaaaaacacaccacaccacaacaacaacaacaccacaccaacaccacaacaacaaggcgcaaccgctctaccaccccccacccgcccggaccccatcctgcgcctccccaccctctcgcgcaacgggcaccccaacatgagcgccccacattcgcagcacagccccacatctacacaccccctccctcggacacctcgcctggctcacatggcgccccccacccggcctcaatctcgccacctccccaccttgccctcggcatcaccagtaccacgaccaccttccgtgcccacccagcccgctcgc

SEQ ID NO: 324902 - DNA, 1909 bp, Homo sapiens
  misc_feature (1619)..(1619): n is a, c, g, or t
  misc_feature (1690)..(1691): n is a, c, g, or t
  misc_feature (1835)..(1835): n is a, c, g, or t
  misc_feature (1885)..(1885): n is a, c, g, or t
  misc_feature (1887)..(1887): n is a, c, g, or t
tctcgcccctcggcggggcccctcccgcaccacagagacgtgggacggccgcgcggactagagaagcggccctcgccggcccgacaaagccccgccccgccccgcccgcgtgctcgctccaccccgccctgctcgcccggagcccgaggcgcctcttcctctcccgctcggagcgccggccctccgctccggggcggggtgggaagcggaggtgggcggagcctccggggcctcgcgagggctggtgggcggtgcccggcgggcgcttccggtttccggccgcggtatgaggggcggggccggggctgctgtgggagagttcggttgctgcggcggggcctgcacgttgactgtgggaaactcggaaacaagctcacatcttcctgtgggaaaccttctagcaacaggatgagtctgcagtggactgcagttgccaccttcctctatgcggaggtctttgttgtgttgcttctctgcattcccttcatttctcctaaaagatggcagaagattttcaagtcccggctggtggagttgttagtgtcctatggcaacaccttctttgtggttctcattgtcatccttgtgctgttggtcatcgatgccgtgcgcgaaattcggaagtatgatgatgtgacggaaaaggtgaacctccagaacaatcccggggccatggagcacttccacatgaagcttttccgtgcccagaggaatctctacattgctggcttttccttgctgctgtccttcctgcttagacgcctggtgactctcatttcgcagcaggccacgctgctggcctccaatgaagcctttaaaaagcaggcggagagtgctagtgaggcggccaagaagtacatggaggagaatgaccagctcaagaagggagctgctgttgacggaggcaagttggatgtcgggaatgctgaggtgaagttggaggaagagaacaggagcctgaaggctgacctgcagaagctaaaggacgagctggccagcactaagcaaaaactagagaaagctgaaaaccaggttctggccatgcggaagcagtctgagggcctcaccaaggagtacgaccgcttgctggaggagcacgcaaagctgcaggctgcagtagatggtcccatggacaagaaggaagagtaagggcctccttcctcccctgcctgcagctggcttccacctggcacgtgcctgctgcttcctgagagcccggcctctccctccagtacttctgtttgtgcccttctgcttcccccattcccttccacagctcatagctcgtcatctcggcccttgtccacactctccaagcacattacaggggacctgattgctacacgttcagaatgcgtttgctgtcatcctgcttggcctggccaggcctggcacagccttggcttccacgcctgagcgtggagagcacgagttagttgtagtccggcttgcggtggggctgacttcctgttggtttgagcccctttttgttttgccctctgggtgttttctttggtcccgcaggagggtgggtggagcaggtggactggagtttctcttgagggcaataaaagttgtcatggtgtgtaaaaaaaaaaaaaaattacaaaaagataatnctttctcacctaatactttctggctcaaacaatccaccctatagtgggcttctaaaaattcactgggcgtnnctttacaacggaaggagtgaaaaagccgtgggcgcacccaaataaatttgtttacacactttcctctttccgcggggggtcttttaaaagaggggccccctctggccctcctccaaacttgtgccccatttggacggggagggnaattggggcgctttttattttagtaaccccgcaattaaatttttaaatancnaattatttttgtaaccaccggg

SEQ ID NO: 324903 - DNA, 1382 bp, Homo sapiens
ttgctggcttttccttgctgctgtccttcctgcttagacgcctggtgactctcatttcgcagcaggccacgctgctggcctccaatgaagcctttaaaaagcaggcggagagtgctagtgaggcggcggggcctgcacgttgactgtgggaaactcggaaacaagctcacatcttcctgtgggaaaccttctagcaacaggatgagtctgcagtggactgcagttgccaccttcctctatgcggaggtctttgttgtgttgcttctctgcattcccttcatttctcctaaaagatggcagaagattttcaagtcccggctggtggagttgttagtgtcctatggcaacaccttctttgtggttctcattgtcatccttgtgctgttggtcatcgatgccgtgcgcgaaattcggaagtatgatgatgtgacggaaaaggtgaacctccagaacaatcccggggccatggagcacttccacatgaagcttttccgtgcccagaggaatctctacattgctggcttttccttgctgctgtccttcctgcttagacgcctggtgactctcatttcgcagcaggccacgctgctggcctccaatgaagcctttaaaaagcaggcggagagtgctagtgaggcggccaagaagtacatggaggagaatgaccagctcaagaagggagctgctgttgacggaggcaagttggatgtcgggaatgctgaggtgaagttggaggaagagaacaggagcctgaaggctgacctgcagaagctaaaggacgagctggccagcactaagcaaaaactagagaaagctgaaaaccaggttctggccatgcggaagcagtctgagggcctcaccaaggagtacgaccgcttgctggaggagcacgcaaagctgcaggctgcagtagatggtcccatggacaagaaggaagagtaagggcctccttcctcccctgcctgcagctggcttccacctggcacgtgcctgctgcttcctgagagcccggcctctccctccagtacttctgtttgtgcccttctgcttcccccattcccttccacagctcatagctcgtcatctcggcccttgtccacactctccaagcacattacaggggacctgattgctacacgttcagaatgcgtttgctgtcatcctgcttggcctggccaggcctggcacagccttggcttccacgcctgagcgtggagagcacgagttagttgtagtccggcttgcggtggggctgacttcctgttggtttgagcccctttttgttttgccctctgggtgttttctttggtcccgcaggagggtgggtggagcaggtggactggagtttctcttgagggcaataaaagttgtcatggtgtgta

SEQ ID NO: 324904 - DNA, 1873 bp, Homo sapiens
  misc_feature (27)..(27): n is a, c, g, or t
  misc_feature (31)..(31): n is a, c, g, or t
aaagttaggctaggtacgaggcctggntgtngtaatcggccgaggagcccgaggcgcctcttcctctcccgctcggagcgccggccctccgctccggggcggggtgggaagcggaggtgggcggagcctccggggcctcgcgagggctggtgggcggtgcccggcgggcgcttccggtttccggccgcggtatgaggggcggggccggggctgctgtgggagagttcggttgctgcggcggggcctgcacgttgactgtgggaaactcggtgagcgggctccgcgcgccgggctgggctccgggaccgcggaggctccccggcccatcgacgagggagagaggcgagcggcgcggggaggcccgggggccggggaatctcggggcccgcagcctacctgcgtgtgagaggcaggggcgaggggaaaccgggcggcgcctctagaagctggtctcgggggcggggcggggggcggtgaagccccacctggaggagcggccgggatgggcctccgggacggtgtgccaggccggggccaagtcggaggcccctcgctctgggtgggcgctggggcccgcgagggctactgtaaggacccctggcttctgaggatactgcgtctagaactttctccgtatggggccttgaggaaacaagctcacatcttcctgtgggaaaccttctagcaacaggatgagtctgcagtggactgcagttgccaccttcctctatgcggaggtctttgttgtgttgcttctctgcattcccttcatttctcctaaaagatggcagaagattttcaagtcccggctggtggagttgttagtgtcctatggcaacaccttctttgtggttctcattgtcatccttgtgctgttggtcatcgatgccgtgcgcgaaattcggaagtatgatgatgtgacggaaaaggtgaacctccagaacaatcccggggccatggagcacttccacatgaagcttttccgtgcccagaggaatctctacattgctggcttttccttgctgctgtccttcctgcttagacgcctggtgactctcatttcgcagcaggccacgctgctggcctccaatgaagcctttaaaaagcaggcggagagtgctagtgaggcggccaagaagtacatggaggagaatgaccagctcaagaagggagctgctgttgacggaggcaagttggatgtcgggaatgctgaggtgaagttggaggaagagaacaggagcctgaaggctgacctgcagaagctaaaggacgagctggccagcactaagcaaaaactagagaaagctgaaaaccaggttctggccatgcggaagcagtctgagggcctcaccaaggagtacgaccgcttgctggaggagcacgcaaagctgcaggctgcagtagatggtcccatggacaagaaggaagagtaagggcctccttcctcccctgcctgcagctggcttccacctggcacgtgcctgctgcttcctgagagcccggcctctccctccagtacttctgtttgtgcccttctgcttcccccattcccttccacagctcatagctcgtcatctcggcccttgtccacactctccaagcacattacaggggacctgattgctacacgttcagaatgcgtttgctgtcatcctgcttggcctggccaggcctggcacagccttggcttccacgcctgagcgtggagagcacgagttagttgtagtccggcttgcggtggggctgacttcctgttggtttgagcccctttttgttttgccctctgggtgttttctttggtcccgcaggagggtgggtggagcaggtggactggagtttctcttgagggcaataaaagttgtcatggtgtgta

SEQ ID NO: 324905 - DNA, 1206 bp, Homo sapiens
tcggtctcccattactttgtcacggatgagtctgcagtggactgcagttgccaccttcctctatgcggaggtctttgttgtgttgcttctctgcattcccttcatttctcctaaaagatggcagaagattttcaagtcccggctggtggagttgttagtgtcctatggcaacaccttctttgtggttctcattgtcatccttgtgctgttggtcatcgatgccgtgcgcgaaattcggaagtatgatgatgtgacggaaaaggtgaacctccagaacaatcccggggccatggagcacttccacatgaagcttttccgtgcccagaggaatctctacattgctggcttttccttgctgctgtccttcctgcttagacgcctggtgactctcatttcgcagcaggccacgctgctggcctccaatgaagcctttaaaaagcaggcggagagtgctagtgaggcggccaagaagtacatggaggagaatgaccagctcaagaagggagctgctgttgacggaggcaagttggatgtcgggaatgctgaggtgaagttggaggaagagaacaggagcctgaaggctgacctgcagaagctaaaggacgagctggccagcactaagcaaaaactagagaaagctgaaaaccaggttctggccatgcggaagcagtctgagggcctcaccaaggagtacgaccgcttgctggaggagcacgcaaagctgcaggctgcagtagatggtcccatggacaagaaggaagagtaagggcctccttcctcccctgcctgcagctggcttccacctggcacgtgcctgctgcttcctgagagcccggcctctccctccagtacttctgtttgtgcccttctgcttcccccattcccttccacagctcatagctcgtcatctcggcccttgtccacactctccaagcacattacaggggacctgattgctacacgttcagaatgcgtttgctgtcatcctgcttggcctggccaggcctggcacagccttggcttccacgcctgagcgtggagagcacgagttagttgtagtccggcttgcggtggggctgacttcctgttggtttgagcccctttttgttttgccctctgggtgttttctttggtcccgcaggagggtgggtggagcaggtggactggagtttctcttgagggcaataaaagttgtcatggtgtgta

SEQ ID NO: 324906 - DNA, 1274 bp, Homo sapiens
ggccttttttccaatagtcttgaatggatgtcaaattagagaattgcaagccactgaggctgactttgcatgggctattcggccattggagaagagtacaaagctggatttccattttgctcagggccctagagctcgtgtgtgtgctttctcttcaactcctgtcctttttgtcttcttcacagatggcagaagattttcaagtcccggctggtggagttgttagtgtcctatggcaacaccttctttgtggttctcattgtcatccttgtgctgttggtcatcgatgccgtgcgcgaaattcggaagtatgatgatgtgacggaaaaggtgaacctccagaacaatcccggggccatggagcacttccacatgaagcttttccgtgcccagaggaatctctacattgctggcttttccttgctgctgtccttcctgcttagacgcctggtgactctcatttcgcagcaggccacgctgctggcctccaatgaagcctttaaaaagcaggcggagagtgctagtgaggcggccaagaagtacatggaggagaatgaccagctcaagaagggagctgctgttgacggaggcaagttggatgtcgggaatgctgaggtgaagttggaggaagagaacaggagcctgaaggctgacctgcagaagctaaaggacgagctggccagcactaagcaaaaactagagaaagctgaaaaccaggttctggccatgcggaagcagtctgagggcctcaccaaggagtacgaccgcttgctggaggagcacgcaaagctgcaggctgcagtagatggtcccatggacaagaaggaagagtaagggcctccttcctcccctgcctgcagctggcttccacctggcacgtgcctgctgcttcctgagagcccggcctctccctccagtacttctgtttgtgcccttctgcttcccccattcccttccacagctcatagctcgtcatctcggcccttgtccacactctccaagcacattacaggggacctgattgctacacgttcagaatgcgtttgctgtcatcctgcttggcctggccaggcctggcacagccttggcttccacgcctgagcgtggagagcacgagttagttgtagtccggcttgcggtggggctgacttcctgttggtttgagcccctttttgttttgccctctgggtgttttctttggtcccgcaggagggtgggtggagcaggtggactggagtttctcttgagggcaataaaagttgtcatggtgtgta

SEQ ID NO: 324907 - DNA, 1170 bp, Homo sapiens
  misc_feature (27)..(27): n is a, c, g, or t
  misc_feature (31)..(31): n is a, c, g, or t
aaagttaggctaggtacgaggcctggntgtngtaatcggccgaggagttgttctctgcattcccttcatttctcctaaaagatggcagaagattttcaagtcccggctggtggagttgttagtgtcctatggcaacaccttctttgtggttctcattgtcatccttgtgctgttggtcatcgatgccgtgcgcgaaattcggaagtatgatgatgtgacggaaaaggtgaacctccagaacaatcccggggccatggagcacttccacatgaagcttttccgtgcccagaggaatctctacattgctggcttttccttgctgctgtccttcctgcttagacgcctggtgactctcatttcgcagcaggccacgctgctggcctccaatgaagcctttaaaaagcaggcggagagtgctagtgaggcggccaagaagtacatggaggagaatgaccagctcaagaagggagctgctgttgacggaggcaagttggatgtcgggaatgctgaggtgaagttggaggaagagaacaggagcctgaaggctgacctgcagaagctaaaggacgagctggccagcactaagcaaaaactagagaaagctgaaaaccaggttctggccatgcggaagcagtctgagggcctcaccaaggagtacgaccgcttgctggaggagcacgcaaagctgcaggctgcagtagatggtcccatggacaagaaggaagagtaagggcctccttcctcccctgcctgcagctggcttccacctggcacgtgcctgctgcttcctgagagcccggcctctccctccagtacttctgtttgtgcccttctgcttcccccattcccttccacagctcatagctcgtcatctcggcccttgtccacactctccaagcacattacaggggacctgattgctacacgttcagaatgcgtttgctgtcatcctgcttggcctggccaggcctggcacagccttggcttccacgcctgagcgtggagagcacgagttagttgtagtccggcttgcggtggggctgacttcctgttggtttgagcccctttttgttttgccctctgggtgttttctttggtcccgcaggagggtgggtggagcaggtggactggagtttctcttgagggcaataaaagttgtcatggtgtgta

SEQ ID NO: 324908 - DNA, 1026 bp, Homo sapiens
gagtcgtcaggccgttagtccgtgatcagtccgtcgaccgtgcgcgcgtctgccgcggaggtatgatgatgtgacggaaaaggtgaacctccagaacaatcccggggccatggagcacttccacatgaagcttttccgtgcccagaggaatctctacattgctggcttttccttgctgctgtccttcctgcttagacgcctggtgactctcatttcgcagcaggccacgctgctggcctccaatgaagcctttaaaaagcaggcggagagtgctagtgaggcggccaagaagtacatggaggagaatgaccagctcaagaagggagctgctgttgacggaggcaagttggatgtcgggaatgctgaggtgaagttggaggaagagaacaggagcctgaaggctgacctgcagaagctaaaggacgagctggccagcactaagcaaaaactagagaaagctgaaaaccaggttctggccatgcggaagcagtctgagggcctcaccaaggagtacgaccgcttgctggaggagcacgcaaagctgcaggctgcagtagatggtcccatggacaagaaggaagagtaagggcctccttcctcccctgcctgcagctggcttccacctggcacgtgcctgctgcttcctgagagcccggcctctccctccagtacttctgtttgtgcccttctgcttcccccattcccttccacagctcatagctcgtcatctcggcccttgtccacactctccaagcacattacaggggacctgattgctacacgttcagaatgcgtttgctgtcatcctgcttggcctggccaggcctggcacagccttggcttccacgcctgagcgtggagagcacgagttagttgtagtccggcttgcggtggggctgacttcctgttggtttgagcccctttttgttttgccctctgggtgttttctttggtcccgcaggagggtgggtggagcaggtggactggagtttctcttgagggcaataaaagttgtcatggtgtgta

SEQ ID NO: 324909 - DNA, 1609 bp, Homo sapiens
tctcgcccctcggcggggcccctcccgcaccacagagacgtgggacggccgcgcggactagagaagcggccctcgccggcccgacaaagccccgccccgccccgcccgcgtgctcgctccaccccgccctgctcgcccggagcccgaggcgcctcttcctctcccgctcggagcgccggccctccgctccggggcggggtgggaagcggaggtgggcggagcctccggggcctcgcgagggctggtgggcggtgcccggcgggcgcttccggtttccggccgcggtatgaggggcggggccggggctgctgtgggagagttcggttgctgcggcggggcctgcacgttgactgtgggaaactcggaaacaagctcacatcttcctgtgggaaaccttctagcaacaggatgagtctgcagtggactgcagttgccaccttcctctatgcggaggtctttgttgtgttgcttctctgcattcccttcatttctcctaaaagatggcagaagattttcaagtcccggctggtggagttgttagtgtcctatggcaacaccttctttgtggttctcattgtcatccttgtgctgttggtcatcgatgccgtgcgcgaaattcggaagtatgatgatgtgacggaaaaggtgaacctccagaacaatcccggggccatggagcacttccacatgaagcttttccgtgcccagaggaatctctacattgctggcttttccttgctgctgtccttcctgcttagacgcctggtgactctcatttcgcagcaggccacgctgctggcctccaatgaagcctttaaaaagcaggcggagagtgctagtgaggcggccaagaagtacatggaggagaatgaccagctcaagaagggagctgctgttgacggaggcaagttggatgtcgggaatgctgaggtgaagttggaggaagagaacaggagcctgaaggctgacctgcagaagctaaaggacgagctggccagcactaagcaaagtcatttacatcatttcaagaactagagaaagctgaaaaccaggttctggccatgcggaagcagtctgagggcctcaccaaggagtacgaccgcttgctggaggagcacgcaaagctgcaggctgcagtagatggtcccatggacaagaaggaagagtaagggcctccttcctcccctgcctgcagctggcttccacctggcacgtgcctgctgcttcctgagagcccggcctctccctccagtacttctgtttgtgcccttctgcttcccccattcccttccacagctcatagctcgtcatctcggcccttgtccacactctccaagcacattacaggggacctgattgctacacgttcagaatgcgtttgctgtcatcctgcttggcctggccaggcctggcacagccttggcttccacgcctgagcgtggagagcacgagttagttgtagtccggcttgcggtggggctgacttcctgttggtttgagcccctttttgttttgccctctgggtgttttctttggtcccgcaggagggtgggtggagcaggtggactggagtttctcttgagggcaataaaagttgtcatggtgtgta

SEQ ID NO: 324910 - DNA, 772 bp, Homo sapiens
actctagaggatccccttcatatggcaaggccaagaagtacatggaggagaatgaccagctcaagaagggagctgctgttgacggaggcaagttggatgtcgggaatgctgaggtgaagttggaggaagagaacaggagcctgaaggctgacctgcagaagctaaaggacgagctggccagcactaagcaaaaactagagaaagctgaaaaccaggttctggccatgcggaagcagtctgagggcctcaccaaggagtacgaccgcttgctggaggagcacgcaaagctgcaggctgcagtagatggtcccatggacaagaaggaagagtaagggcctccttcctcccctgcctgcagctggcttccacctggcacgtgcctgctgcttcctgagagcccggcctctccctccagtacttctgtttgtgcccttctgcttcccccattcccttccacagctcatagctcgtcatctcggcccttgtccacactctccaagcacattacaggggacctgattgctacacgttcagaatgcgtttgctgtcatcctgcttggcctggccaggcctggcacagccttggcttccacgcctgagcgtggagagcacgagttagttgtagtccggcttgcggtggggctgacttcctgttggtttgagcccctttttgttttgccctctgggtgttttctttggtcccgcaggagggtgggtggagcaggtggactggagtttctcttgagggcaataaaagttgtcatggtgtgta

SEQ ID NO: 324911 - DNA, 1399 bp, Homo sapiens
tctcgcccctcggcggggcccctcccgcaccacagagacgtgggacggccgcgcggactagagaagcggccctcgccggcccgacaaagccccgccccgccccgcccgcgtgctcgctccaccccgccctgctcgcccggagcccgaggcgcctcttcctctcccgctcggagcgccggccctccgctccggggcggggtgggaagcggaggtgggcggagcctccggggcctcgcgagggctggtgggcggtgcccggcgggcgcttccggtttccggccgcggtatgaggggcggggccggggctgctgtgggagagttcggttgctgcggcggggcctgcacgttgactgtgggaaactcggaaacaagctcacatcttcctgtgggaaaccttctagcaacaggatgagtctgcagtggactgcagttgccaccttcctctatgcggaggtctttgttgtgttgcttctctgcattcccttcatttctcctaaaagatggcagaagattttcaagtcccggctggtggagttgttagtgtcctatggcaacaccttctttgtggttctcattgtcatccttgtgctgttggtcatcgatgccgtgcgcgaaattcggaagtatgatgatgtgacggaaaaggtgaacctccagaacaatcccggggccatggagcacttccacatgaagcttttccgtgcccagaggaatctctacattgctggcttttccttgctgctgtccttcctgcttagacgcctggtgactctcatttcgcagcaggccacgctgctggcctccaatgaagcctttaaaaagcaggcggagagtgctagtgaggcggccaagaagtacatggaggagaatgaccagctcaagaagggagctgctgttgacggaggcaagttggatgtcgggaatgctgaggtgaagttggaggaagagaacaggagcctgaaggctgacctgcagaagctaaaggacgagctggccagcactaagcaaaaactagagaaagctgaaaaccaggttctggccatgcggaagcagtctgagggcctcaccaaggagtacgaccgcttgctggaggagcacgcaaagctgcaggctgcagtagatggtcccatggacaagaaggaagagtaagggcctccttcctcccctgcctgcagctggcttccacctggcacgtgcctgctgcttcctgagagttccacgcctgagcgtggagagcacgagttagttgtagtccggcttgcggtggggctgacttcctgttggtttgagcccctttttgttttgccctctgggtgttttctttggtcccgcaggagggtgggtggagcaggtggactggagtttctcttgagggcaataaaagttgtcatggtgtgta

SEQ ID NO: 324912 - DNA, 1452 bp, Homo sapiens
tctcgcccctcggcggggcccctcccgcaccacagagacgtgggacggccgcgcggactagagaagcggccctcgccggcccgacaaagccccgccccgccccgcccgcgtgctcgctccaccccgccctgctcgcccggagcccgaggcgcctcttcctctcccgctcggagcgccggccctccgctccggggcggggtgggaagcggaggtgggcggagcctccggggcctcgcgagggctggtgggcggtgcccggcgggcgcttccggtttccggccgcggtatgaggggcggggccggggctgctgtgggagagttcggttgctgcggcggggcctgcacgttgactgtgggaaactcggaaacaagctcacatcttcctgtgggaaaccttctagcaacaggatgagtctgcagtggactgcagttgccaccttcctctatgcggaggtctttgttgtgttgcttctctgcattcccttcatttctcctaaaagatggcagaagattttcaagtcccggctggtggagttgttagtgtcctatggcaacaccttctttgtggttctcattgtcatccttgtgctgttggtcatcgatgccgtgcgcgaaattcggaagtatgatgatgtgacggaaaaggtgaacctccagaacaatcccggggccatggagcacttccacatgaagcttttccgtgcccagaggaatctctacattgctggcttttccttgctgctgtccttcctgcttagacgcctggtgactctcatttcgcagcaggccacgctgctggcctccaatgaagcctttaaaaagcaggcggagagtgctagtgaggcggccaagaagtacatggaggagaatgaccagctcaagaagggagctgctgttgacggaggcaagttggatgtcgggaatgctgaggtgaagttggaggaagagaacaggagcctgaaggctgacctgcagaagctaaaggacgagctggccagcactaagcaaaaactagagaaagctgaaaaccaggttctggccatgcggaagcagtctgagggcctcaccaaggagtacgaccgcttgctggaggagcacgcaaagctgcaggctgcagtagatggtcccatggacaagaaggaagagtaagggcctccttcctcccctgcctgcagctggcttccacctggcacgtgcctgctgcttcctgagagttgcatatcgcaaggccaagggggaacacagtgtttagtttccagctcactttgtacccctcacctctgcagacacggggagaaccccggacccctggcatgcatgctggcggcggcatgcctcccttccacaagcccatgctgctgcatagggagcctgtgtttgcaaaacccagtggactgcgctgggtctgctgtctgagcagctcctggctccggtgggaactgcacacaattc

SEQ ID NO: 324913 - DNA, 697 bp, Homo sapiens
ccgcttgcttcacggcggcgatgtttgcatctctctgacttggaaaacgccaagagaacaggagcctgaaggctgacctgcagaagctaaaggacgagctggccagcactaagcaaaaactagagaaagctgaaaaccaggttctggccatgcggaagcagtctgagggcctcaccaaggagtacgaccgcttgctggaggagcacgcaaagctgcaggctgcagtagatggtcccatggacaagaaggaagagtaagggcctccttcctcccctgcctgcagctggcttccacctggcacgtgcctgctgcttcctgagagcccggcctctccctccagtacttctgtttgtgcccttctgcttcccccattcccttccacagctcatagctcgtcatctcggcccttgtccacactctccaagcacattacaggggacctgattgctacacgttcagaatgcgtttgctgtcatcctgcttggcctggccaggcctggcacagccttggcttccacgcctgagcgtggagagcacgagttagttgtagtccggcttgcggtggggctgacttcctgttggtttgagcccctttttgttttgccctctgggtgttttctttggtcccgcaggagggtgggtggagcaggtggactggagtttctcttgagggcaataaaagttgtcatggtgtgta

SEQ ID NO: 324914 - DNA, 1220 bp, Homo sapiens
tctcgcccctcggcggggcccctcccgcaccacagagacgtgggacggccgcgcggactagagaagcggccctcgccggcccgacaaagccccgccccgccccgcccgcgtgctcgctccaccccgccctgctcgcccggagcccgaggcgcctcttcctctcccgctcggagcgccggccctccgctccggggcggggtgggaagcggaggtgggcggagcctccggggcctcgcgagggctggtgggcggtgcccggcgggcgcttccggtttccggccgcggtatgaggggcggggccggggctgctgtgggagagttcggttgctgcggcggggcctgcacgttgactgtgggaaactcggaaacaagctcacatcttcctgtgggaaaccttctagcaacaggatgagtctgcagtggactgcagttgccaccttcctctatgcggaggtctttgttgtgttgcttctctgcattcccttcatttctcctaaaagatggcagaagattttcaagtcccggctggtggagttgttagtgtcctatggcaacaccttctttgtggttctcattgtcatccttgtgctgttggtcatcgatgccgtgcgcgaaattcggaagtatgatgatgtgacggaaaaggtgaacctccagaacaatcccggggccatggagcacttccacatgaagcttttccgtgcccagaggaatctctacattgctggcttttccttgctgctgtccttcctgcttagacgcctggtgactctcatttcgcagcaggccacgctgctggcctccaatgaagcctttaaaaagcaggcggagagtgctagtgaggcggccaagaagtacatggaggagaatgaccagctcaagaagggagctgctgttgacggaggcaagttggatgtcgggaatgctgaggtgaagttggaggaagagaacaggagcctgaaggctgacctgcagaagctaaaggacgagctggccagcactaagcaaaaactagagaaagctgaaaaccaggttctggccatgcggaagcagtctgagggcctcaccaaggagtacgaccgcttgctggaggagcacgcaaagctgcagcttcagtaaatagttgtatctcccagaatgagtagtgggggcatccctgttatcctcacctactgcaagaggggccgtgtgtgagactgccgcgtcctgatgatggcctc

SEQ ID NO: 324915 - DNA, 528 bp, Homo sapiens
  misc_feature (24)..(24): n is a, c, g, or t
  misc_feature (38)..(38): n is a, c, g, or t
cgagcccggtaccccgcccgcaangctggaggagcacncaaagctgcaggctgcagtagatggtcccatggacaagaaggaagagtaagggcctccttcctcccctgcctgcagctggcttccacctggcacgtgcctgctgcttcctgagagcccggcctctccctccagtacttctgtttgtgcccttctgcttcccccattcccttccacagctcatagctcgtcatctcggcccttgtccacactctccaagcacattacaggggacctgattgctacacgttcagaatgcgtttgctgtcatcctgcttggcctggccaggcctggcacagccttggcttccacgcctgagcgtggagagcacgagttagttgtagtccggcttgcggtggggctgacttcctgttggtttgagcccctttttgttttgccctctgggtgttttctttggtcccgcaggagggtgggtggagcaggtggactggagtttctcttgagggcaataaaagttgtcatggtgtgta

SEQ ID NO: 324916 - DNA, 559 bp, Homo sapiens
  misc_feature (60)..(60): n is a, c, g, or t
ttgacagcgcgcatccgaactcgactgcgtactcaaggacatagttggaccgtgagctgnaggagcacgcaaagctgcaggctgcagtagatggtcccatggacaagaaggaagagtaagggcctccttcctcccctgcctgcagctggcttccacctggcacgtgcctgctgcttcctgagagcccggcctctccctccagtacttctgtttgtgcccttctgcttcccccattcccttccacagctcatagctcgtcatctcggcccttgtccacactctccaagcacattacaggggacctgattgctacacgttcagaatgcgtttgctgtcatcctgcttggcctggccaggcctggcacagccttggcttccacgcctgagcgtggagagcacgagttagttgtagtccggcttgcggtggggctgacttcctgttggtttgagcccctttttgttttgccctctgggtgttttctttggtcccgcaggagggtgggtggagcaggtggactggagtttctcttgagggcaataaaagttgtcatggtgtgta

SEQ ID NO: 324917 - DNA, 1388 bp, Homo sapiens
tctcgcccctcggcggggcccctcccgcaccacagagacgtgggacggccgcgcggactagagaagcggccctcgccggcccgacaaagccccgccccgccccgcccgcgtgctcgctccaccccgccctgctcgcccggagcccgaggcgcctcttcctctcccgctcggagcgccggccctccgctccggggcggggtgggaagcggaggtgggcggagcctccggggcctcgcgagggctggtgggcggtgcccggcgggcgcttccggtttccggccgcggtatgaggggcggggccggggctgctgtgggagagttcggttgctgcggcggggcctgcacgttgactgtgggaaactcggaaacaagctcacatcttcctgtgggaaaccttctagcaacaggatgagtctgcagtggactgcagttgccaccttcctctatgcggaggtctttgttgtgttgcttctctgcattcccttcatttctcctaaaagatggcagaagattttcaagtcccggctggtggagttgttagtgtcctatggcaacaccttctttgtggttctcattgtcatccttgtgctgttggtcatcgatgccgtgcgcgaaattcggaagtatgatgatgtgacggaaaaggtgaacctccagaacaatcccggggccatggagcacttccacatgaagcttttccgtgcccagaggaatctctacattgctggcttttccttgctgctgtccttcctgcttagacgcctggtgactctcatttcgcagcaggccacgctgctggcctccaatgaagcctttaaaaagcaggcggagagtgctagtgaggcggccaagaagtacatggaggagaatgaccagctcaagaagaagagaacaggagcctgaaggctgacctgcagaagctaaaggacgagctggccagcactaagcaaaaactagagaaagctgaaaaccaggttctggccatgcggaagcagtctgagggcctcaccaaggagtacgaccgcttgctggaggagcacgcaaagctgcaggcttcccccattcccttccacagctcatagctcgtcatctcggcccttgtccacactctccaagcacattacaggggacctgattgctacacgttcagaatgcgtttgctgtcatcctgcttggcctggccaggcctggcacagccttggcttccacgcctgagcgtggagagcacgagttagttgtagtccggcttgcggtggggctgacttcctgttggtttgagcccctttttgttttgccctctgggtgttttctttggtcccgcaggagggtgggtggagcaggtggactggagtttctcttgagggcaataaaagttgtcatggtgtgta

SEQ ID NO: 324918 - DNA, 840 bp, Homo sapiens
cggacgcgtgggtcgacccacgcgtcggtcatccttgtgctgttggtcatcgatgccgtgcgcgaaattcggaagtatgatgatgtgacggaaaaggtgaacctccagaacaatcccggggccatggagcacttccacatgaagcttttccgtgcccagaggaatctctacattgctggcttttccttgctgctgtccttcctgcttagacgcctggtgactctcatttcgcagcaggccacgctgctggcctccaatgaagcctttaaaaagcaggcggagagtgctagtgaggcggccaagaagtacatggaggagaatgaccagctcaagaagggagctgctgttgacggaggcaagttggatgtcgggaatgctgaggtgaagttggaggaagagaacaggagcctgaaggctgacctgcagctggcttccacctggcacgtgcctgctgcttcctgagagcccggcctctccctccagtacttctgtttgtgcccttctgcttcccccattcccttccacagctcatagctcgtcatctcggcccttgtccacactctccaagcacattacaggggacctgattgctacacgttcagaatgcgtttgctgtcatcctgcttggcctggccaggcctggcacagccttggcttccacgcctgagcgtggagagcacgagttagttgtagtccggcttgcggtggggctgacttcctgttggtttgagcccctttttgttttgccctctgggtgttttctttggtcccgcaggagggtgggtggagcaggtggactggagtttctcttgagggcaataaaagttgtcatggtgtgta

SEQ ID NO: 324919 - DNA, 492 bp, Homo sapiens
agacatagaagaagtgcaggttgttacataggtatacatgtgccaggtgatttgctgcacctatcaacctgtcatctaggttttaagcccctcatacattaggtgtttgttctaatgcccggcctctccctccagtacttctgtttgtgcccttctgcttcccccattcccttccacagctcatagctcgtcatctcggcccttgtccacactctccaagcacattacaggggacctgattgctacacgttcagaatgcgtttgctgtcatcctgcttggcctggccaggcctggcacagccttggcttccacgcctgagcgtggagagcacgagttagttgtagtccggcttgcggtggggctgacttcctgttggtttgagcccctttttgttttgccctctgggtgttttctttggtcccgcaggagggtgggtggagcaggtggactggagtttctcttgagggcaataaaagttgtcatggtgtgta

SEQ ID NO: 324920 - DNA, 2188 bp, Homo sapiens
  misc_feature (27)..(27): n is a, c, g, or t
  misc_feature (31)..(31): n is a, c, g, or t
aaagttaggctaggtacgaggcctggntgtngtaatcggccgaggagcccgaggcgcctcttcctctcccgctcggagcgccggccctccgctccggggcggggtgggaagcggaggtgggcggagcctccggggcctcgcgagggctggtgggcggtgcccggcgggcgcttccggtttccggccgcggtatgaggggcggggccggggctgctgtgggagagttcggttgctgcggcggggcctgcacgttgactgtgggaaactcggtgagcgggctccgcgcgccgggctgggctccgggaccgcggaggctccccggcccatcgacgagggagagaggcgagcggcgcggggaggcccgggggccggggaatctcggggcccgcagcctacctgcgtgtgagaggcaggggcgaggggaaaccgggcggcgcctctagaagctggtctcgggggcggggcggggggcggtgaagccccacctggaggagcggccgggatgggcctccgggacggtgtgccaggccggggccaagtcggaggcccctcgctctgggtgggcgctggggcccgcgagggctactgtaaggacccctggcttctgaggatactgcgtctagaactttctccgtatggggccttgaggtgcttggtcgagacctgcctttgcgcttggtcccgaatcctgccctctaggagtcgctcttgcgggcctccagcccaccggaggcgaagcggccccgggcggaaggccgctggatcctcgagggaggtgccggtttctctccgcgggcgccgtggggacggtgggaggcgggggcgtcggcagcgcttggactaggtgcggccttgggcctgcctggtagcggggatttgggcccgcagagcgcccgcctctgcggctgagttctgcctggcggggaagggagcgcccgatgggtgccgaggcgtcctcctcttggtgccctggcactgctcttcccgaagaacgcctttcagttaaacgggcgtcggaaatctcgggcttcctggggcagggatcgtcgggagaggccgctctggacgtgttgacacacgtgctggagggggcaggaaacaagctcacatcttcctgtgggaaaccttctagcaacaggatgagtctgcagtggactgcagttgccaccttcctctatgcggaggtctttgttgtgttgcttctctgcattcccttcatttctcctaaaagatggcagaagattttcaagtcccggctggtggagttgttagtgtcctatggcaacaccccggcctctccctccagtacttctgtttgtgcccttctgcttcccccattcccttccacagctcatagctcgtcatctcggcccttgtccacactctccaagcacattacaggggacctgattgctacacgttcagaatgcgtttgctgtcatcctgcttggcctggccaggcctggcacagccttggcttccacgcctgagcgtggagagcacgagttagttgtagtccggcttgcggtggggctgacttcctgttggtttgagcccctttttgttttgccctctgggtgttttctttggtcccgcaggagggtgggtggagcaggtggactggagtttctcttgagggcaataaaagttgtcatggtgtgtaaaaaaaaaaaaaaaaaaaaaaaaaaaaaaaaaaaaaaaaaaaaaaaaaaaaaaaaaaaaaaaaaacaagaacagcaagacaaaaacaacagagggggggcggcgacaaagagataaaatcaaccggggggggagcgaacactaagtgcagacgaccaccgcacgtacttgtgagaagacaaggggcccacccctagtggacgggcgcgctatacaagtacgacgtacgcagcgcgaggcgagtacacagcccacgggcggcgagcgggaccacagccagccccgcgcccgggggcatcttcccgggcgaaaacagcgaacaccacacccgcggggaggggcagcgaccatgggaggggaaagcagacaccgagagcggcaggatccgacgccacgcccgggagcgcaaagaacaaaagccgcgccgcgccgaagtcggcgggggttcacccccacgcgccgctgccgcgggcgcgacatgcagagacctccgcggccgcagggactaacaagagggcaacaggcc

SEQ ID NO: 324921 - DNA, 923 bp, Homo sapiens
  misc_feature (11)..(13): n is a, c, g, or t
tggggggaacnnnaaaaaaaacattagctagtcgaggcctgggttagctagaactttctccgtatggggccttgaggtgcttggtcgagacctgcctttgcgcttggtcccgaatcctgccctctaggagtcgctcttgcgggcctccagcccaccggaggcgaagcggccccgggcggaaggccgctggatcctcgagggaggtgccggtttctctccgcgggcgccgtggggacggtgggaggcgggggcgtcggcagcgcttggactaggtgcggccttgggcctgcctggtagcggggatttgggcccgcagagcgcccgcctctgcggctgagttctgcctggcggggaagggagcgcccgatgggtgccgaggcgtcctcctcttggtgccctggcactgctcttcccgaagaacgcctttcagttaaacgggcgtcggaaatctcgggcttcctggggcagggatcgtcgggagaggccgctctggacgtgttgacacacgtgctggagggggcaggaaacaagctcacatcttcctgtgggaaaccttctagcaacaggatgagtctgcagtggactgcagttgccaccttcctctatgcggaggtctttgttgtgttgcttctctgcattcccttcatttctcctaaaagatggcagaagattttcaagtcccggctggtggagttgttagtgtcctatggcaacaccttctttgtggttctcattgtcatccttgtgctgttggtcatcgatgccgtgcgcgaaattcggaagtatgatgatgtgacggaaaaggtgaacctccagaacaatcccggggccatggagcacttccacatgaagcttttccgtgcccagaggaatctctacattggagtttctcttgagggcaataaaagttgtcatggtgtgta

SEQ ID NO: 324922 - DNA, 660 bp, Homo sapiens
  misc_feature (27)..(27): n is a, c, g, or t
  misc_feature (31)..(31): n is a, c, g, or t
aaagttaggctaggtacgaggcctggntgtngtaatcggccgaggagcccgaggcgcctcttcctctcccgctcggagcgccggccctccgctccggggcggggtgggaagcggaggtgggcggagcctccggggcctcgcgagggctggtgggcggtgcccggcgggcgcttccggtttccggccgcggtatgaggggcggggccggggctgctgtgggagagttcggttgctgcggcggggcctgcacgttgactgtgggaaactcggtgagcgggctccgcgcgccgggctgggctccgggaccgcggaggctccccggcccatcgacgagggagagaggcgagcggcgcggggaggcccgggggccggggaatctcggggcccgcagcctacctgcgtgaaacaagctcacatcttcctgtgggaaaccttctagcaacaggatgagtctgcagtggactgcagttgccacttccacgcctgagcgtggagagcacgagttagttgtagtccggcttgcggtggggctgacttcctgttggtttgagcccctttttgttttgccctctgggtgttttctttggtcccgcaggagggtgggtggagcaggtggactggagtttctcttgagggcaataaaagttgtcatggtgtgta

SEQ ID NO: 324923 - DNA, 248 bp, Homo sapiens
ctccattaaagggactgggggatggcctctgtgtttcttttgctttatcttgagcttttttgtcagccctttccctctactttgggggcctgcaaaagcagaggggctttattttgagaagtagcctcctgtataacctcgtttgagatagatttgggccagtttctggtgtctgtagcagtcgggttttttccccctaattcctgtcttttcgtttctgttttcttggtcatttacatcatttcaag

SEQ ID NO: 324924 - DNA, 381 bp, Homo sapiens
cctccagtacttctgtttgtgcccttctgcttcccccattcccttccacagctcatagctcgtcatctcggcccttgtccacactctccaagcacattacaggggacctgattgctacacgttcagaatgcgtttgctgtcatcctgcttggcctggccaggcctggcacagccttggcttccacgcctgagcgtggagagcacgagttagttgtagtccggcttgcggtggggctgacttcctgttggtttgagcccctttttgttttgccctctgggtgttttctttggtcccgcaggagggtgggtggagcaggtggactggagtttctcttgagggcaataaaagttgtcatggtgtgtaacgtggtgcggtgtgtg

SEQ ID NO: 324925 - DNA, 507 bp, Homo sapiens
tggaagccagctgcaggcaggcgaggaaggaggcccttactcttccttcttgtccatgggaccatctactgcagcctgcagctttgcgtgctcctccagcaagcggtcgtactccttggtgaggccctcagacccggcctctccctccagtacttctgtttgtgcccttctgcttcccccattcccttccacagctcatagctcgtcatctcggcccttgtccacactctccaagcacattacaggggacctgattgctacacgttcagaatgcgtttgctgtcatcctgcttggcctggccaggcctggcacagccttggcttccacgcctgagcgtggagagcacgagttagttgtagtccggcttgcggtggggctgacttcctgttggtttgagcccctttttgttttgccctctgggtgttttctttggtcccgcaggagggtgggtggagcaggtggactggagtttctcttgagggcaataaaagttgtcatggtgtgta

SEQ ID NO: 324926 - DNA, 1589 bp, Homo sapiens
tctcgcccctcggcggggcccctcccgcaccacagagacgtgggacggccgcgcggactagagaagcggccctcgccggcccgacaaagccccgccccgccccgcccgcgtgctcgctccaccccgccctgctcgcccggagcccgaggcgcctcttcctctcccgctcggagcgccggccctccgctccggggcggggtgggaagcggaggtgggcggagcctccggggcctcgcgagggctggtgggcggtgcccggcgggcgcttccggtttccggccgcggtatgaggggcggggccggggctgctgtgggagagttcggttgctgcggcggggcctgcacgttgactgtgggaaactcggaaacaagctcacatcttcctgtgggaaaccttctagcaacaggatgagtctgcagtggactgcagttgccaccttcctctatgcggaggtctttgttgtgttgcttctctgcattcccttcatttctcctaaaagatggcagaagattttcaagtcccggctggtggagttgttagtgtcctatggcaacaccttctttgtggttctcattgtcatccttgtgctgttggtcatcgatgccgtgcgcgaaattcggaagtatgatgatgtgacggaaaaggtgaacctccagaacaatcccggggccatggagcacttccacatgaagcttttccgtgcccagaggaatctctacattgctggcttttccttgctgctgtccttcctgcttagacgcctggtgactctcatttcgcagcaggccacgctgctggcctccaatgaagcctttaaaaagcaggcggagagtgctagtgaggcggccaagaagtacatggaggagaatgaccagctcaagaagggagctgctgttgacggaggcaagttggatgtcgggaatgctgaggtgaagttggaggaagagaacaggagcctgaaggctgacctgcagaagctaaaggacgagctggccagcactaagcaaaaactagagaaagctgaaaaccaggttctggccatgcggaagcagtctgagggcctcaccaaggagtacgaccgcttgctggaggagcacgcaaagctgcaggctgcagtagatggtcccatggacaagaaggaagagtaagggcctccttcctcccctgcctgcagctggcttccacctggcacgtgcctgctgcttcctgagagcccggcctctccctccagtacttctgtttgtgcccttctgcttcccccattcccttccacagctcatagctcgtcatctcggcccttgtccacactctccaagcacattacaggggacctgattgctacacgttcagaatgcgtttgctgtcatcctgcttggcctggccaggcctggcacagccttggcttccacgcctgagcgtggagagcacgagttagttgtagtccggcttgcggtggggctgacttcctgttggtttgagcccctttttgttttgccctctgggtgttttctttggtcccgcaggagggtgggtggagcaggtggactggagtttctcttgagggcaataaaagttgtcatggtgtgta

SEQ ID NO: 324927 - DNA, 1534 bp, Homo sapiens
  misc_feature (232)..(232): n is a, c, g, or t
agtgtggacaagggccgagatgacgagctatgagctgtggaagggaatgggggaagcagaagggcacaaacagaagtactggaggaagagaacaggagcctgaaggctgacctgcagaagctataggacgagctggccagcactaagcaaaaactagagaaagctgaaaaccaggttctggccatgcggaagcagtctgagggcctcaccaaggagtacgaccgcttgctgnaggagcacgcaaagctgcaggctgtgggagagttcggttgctgcggcggggcctgcacgttgactgtgggaaactcggaaacaagctcacatcttcctgtgggaaaccttctagcaacaggatgagtctgcagtggactgcagttgccaccttcctctatgcggaggtctttgttgtgttgcttctctgcattcccttcatttctcctaaaagatggcagaagattttcaagtcccggctggtggagttgttagtgtcctatggcaacaccttctttgtggttctcattgtcatccttgtgctgttggtcatcgatgccgtgcgcgaaattcggaagtatgatgatgtgacggaaaaggtgaacctccagaacaatcccggggccatggagcacttccacatgaagcttttccgtgcccagaggaatctctacattgctggcttttccttgctgctgtccttcctgcttagacgcctggtgactctcatttcgcagcaggccacgctgctggcctccaatgaagcctttaaaaagcaggcggagagtgctagtgaggcggccaagaagtacatggaggagaatgaccagctcaagaagggagctgctgttgacggaggcaagttggatgtcgggaatgctgaggtgaagttggaggaagagaacaggagcctgaaggctgacctgcagaagctaaaggacgagctggccagcactaagcaaaaactagagaaagctgaaaaccaggttctggccatgcggaagcagtctgagggcctcaccaaggagtacgaccgcttgctggaggagcacgcaaagctgcaggctgcagtagatggtcccatggacaagaaggaagagtaagggcctccttcctcccctgcctgcagctggcttccacctggcacgtgcctgctgcttcctgagagcccggcctctccctccagtacttctgtttgtgcccttctgcttcccccattcccttccacagctcatagctcgtcatctcggcccttgtccacactctccaagcacattacaggggacctgattgctacacgttcagaatgcgtttgctgtcatcctgcttggcctggccaggcctggcacagccttggcttccacgcctgagcgtggagagcacgagttagttgtagtccggcttgcggtggggctgacttcctgttggtttgagcccctttttgttttgccctctgggtgttttctttggtcccgcaggagggtgggtggagcaggtggactggagtttctcttgagggcaataaaagttgtcatggtgtgta

SEQ ID NO: 324928 - DNA, 1429 bp, Homo sapiens
  misc_feature (123)..(123): n is a, c, g, or t
gagttagttgtagtccggcttgcggtggggctgactcgtgctctccacgctcaggcgtggaagccaaggctgtgccaggcctggccaggccaagcaggatgacagcaaacgcattctgaacgngtagcaatcaggtcccctgtaatggctgtgggagagttcggttgctgcggcggggcctgcacgttgactgtgggaaactcggaaacaagctcacatcttcctgtgggaaaccttctagcaacaggatgagtctgcagtggactgcagttgccaccttcctctatgcggaggtctttgttgtgttgcttctctgcattcccttcatttctcctaaaagatggcagaagattttcaagtcccggctggtggagttgttagtgtcctatggcaacaccttctttgtggttctcattgtcatccttgtgctgttggtcatcgatgccgtgcgcgaaattcggaagtatgatgatgtgacggaaaaggtgaacctccagaacaatcccggggccatggagcacttccacatgaagcttttccgtgcccagaggaatctctacattgctggcttttccttgctgctgtccttcctgcttagacgcctggtgactctcatttcgcagcaggccacgctgctggcctccaatgaagcctttaaaaagcaggcggagagtgctagtgaggcggccaagaagtacatggaggagaatgaccagctcaagaagggagctgctgttgacggaggcaagttggatgtcgggaatgctgaggtgaagttggaggaagagaacaggagcctgaaggctgacctgcagaagctaaaggacgagctggccagcactaagcaaaaactagagaaagctgaaaaccaggttctggccatgcggaagcagtctgagggcctcaccaaggagtacgaccgcttgctggaggagcacgcaaagctgcaggctgcagtagatggtcccatggacaagaaggaagagtaagggcctccttcctcccctgcctgcagctggcttccacctggcacgtgcctgctgcttcctgagagcccggcctctccctccagtacttctgtttgtgcccttctgcttcccccattcccttccacagctcatagctcgtcatctcggcccttgtccacactctccaagcacattacaggggacctgattgctacacgttcagaatgcgtttgctgtcatcctgcttggcctggccaggcctggcacagccttggcttccacgcctgagcgtggagagcacgagttagttgtagtccggcttgcggtggggctgacttcctgttggtttgagcccctttttgttttgccctctgggtgttttctttggtcccgcaggagggtgggtggagcaggtggactggagtttctcttgagggcaataaaagttgtcatggtgtgta

SEQ ID NO: 324929 - DNA, 1847 bp, Homo sapiens
tctcgcccctcggcggggcccctcccgcaccacagagacgtgggacggccgcgcggactagagaagcggccctcgccggcccgacaaagccccgccccgccccgcccgcgtgctcgctccaccccgccctgctcgcccggagcccgaggcgcctcttcctctcccgctcggagcgccggccctccgctccggggcggggtgggaagcggaggtgggcggagcctccggggcctcgcgagggctggtgggcggtgcccggcgggcgcttccggtttccggccgcggtatgaggggcggggccggggctgctgtgggagagttcggttgctgcggcggggcctgcacgttgactgtgggaaactcggaaacaagctcacatcttcctgtgggaaaccttctagcaacaggatgagtctgcagtggactgcagttgccaccttcctctatgcggaggtctttgttgtgttgcttctctgcattcccttcatttctcctaaaagatggcagaagattttcaagtcccggctggtggagttgttagtgtcctatggcaacaccttctttgtggttctcattgtcatccttgtgctgttggtcatcgatgccgtgcgcgaaattcggaagtatgatgatgtgacggaaaaggtgaacctccagaacaatcccggggccatggagcacttccacatgaagcttttccgtgcccagaggaatctctacattgctggcttttccttgctgctgtccttcctgcttagacgcctggtgactctcatttcgcagcaggccacgctgctggcctccaatgaagcctttaaaaagcaggcggagagtgctagtgaggcggccaagaagtacatggaggagaatgaccagctcaagaagggagctgctgttgacggaggcaagttggatgtcgggaatgctgaggtgaagttggaggaagagaacaggagcctgaaggctgacctgcagaagctaaaggacgagctggccagcactaagcaaaaactagagaaagctgaaaaccaggttctggccatgcggaagcagtctgagggcctcaccaaggagtacgaccgcttgctggaggagcacgcaaagctgcaggctgcagtagatggtcccatggacaagaaggaagagtaagggcctccttcctcccctgcctgcagctggcttccacctggcacgtgcctgctgcttcctgagagcccggcctctccctccagtacttctgtttgtgcccttctgcttcccccattcccttccacagctcatagctcgtcatctcggcccttgtccacactctccaagcacattacaggggacctgattgctacacgttcagaatgcgtttgctgtcatcctgcttggcctggccaggcctggcacagccttggcttccacgcctgagcgtggagagcacgagttagttgtagtccggcttgcggtggggctgacttcctgttggtttgagcccctttttgttttgccctctgggtgttttctttggtcccgcaggagggtgggtggagcaggtggactggagtttctcttgagggcaataaaagttgtcatggtgtgtattgtatgtgttttgtatttctctggagtgcaatggtgcaatctcagctcactgcaacctctgcctcccaggttcaaaccattctcttgcctcagcctcctgagcagctgggattacaggcgctggccacacacccagctgattgttgtatttttagtagagctgggtttcaccatgttggccaggctggtctcgaactcctgacctcaggcaatccacccacctcagcctcccaacatgctgcaattacagatgtgag

SEQ ID NO: 324930 - DNA, 2320 bp, Homo sapiens
  misc_feature (27)..(27): n is a, c, g, or t
  misc_feature (31)..(31): n is a, c, g, or t
aaagttaggctaggtacgaggcctggntgtngtaatcggccgaggagcccgaggcgcctcttcctctcccgctcggagcgccggccctccgctccggggcggggtgggaagcggaggtgggcggagcctccggggcctcgcgagggctggtgggcggtgcccggcgggcgcttccggtttccggccgcggtatgaggggcggggccggggctgctgtgggagagttcggttgctgcggcggggcctgcacgttgactgtgggaaactcggtgagcgggctccgcgcgccgggctgggctccgggaccgcggaggctccccggcccatcgacgagggagagaggcgagcggcgcggggaggcccgggggccggggaatctcggggcccgcagcctacctgcgtgtgagaggcaggggcgaggggaaaccgggcggcgcctctagaagctggtctcgggggcggggcggggggcggtgaagccccacctggaggagcggccgggatgggcctccgggacggtgtgccaggccggggccaagtcggaggcccctcgctctgggtgggcgctggggcccgcgagggctactgtaaggacccctggcttctgaggatactgcgtctagaactttctccgtatggggccttgaggtgcttggtcgagacctgcctttgcgcttggtcccgaatcctgccctctaggagtcgctcttgcgggcctccagcccaccggaggcgaagcggccccgggcggaaggccgctggatcctcgagggaggtgccggtttctctccgcgggcgccgtggggacggtgggaggcgggggcgtcggcagcgcttggactaggtgcggccttgggcctgcctggtagcggggatttgggcccgcagagcgcccgcctctgcggctgagttctgcctggcggggaagggagcgcccgatgggtgccgaggcgtcctcctcttggtgccctggcactgctcttcccgaagaacgcctttcagttaaacgggcgtcggaaatctcgggcttcctggggcagggatcgtcgggagaggccgctctggacgtgttgacacacgtgctggagggggcaggaaacaagctcacatcttcctgtgggaaaccttctagcaacaggatgagtctgcagtggactgcagttgccaccttcctctatgcggaggtctttgttgtgttgcttctctgcattcccttcatttctcctaaaagatggcagaagattttcaagtcccggctggtggagttgttagtgtcctatggcaacaccttctttgtggttctcattgtcatccttgtgctgttggtcatcgatgccgtgcgcgaaattcggaagtatgatgatgtgacggaaaaggtgaacctccagaacaatcccggggccatggagcacttccacatgaagcttttccgtgcccagaggaatctctacattgctggcttttccttgctgctgtccttcctgcttagacgcctggtgactctcatttcgcagcaggccacgctgctggcctccaatgaagcctttaaaaagcaggcggagagtgctagtgaggcggccaagaagtacatggaggagaatgaccagctcaagaagggagctgctgttgacggaggcaagttggatgtcgggaatgctgaggtgaagttggaggaagagaacaggagcctgaaggctgacctgcagaagctaaaggacgagctggccagcactaagcaaaaactagagaaagctgaaaaccaggttctggccatgcggaagcagtctgagggcctcaccaaggagtacgaccgcttgctggaggagcacgcaaagctgcaggctgcagtagatggtcccatggacaagaaggaagagtaagggcctccttcctcccctgcctgcagctggcttccacctggcacgtgcctgctgcttcctgagagcccggcctctccctccagtacttctgtttgtgcccttctgcttcccccattcccttccacagctcatagctcgtcatctcggcccttgtccacactctccaagcacattacaggggacctgattgctacacgttcagaatgcgtttgctgtcatcctgcttggcctggccaggcctggcacagccttggcttccacgcctgagcgtggagagcacgagttagttgtagtccggcttgcggtggggctgacttcctgttggtttgagcccctttttgttttgccctctgggtgttttctttggtcccgcaggagggtgggtggagcaggtggactggagtttctcttgagggcaataaaagttgtcatggtgtgta

SEQ ID NO: 324931 - DNA, 1715 bp, Homo sapiens
  misc_feature (1591)..(1591): n is a, c, g, or t
  misc_feature (1594)..(1594): n is a, c, g, or t
  misc_feature (1596)..(1596): n is a, c, g, or t
  misc_feature (1601)..(1601): n is a, c, g, or t
  misc_feature (1625)..(1625): n is a, c, g, or t
  misc_feature (1628)..(1628): n is a, c, g, or t
  misc_feature (1632)..(1632): n is a, c, g, or t
  misc_feature (1637)..(1637): n is a, c, g, or t
tctcgcccctcggcggggcccctcccgcaccacagagacgtgggacggccgcgcggactagagaagcggccctcgccggcccgacaaagccccgccccgccccgcccgcgtgctcgctccaccccgccctgctcgcccggagcccgaggcgcctcttcctctcccgctcggagcgccggccctccgctccggggcggggtgggaagcggaggtgggcggagcctccggggcctcgcgagggctggtgggcggtgcccggcgggcgcttccggtttccggccgcggtatgaggggcggggccggggctgctgtgggagagttcggttgctgcggcggggcctgcacgttgactgtgggaaactcggaaacaagctcacatcttcctgtgggaaaccttctagcaacaggatgagtctgcagtggactgcagttgccaccttcctctatgcggaggtctttgttgtgttgcttctctgcattcccttcatttctcctaaaagatggcagaagattttcaagtcccggctggtggagttgttagtgtcctatggcaacaccttctttgtggttctcattgtcatccttgtgctgttggtcatcgatgccgtgcgcgaaattcggaagtatgatgatgtgacggaaaaggtgaacctccagaacaatcccggggccatggagcacttccacatgaagcttttccgtgcccagaggaatctctacattgctggcttttccttgctgctgtccttcctgcttagacgcctggtgactctcatttcgcagcaggccacgctgctggcctccaatgaagcctttaaaaagcaggcggagagtgctagtgaggcggccaagaagtacatggaggagaatgaccagctcaagaagggagctgctgttgacggaggcaagttggatgtcgggaatgctgaggtgaagttggaggaagagaacaggagcctgaaggctgacctgcagaagctaaaggacgagctggccagcactaagcaaaaactagagaaagctgaaaaccaggttctggccatgcggaagcagtctgagggcctcaccaaggagtacgaccgcttgctggaggagcacgcaaagctgcaggctgcagtagatggtcccatggacaagaaggaagagtaagggcctccttcctcccctgcctgcagctggcttccacctggcacgtgcctgctgcttcctgagagcccggcctctccctccagtacttctgtttgtgcccttctgcttcccccattcccttccacagctcatagctcgtcatctcggcccttgtccacactctccaagcacattacaggggacctgattgctacacgttcagaatgcgtttgctgtcatcctgcttggcctggccaggcctggcacagccttggcttccacgcctgagcgtggagagcacgagttagttgtagtccggcttgcggtggggctgacttcctgttggtttgagcccctttttgttttgccctctgggtgttttctttggtcccgcaggagggtgggtggagcaggtggactggagtttctcttgagggcaataaaagttgtcatggtgtgtacnacnanaccanggggcggctaaaatcccggggccngtnccgncccgnttttgaacgggccctagggcgcttaaagggggccgtaacacgtgggaagccggctgggcccccgggatgggcccaatg

SEQ ID NO: 324932 - DNA, 2114 bp, Homo sapiens
tctcgcccctcggcggggcccctcccgcaccacagagacgtgggacggccgcgcggactagagaagcggccctcgccggcccgacaaagccccgccccgccccgcccgcgtgctcgctccaccccgccctgctcgcccggagcccgaggcgcctcttcctctcccgctcggagcgccggccctccgctccggggcggggtgggaagcggaggtgggcggagcctccggggcctcgcgagggctggtgggcggtgcccggcgggcgcttccggtttccggccgcggtatgaggggcggggccggggctgctgtgggagagttcggttgctgcggcggggcctgcacgttgactgtgggaaactcggaaacaagctcacatcttcctgtgggaaaccttctagcaacaggatgagtctgcagtggactgcagttgccaccttcctctatgcggaggtctttgttgtgttgcttctctgcattcccttcatttctcctaaaagatggcagaagattttcaagtcccggctggtggagttgttagtgtcctatggcaacaccttctttgtggttctcattgtcatccttgtgctgttggtcatcgatgccgtgcgcgaaattcggaagtatgatgatgtgacggaaaaggtgaacctccagaacaatcccggggccatggagcacttccacatgaagcttttccgtgcccagaggaatctctacattgctggcttttccttgctgctgtccttcctgcttagacgcctggtgactctcatttcgcagcaggccacgctgctggcctccaatgaagcctttaaaaagcaggcggagagtgctagtgaggcggccaagaagtacatggaggagaatgaccagctcaagaagggagctgctgttgacggaggcaagttggatgtcgggaatgctgaggtgaagttggaggaagagaacaggagcctgaaggctgacctgcagaagctaaaggacgagctggccagcactaagcaaaaactagagaaagctgaaaaccaggttctggccatgcggaagcagtctgagggcctcaccaaggagtacgaccgcttgctggaggagcacgcaaagctgcaggctgcagtagatggtcccatggacaagaaggaagagtaagggcctccttcctcccctgcctgcagctggcttccacctggcacgtgcctgctgcttcctgagagcccggcctctccctccagtacttctgtttgtgcccttctgcttcccccattcccttccacagctcatagctcgtcatctcggcccttgtccacactctccaagcacattacaggggacctgattgctacacgttcagaatgcgtttgctgtcatcctgcttggcctggccaggcctggcacagccttggcttccacgcctgagcgtggagagcacgagttagttgtagtccggcttgcggtggggctgacttcctgttggtttgagcccctttttgttttgccctctgggtgttttctttggtcccgcaggagggtgggtggagcaggtggactggagtttctcttgagggcaataaaagttgtcatggtgtgtaaaaaaaaaaaaaaaaaaaaaaaaaaaaaaaaaaaaaaaaaaaaaaaaaaaaaaaaaaaaaaaaaacaagaacagcaagacaaaaacaacagagggggggcggcgacaaagagataaaatcaaccggggggggagcgaacactaagtgcagacgaccaccgcacgtacttgtgagaagacaaggggcccacccctagtggacgggcgcgctatacaagtacgacgtacgcagcgcgaggcgagtacacagcccacgggcggcgagcgggaccacagccagccccgcgcccgggggcatcttcccgggcgaaaacagcgaacaccacacccgcggggaggggcagcgaccatgggaggggaaagcagacaccgagagcggcaggatccgacgccacgcccgggagcgcaaagaacaaaagccgcgccgcgccgaagtcggcgggggttcacccccacgcgccgctgccgcgggcgcgacatgcagagacctccgcggccgcagggactaacaagagggcaacaggcc

SEQ ID NO: 324933 - DNA, 1274 bp, Homo sapiens
tgtgtagctgattctgtgttcccgttcggcatacttggaagcacgccgcgaaacaagctcacatcttcctgtgggaaaccttctagcaacaggatgagtctgcagtggactgcagttgccaccttcctctatgcggaggtctttgttgtgttgcttctctgcattcccttcatttctcctaaaagatggcagaagattttcaagtcccggctggtggagttgttagtgtcctatggcaacaccttctttgtggttctcattgtcatccttgtgctgttggtcatcgatgccgtgcgcgaaattcggaagtatgatgatgtgacggaaaaggtgaacctccagaacaatcccggggccatggagcacttccacatgaagcttttccgtgcccagaggaatctctacattgctggcttttccttgctgctgtccttcctgcttagacgcctggtgactctcatttcgcagcaggccacgctgctggcctccaatgaagcctttaaaaagcaggcggagagtgctagtgaggcggccaagaagtacatggaggagaatgaccagctcaagaagggagctgctgttgacggaggcaagttggatgtcgggaatgctgaggtgaagttggaggaagagaacaggagcctgaaggctgacctgcagaagctaaaggacgagctggccagcactaagcaaaaactagagaaagctgaaaaccaggttctggccatgcggaagcagtctgagggcctcaccaaggagtacgaccgcttgctggaggagcacgcaaagctgcaggctgcagtagatggtcccatggacaagaaggaagagtaagggcctccttcctcccctgcctgcagctggcttccacctggcacgtgcctgctgcttcctgagagcccggcctctccctccagtacttctgtttgtgcccttctgcttcccccattcccttccacagctcatagctcgtcatctcggcccttgtccacactctccaagcacattacaggggacctgattgctacacgttcagaatgcgtttgctgtcatcctgcttggcctggccaggcctggcacagccttggcttccacgcctgagcgtggagagcacgagttagttgtagtccggcttgcggtggggctgacttcctgttggtttgagcccctttttgttttgccctctgggtgttttctttggtcccgcaggagggtgggtggagcaggtggactggagtttctcttgagggcaataaaagttgtcatggtgtgta

SEQ ID NO: 324934 - DNA, 1341 bp, Homo sapiens
  misc_feature (27)..(27): n is a, c, g, or t
  misc_feature (31)..(31): n is a, c, g, or t
aaagttaggctaggtacgaggcctggntgtngtaatcggccgaggagcccgaggcgcctcttcctctcccgctcggagcgccggccctccgctccggggcggggtgggaagcggaggaaacaagctcacatcttcctgtgggaaaccttctagcaacaggatgagtctgcagtggactgcagttgccaccttcctctatgcggaggtctttgttgtgttgcttctctgcattcccttcatttctcctaaaagatggcagaagattttcaagtcccggctggtggagttgttagtgtcctatggcaacaccttctttgtggttctcattgtcatccttgtgctgttggtcatcgatgccgtgcgcgaaattcggaagtatgatgatgtgacggaaaaggtgaacctccagaacaatcccggggccatggagcacttccacatgaagcttttccgtgcccagaggaatctctacattgctggcttttccttgctgctgtccttcctgcttagacgcctggtgactctcatttcgcagcaggccacgctgctggcctccaatgaagcctttaaaaagcaggcggagagtgctagtgaggcggccaagaagtacatggaggagaatgaccagctcaagaagggagctgctgttgacggaggcaagttggatgtcgggaatgctgaggtgaagttggaggaagagaacaggagcctgaaggctgacctgcagaagctaaaggacgagctggccagcactaagcaaaaactagagaaagctgaaaaccaggttctggccatgcggaagcagtctgagggcctcaccaaggagtacgaccgcttgctggaggagcacgcaaagctgcaggctgcagtagatggtcccatggacaagaaggaagagtaagggcctccttcctcccctgcctgcagctggcttccacctggcacgtgcctgctgcttcctgagagcccggcctctccctccagtacttctgtttgtgcccttctgcttcccccattcccttccacagctcatagctcgtcatctcggcccttgtccacactctccaagcacattacaggggacctgattgctacacgttcagaatgcgtttgctgtcatcctgcttggcctggccaggcctggcacagccttggcttccacgcctgagcgtggagagcacgagttagttgtagtccggcttgcggtggggctgacttcctgttggtttgagcccctttttgttttgccctctgggtgttttctttggtcccgcaggagggtgggtggagcaggtggactggagtttctcttgagggcaataaaagttgtcatggtgtgta

SEQ ID NO: 324935 - DNA, 1050 bp, Homo sapiens
gcacaaggatgacaatgagaaccacaaagaaggtgttgccatccttgtgctgttggtcatcgatgccgtgcgcgaaattcggaagtatgatgatgtgacggaaaaggtgaacctccagaacaatcccggggccatggagcacttccacatgaagcttttccgtgcccagaggaatctctacattgctggcttttccttgctgctgtccttcctgcttagacgcctggtgactctcatttcgcagcaggccacgctgctggcctccaatgaagcctttaaaaagcaggcggagagtgctagtgaggcggccaagaagtacatggaggagaatgaccagctcaagaagggagctgctgttgacggaggcaagttggatgtcgggaatgctgaggtgaagttggaggaagagaacaggagcctgaaggctgacctgcagaagctaaaggacgagctggccagcactaagcaaaaactagagaaagctgaaaaccaggttctggccatgcggaagcagtctgagggcctcaccaaggagtacgaccgcttgctggaggagcacgcaaagctgcaggctgcagtagatggtcccatggacaagaaggaagagtaagggcctccttcctcccctgcctgcagctggcttccacctggcacgtgcctgctgcttcctgagagcccggcctctccctccagtacttctgtttgtgcccttctgcttcccccattcccttccacagctcatagctcgtcatctcggcccttgtccacactctccaagcacattacaggggacctgattgctacacgttcagaatgcgtttgctgtcatcctgcttggcctggccaggcctggcacagccttggcttccacgcctgagcgtggagagcacgagttagttgtagtccggcttgcggtggggctgacttcctgttggtttgagcccctttttgttttgccctctgggtgttttctttggtcccgcaggagggtgggtggagcaggtggactggagtttctcttgagggcaataaaagttgtcatggtgtgta

SEQ ID NO: 324936 - DNA, 1435 bp, Homo sapiens
tctcgcccctcggcggggcccctcccgcaccacagagacgtgggacggccgcgcggactagagaagcggccctcgccggcccgacaaagccccgccccgccccgcccgcgtgctcgctccaccccgccctgctcgcccggagcccgaggcgcctcttcctctcccgctcggagcgccggccctccgctccggggcggggtgggaagcggaggtgggcggagcctccggggcctcgcgagggctggtgggcggtgcccggcgggcgcttccggtttccggccgcggtatgaggggcggggccggggctgctgtgggagagttcggttgctgcggcggggcctgcacgttgactgtgggaaactcggaaacaagctcacatcttcctgtgggaaaccttctagcaacaggatgagtctgcagtggactgcagttgccaccttcctctatgcggaggtctttgttgtgttgcttctctgcattcccttcatttctcctaaaagatggcagaagattttcaagtcccggctggtggagttgttagtgtcctatggcaacaccttctttgtggttctcattgtcatccttgtgctgttggtcatcgatgccgtgcgcgaaattcggaagtatgatgatgtgacggaaaaggtgaacctccagaacaatcccggggccatggagcacttccacatgaagcttttccgtgcccagaggaatctctacattgctggcttttccttgctgctgtccttcctgcttagacgcctggtgactctcatttcgcagcaggccacgctgctggcctccaatgaagcctttaaaaagcaggcggagagtgctagtgaggcggccaagaagtacatggaggagaatgaccagctcaagaagggagctgctgttgacggaggcaagttggatgtcgggaatgctgaggtgaagttggaggaagagaacaggagcctgaaggctgacctgcagaagctaaaggacgagctggccagcactaagcaaaaactagagaaagctgaaaaccaggttctggccatgcggaagcagtctgagggcctcaccaaggagtacgaccgcttgctggaggagcacgcaaagctgcaggctgcagtagatggtcccatggacaagaaggaagagtaagggcctccttcctcccctgcctgcagctggcttccacctggcacgtgcctgctgcttcctgagagcccggcctctccctccagtacttctgtttgtgcccttctgcttcccccattcccttccacagctcatagctcgtcatctcggcccttgtccacactctccaagcacattacaggggacctgattgctacaccccaagggttttccagtcaagaaccgctagatctacggcttttatcacaggataagcttatgacatgatacggattcactcgccgcactc

SEQ ID NO: 324937 - DNA, 1001 bp, Homo sapiens
gtgcccgatcgcagcaactattccggcagctatcattgcttttgacgataaatcgtgtccctccagtacaatcatagagatatgtagctgcactaccttacgcatttccagatccccgatcgcatctctactgtccgtcgctttacattgctgctgtccttcctgcttagacgcctggtgactctcatttcgcagcaggccacgctgctggcctccaatgaagcctttaaaaagcaggcggagagtgctagtgaggcggccaagaagtacatggaggagaatgaccagctcaagaagggagctgctgttgacggaggcaagttggatgtcgggaatgctgaggtgaagttggaggaagagaacaggagcctgaaggctgacctgcagaagctaaaggacgagctggccagcactaagcaaaaactagagaaagctgaaaaccaggttctggccatgcggaagcagtctgagggcctcaccaaggagtacgaccgcttgctggaggagcacgcaaagctgcaggctgcagtagatggtcccatggacaagaaggaagagtaagggcctccttcctcccctgcctgcagctggcttccacctggcacgtgcctgctgcttcctgagagcccggcctctccctccagtacttctgtttgtgcccttctgcttcccccattcccttccacagctcatagctcgtcatctcggcccttgtccacactctccaagcacattacaggggacctgattgctacacgttcagaatgcgtttgctgtcatcctgcttggcctggccaggcctggcacagccttggcttccacgcctgagcgtggagagcacgagttagttgtagtccggcttgcggtggggctgacttcctgttggtttgagcccctttttgttttgccctctgggtgttttctttggtcccgcaggagggtgggtggagcaggtggactggagtttctcttgagggcaataaaagttgtcatggtgtgta

SEQ ID NO: 324938 - DNA, 950 bp, Homo sapiens
ggcaggtccaggctggagctaggtgtggagtgggagcaaccaggaggtgctcctgccagcccttcatgctctttttctcacttctcccttctttttgtaaataattgcagcctgcttagacgcctggtgactctcatttcgcagcaggccacgctgctggcctccaatgaagcctttaaaaagcaggcggagagtgctagtgaggcggccaagaagtacatggaggagaatgaccagctcaagaagggagctgctgttgacggaggcaagttggatgtcgggaatgctgaggtgaagttggaggaagagaacaggagcctgaaggctgacctgcagaagctaaaggacgagctggccagcactaagcaaaaactagagaaagctgaaaaccaggttctggccatgcggaagcagtctgagggcctcaccaaggagtacgaccgcttgctggaggagcacgcaaagctgcaggctgcagtagatggtcccatggacaagaaggaagagtaagggcctccttcctcccctgcctgcagctggcttccacctggcacgtgcctgctgcttcctgagagcccggcctctccctccagtacttctgtttgtgcccttctgcttcccccattcccttccacagctcatagctcgtcatctcggcccttgtccacactctccaagcacattacaggggacctgattgctacacgttcagaatgcgtttgctgtcatcctgcttggcctggccaggcctggcacagccttggcttccacgcctgagcgtggagagcacgagttagttgtagtccggcttgcggtggggctgacttcctgttggtttgagcccctttttgttttgccctctgggtgttttctttggtcccgcaggagggtgggtggagcaggtggactggagtttctcttgagggcaataaaagttgtcatggtgtgta

SEQ ID NO: 324939 - DNA, 1448 bp, Homo sapiens
tctcgcccctcggcggggcccctcccgcaccacagagacgtgggacggccgcgcggactagagaagcggccctcgccggcccgacaaagccccgccccgccccgcccgcgtgctcgctccaccccgccctgctcgcccggagcccgaggcgcctcttcctctcccgctcggagcgccggccctccgctccggggcggggtgggaagcggaggtgggcggagcctccggggcctcgcgagggctggtgggcggtgcccggcgggcgcttccggtttccggccgcggtatgaggggcggggccggggctgctgtgggagagttcggttgctgcggcggggcctgcacgttgactgtgggaaactcggaaacaagctcacatcttcctgtgggaaaccttctagcaacaggatgagtctgcagtggactgcagttgccaccttcctctatgcggaggtctttgttgtgttgcttctctgcattcccttcatttctcctaaaagatggcagaagattttcaagtcccggctggtggagttgttagtgtcctatggcaacaccttctttgtggttctcattgtcatccttgtgctgttggtcatcgatgccgtgcgcgaaattcggaagtatgatgatgtgacggaaaaggtgaacctccagaacaatcccggggccatggagcacttccacatgaagcttttccgtgcccagaggaatctctacattgctggcttttccttgctgctgtccttcctgcttagacgcctggtgactctcatttcgcagcaggccacgctgctggcctccaatgaagcctttaaaaagcaggcggagagtgctagtgaggcggccaagaagtacatggaggagaatgaccagctcaagaagggagctgctgttgacggaggcaagttggatgtcgggaatgctgaggtgaagttggaggaagagaacaggagcctgaaggctgacctgcagaagctaaaggacgagctggccagcactaagcaaaaactagagaaagctgaaaaccaggttctggccatgcggaagcagtctgagggcctcaccaaggacccggcctctccctccagtacttctgtttgtgcccttctgcttcccccattcccttccacagctcatagctcgtcatctcggcccttgtccacactctccaagcacattacaggggacctgattgctacacgttcagaatgcgtttgctgtcatcctgcttggcctggccaggcctggcacagccttggcttccacgcctgagcgtggagagcacgagttagttgtagtccggcttgcggtggggctgacttcctgttggtttgagcccctttttgttttgccctctgggtgttttctttggtcccgcaggagggtgggtggagcaggtggactggagtttctcttgagggcaataaaagttgtcatggtgtgta

SEQ ID NO: 324940 - DNA, 1070 bp, Homo sapiens
tctcgcccctcggcggggcccctcccgcaccacagagacgtgggacggccgcgcggactagagaagcggccctcgccggcccgacaaagccccgccccgccccgcccgcgtgctcgctccaccccgccctgctcgcccggagcccgaggcgcctcttcctctcccgctcggagcgccggccctccgctccggggcggggtgggaagcggaggtgggcggagcctccggggcctcgcgagggctggtgggcggtgcccggcgggcgcttccggtttccggccgcggtatgaggggcggggccggggctgctgtgggagagttcggttgctgcggcggggcctgcacgttgactgtgggaaactcggaaacaagctcacatcttcctgtgggaaaccttctagcaacaggatgagtctgcagtggactgcagttgccaccttcctctatgcggaggtctttgttgtgttgcttctctgcattcccttcatttctcctaaaagatggcagaagattttcaagtcccggctggtggagttgttagtgtcctatggcaacaccttctttgtggttctcattgtcatccttgtgctgttggtcatcgatgccgtgcgcgaaattcggaagtatgatgatgtgacggaaaaggtgaacctccagaacaatcccggggccatggagcacttccacatgaagcttttccgtgcccagaggaatctctacattgctggcttttccttgctgctgtccttcctgcttagacgcctggtgactctcatttcgcagcaggccacgctgctggcctccaatgaagcctttaaaaagcaggcggagagtgctagtgaggcggccaagaagtacatggaggagaatgaccagctcaagaagggagctgctgttgacggaggcaagttggatgtcgggaatgctgaggtgaagttggaggaagagaacaggagcctgaaggctgacctgcagaagctaaaggacgagctggccagcactaagcaaaattagaaaaatagagaagctgaaaccggtttggctggggaaaagtggggctacagggtcga

SEQ ID NO: 324941 - DNA, 1610 bp, Homo sapiens
  misc_feature (27)..(27): n is a, c, g, or t
  misc_feature (31)..(31): n is a, c, g, or t
aaagttaggctaggtacgaggcctggntgtngtaatcggccgaggagcccgaggcgcctcttcctctcccgctcggagcgccggccctccgctccggggcggggtgggaagcggaggtgggcggagcctccggggcctcgcgagggctggtgggcggtgcccggcgggcgcttccggtttccggccgcggtatgaggggcggggccggggctgctgtgggagagttcggttgctgcggcggggcctgcacgttgactgtgggaaactcggtgagcgggctccgcgcgccgggctgggctccgggaccgcggaggctccccggcccatcgacgagggagagaggcgagcggcgcggggaggcccgggggccggggaatctcggggcccgcagcctacctgcgtgtgagaggcaggggcgaggggaaaccgggcggcgcctctagaagctggtctcgggggcggggcggggggcggtgaagccccacctggaggagcggccgggatgggcctccgggacggtgtgccaggccggggccaagtcggaggcccctcgctctgggtgggcgctggggcccgcgagggctactgtaaggacccctggcttctgaggatactgcgtctagaactttctccgtatggggccttgaggtgcttggtcgagacctgcctttgcgcttggtcccgaatcctgccctctaggagtcgctcttgcgggcctccagcccaccggaggcgaagcggccccgggcggaaggccgctggatcctcgagggaggtgccggtttctctccgcgggcgccgtggggacggtgggaggcgggggcgtcggcagcgcttggactaggtgcggccttgggcctgcctggtagcggggatttgggcccgcagagcgcccgcctctgcggctgagttctgcctggcggggaagggagcgcccgatgggtgccgaggcgtcctcctcttggtgccctggcactgctcttcccgaagaacgcctttcagttaaacgggcgtcggaaatctcgggcttcctggggcagggatcgtcgggagaggccgctctggacgtgttgacacacgtgctggagggggcaggaaacaagctcacatcttcctgtgggaaaccttctagcaacaggatgagtctgcagtggactgcagttgccaccttcctctatgcggaggtctttgttgtgttgcttctctgcattcccttcatttctcctaaaagatggcagaagattttcaagtcccggctggtggagttgttagtgtcctatggcaacaccttctttgtggttctcattgtcatctcggcccttgtccacactctccaagcacattacaggggacctgattgctacacgttcagaatgcgtttgctgtcatcctgcttggcctggccaggcctggcacagccttggcttccacgcctgagcgtggagagcacgagttagttgtagtccggcttgcggtggggctgacttcctgttggtttgagcccctttttgttttgccctctgggtgttttctttggtcccgcaggagggtgggtggagcaggtggactggagtttctcttgagggcaataaaagttgtcatggtgtgta

SEQ ID NO: 324942 - DNA, 1495 bp, Homo sapiens
  misc_feature (27)..(27): n is a, c, g, or t
  misc_feature (31)..(31): n is a, c, g, or t
aaagttaggctaggtacgaggcctggntgtngtaatcggccgaggagcccgaggcgcctcttcctctcccgctcggagcgccggccctccgctccggggcggggtgggaagcggaggtgggcggagcctccggggcctcgcgagggctggtgggcggtgcccggcgggcgcttccggtttccggccgcggtatgaggggcggggccggggctgctgtgggagagttcggttgctgcggcggggcctgcacgttgactgtgggaaactcggtgagcgggctccgcgcgccgggctgggctccgggaccgcggaggctccccggcccatcgacgagggagagaggcgagcggcgcggggaggcccgggggccggggaatctcggggcccgcagcctacctgcgtgtgagaggcaggggcgaggggaaaccgggcggcgcctctagaagctggtctcgggggcggggcggggggcggtgaagccccacctggaggagcggccgggatgggcctccgggacggtgtgccaggccggggccaagtcggaggcccctcgctctgggtgggcgctggggcccgcgagggctactgtaaggacccctggcttctgaggatactgcgtctagaactttctccgtatggggccttgaggtgcttggtcgagacctgcctttgcgcttggtcccgaatcctgccctctaggagtcgctcttgcgggcctccagcccaccggaggcgaagcggccccgggcggaaggccgctggatcctcgagggaggtgccggtttctctccgcgggcgccgtggggacggtgggaggcgggggcgtcggcagcgcttggactaggtgcggccttgggcctgcctggtagcggggatttgggcccgcagagcgcccgcctctgcggctgagttctgcctggcggggaagggagcgcccgatgggtgccgaggcgtcctcctcttggtgccctggcactgctcttcccgaagaacgcctttcagttaaacgggcgtcggaaatctcgggcttcctggggcagggatcgtcgggagaggccgctctggacgtgttgacacacgtgctggagggggcaggaaacaagctcacatcttcctgtgggaaaccttctagcaacaggatgagtctgcagtggactgcagttgccaccttcctctatgcggaggtctttgttgtgttgcttctctgcattcccttcatttctcctaaaagatggcagaagattttcaagtcccggctggtggagttgttagtgtcctatggcaacaccttctttgtggttctcattgtcatccttgtgctgttggtcatcgatgccgtgcgcgaaattcggaagtatgatgatgtgacggaaaaggtgaacctccagaacaatcccggggccatggagcacttccacatgaagcttttccgtgcccagaggaatctctacattggagtttctcttgagggcaataaaagttgtcatggtgtgta

SEQ ID NO: 324943 - DNA, 498 bp, Homo sapiens
ggcgggggtggctctgcaatggccacggcctcgaggcttctcacccccccttgtgcccttctcttggctcttgactgtgaactgctcctcggccggttcatcaggtggactctctaaatggcctccttcctcccctgcctgcagctggcttccacctggcacgtgcctgctgcttcctgagagcccggcctctccctccagtacttctgtttgtgcccttctgcttcccccattcccttccacagctcatagctcgtcatctcggcccttgtccacactctccaagcacattacaggggacctgattgctacattccacgcctgagcgtggagagcacgagttagttgtagtccggcttgcggtggggctgacttcctgttggtttgagcccctttttgttttgccctctgggtgttttctttggtcccgcaggagggtgggtggagcaggtggactggagtttctcttgagggcaataaaagttgtcatggtgtgta

SEQ ID NO: 324944 - DNA, 6456 bp, Homo sapiens
cgcgagcgccgcggtctccgcgcgccggagcgcagagactcccggctccttccccctcccttcggctcgtgacaacgaagcgcccgcggtctgaggcggcggcggcggcgacggtgcgaccggctgagcgcgagagggagccggcctcgcggctcgccccgcccccgggtcttggactccgcgcccctcccctctcggcgcttccgttacgcccgttggtccggcgcgggccccggggccattcccgagcccgaggcgctggtcggccccgtcgcagcgccagtgagctaccctgacggagctcggcgcggcctggaactcagcctccgccgggtctgggctcccgcgcccggcaactctgcttggccgcaggccgggaggccccggtgtccgcgcccgtccgctcccgccgcccgtgttctttggagcgctcctcccgacggccgctttcggaggcgccgtctgagcgcggggtcccgcgccgcaagttctcctggggcgaccggaggctgctcccccgaccccctggtgtccccggagtggctgcgcggacgtcgagttggcatttcttcgcttcctcctgggccggcgcgcggcgcggcacaccaggctcccctgggctcggggacccggccatgggccgaggcgcgggccgcccgcccgctgggagccacggcttagcagccgaccgctagctgcgccgccgcccggggaccggcatgaggaccgccgcggggggacgtctgcggcccgcgtcggcgctggggacaaagaagccatgcagtgacacccgctaagacttgttggtagccatgtcggagccccacagggtccagttcacctctctcccaggttccctgaatcctgcgtttttgaagaagtcccggaaggaggaggctggggcaggagaacagcatcaggactgtgagccggctgcagcagctgttcggattacactcaccctctttgaaccagatcacaaacgctgcccagagttcttctacccagagctggtgaagaatatccgagggaaggtaaaaggccttcagcctggagataagaagaaagatctgtcagatcctttcaatgacgaagaaaaggaaaggcataaagtagaggcccttgcccgaaaatttgaagaaaaatacggtggaaagaaacgtagaaaagaccgaatacaggacttgatcgatatggggtatggttatgatgaatccgactccttcatcgataactctgaggcgtatgatgagcttgttcctgcttctttgactacgaagtatggaggattttacattaactcgggaaccctgcagtttagacaagcatcagagtctgaagatgacttcattaaagaaaagaagaaaaaatctccaaagaagcggaagttgaaggaaggtggtgagaagataaagaagaagaaaaaaggatgacacttatgacaaggagaagaaatcgaaaaagtccaagttttccaaagccggcttcacagccctcaatgccagtaaggagaagaagaagaagaaatattctggggctttaagcgttaaagagatgctaaagaaatttcagaaagagaaagaggctcagaaaaaaagggaggaggagcataagcctgttgcggtcccatcagcggaagttcagggcctgcgggaactggagggtgcctctgaccccttgctctcactctttggctctacttctgacaacgacttgctccaggcggccactgccatggactcgctgacggatttggacttggagcatctgctcagtgagtctccagaaggaagtcccttccgagatatggatgatggaagtgattcccttggggtgggattggaccaggaattcaggcagccctcttctctccccgaaggcctgccagcacccctggagaagcgcgttaaggagctggctcaggctgccagagctgctgagggggagagcagacagaagttcttcacccaggatattaatggaatcctattagacatagaggcgcagactcgggagctgagcagtcaggtccgctctggggtgtatgcctatcttgcgtcattcctgccctgcagcaaggatgccctgctcaagcgtgctcggaaacttcacctctatgaacaggggggccgtctgaaggagcctctccagaagctcaaggaagccattggcagggcgatgccagagcagatggccaagtaccaggacgaatgccaggcacacacgcaggcaaaggttgccaagatgctggaagaggagaaagacaaggagcagagggaccggatttgttcggatgaggaagaagatgaagaaaaagggggcaggaggataatgggacctcggaagaagttccaatggaatgatgagatcagggagctactgtgccaggtggtgaagatcaaactggagagccaggacctggagaggaacaacaaagcccaggcttgggaggactgtgtgaagggctttctggatgcggaagtcaagcccctctggcccaaaggctggatgcaggccagaactctgtttaaggagagcagacgaggccatgggcacctgacttcaatcctggccaagaagaaagttatggccccttctaaaatcaaggtgaaggaatcgtctacgaagcctgataaaaaggtttctgtcccatcaggacagattggtggccccattgctttgccctcagatcaccaaacaggaggcctgagtattggggcctcgagcagggagctcccatcccaggcatcgggcggccttgctaaccctcctcctgtcaacctggaggactcattggatgaagacttgatccgcaatccagcctcctcggtggaagccgtgtccaaggaattggctgcattgaatagcagagcagctgggaactctgaattcacactgcctgcaccctcaaaagcacctgcagaaaaagttggaggcgttttatgtacagaagaaaaaaggaactttgcgaagcctagtccttctgctccaccaccagctagctctctgcagtcacccctcaattttctggcagaacaggctctggcactggggcagtcctctcaggagaaaaaaccagagagttctggctacaaagagctgtcctgccaggctcccctcaataagggcctgccagaagtacatcagtccaaagctaagcaccacagcttgccacggacgtctcacgggccccaagtggcagttcctgtgcctggcccccaggtcaaagtctttcatgccggcactcagcagcagaaaaacttcacgcccccatctccatttgccaataagctccaaggcccaaaggcttctcccacacagtgtcatcgttccctcctgcagttagtgaagacagcggccaaaggccagggcttccatccctctgcaccagccacctcaggaggcctgtcagcctccagcagcagctctcacaagaccccagcctcgtcctcttctgccctgagccatccagcaaagccacattcagtcagctctgcaggctcatcttacaagaataatccctttgccagctcaatctccaaacatggggtttcttctggcagctcttcctcgggaggaacaccagtccagagttctgtttctgggagcctggtccctggcatacagcctccctccgtgggacaggccaccagccgacccgtcccaagttcagcagggaaaaaaatgcctgtttcccagaagttgactctggtagcccctccaggcggtccaaacggagattccagtggtgggacccagggagtggcaaagttgctgacctcgccgtccctaaagccctctgcagttagtagtgtgacatcgtctacctccttgtcaaaaggagcgagtgggactgtgctgctggccggctcctctttgatggcttcaccctacaaatccagcagcccaaagctgtctggggccatgagctcgaactccttgggaattataacccctgtccctattcctgtccatgtgctctccttcagcgctgactcctctgccaaagcaggggtctccaaggatgccatcgtcacaggccctgcccccgggtccttccaccatggccttggccacagtcttctggctggcttgcactccagcccgccccatgcagcgcctctcccacacgctgcggtgcccacccatatcccgcagagtctgccaggtgcttctcagcttcacgggaaagggcctgctgtaccacggaaattgtgaccgcttcagaggcaaggcttgccacttgggtctgggtggaatcagaacgtgcaggtctcccaggatgtacactcactgcgccctttctgctgcttggtgttcttctggaggagcgtgagttctcagcggagcgcttctcggcacttctgatgtgcctcccatggagggagccgggcccttgctgctcaggaggtgcagactgccccgtgctctgggccttgcagctctgtcgctagacggttgttagaggggcagctctaggctggggcttgcgctgggccgtggtgggaggcacagtgtttacaggctctggtggcagagcagttggcacacctgtgggtgaatctgcctgatcccctggcatttggtcagagtacctcagagcaccccactgctcaggggctccttctggctgcagtaagctccctggatggtcacagtgccgccccatccccaggctgtgtgctcaaagcggacaaaactcaggccagagccacagctgggagacctgcactgtccctgcgaaatactaagaacacctagggtgtgctcactgtgggggccagtttctcctcggaacatgacaatgaagctcttttagagaaaagacctttgtagattcaacaattatgataggatttttacagacacctattttgggctcagttttcatcattaccattaaatgcattggatagaaggggactgttcttcacacatcatattataggaagacataattccagtgcctttatggtggagcagaattcgacaacacatgtccattcagccctctgaatggatctgagacgaagacctttttaaagatatgtctgtattgaagagaaagccagttttgagttttttacacttgcacatcattatctgtgccgtcctgactagaaggttgtctgggcccccaaattccaagtcccagtatagccagggctcccattttgtttttccagagttcgtggaggtggactgcagagcccagagcccttcatctctctgagggtcaaggataccaggggtcccaagtcacagatagacattccagtttgtattcttaggaatcattcttaggcagtgcggcagaagcaggcctctgtgaagtgtctgccgggtagaaataggccttgaagtcctggggctctccaggcagtggggttatgtgtcgactgaagggtgatgtgcagaagagcttggagagtggatcagagagactaggacagttactgcagagctcctaagtcaccactcaaccagtggctgtttcacaaggatttgagggcacttgcctgtcttgtgaggtctgtgccacaaggtgagtctgaactgactgctccagctaagtgatcaggcacgttgagagtatacggtgtcctcagcacatacacctgtgggaaaacggaccgctcttggctcctgactcccagggtacagcgcccagtaactcatccttcattcagaggtttgctggccttcccggtttcccaaggagcaagacctctgtccgccctttggcccggcctctgctctgactcctttttttacataagaaccaatctgtgtttcacattgggctaagtggattccttatccctttgttatatatattttttgcaacttggatttccagtttgtttacagagtagtcttaggtagtagcaaaagagccaaagaagagatttgtattgctgagctcaaagccaagcagaggccggcagtggaggctgagcagggactctccaggcttctctgcccataaacacccgggtcccaggccctccttcctttccctttggtgctccctcctccccatgtaccattgcgcgtgcagctggagcagaataccctcatttttaggaatctagtgatgcctcttgcctcagggaaacgtttctttgatggggagtttgagatttcttttccttgtttatgctttatttgtggtaatgaaagagcgaatgactgaacagccatggcaaggcagacctacaggcgaggccgcagcagagggtggggcagagcagcctcggggtctgggggctgcaggggtttccctggcgcagcgaaagtctctgagcacttaccgggcgtgaccgtttcttaggtgtgagaggggctgtggcttttgtgcagcgactatgttggtgttaggggtggtgtggagattgttaatcttgtataaagcaattcaataaattgtttcaaggtttccaaaacaaaaaaaaa

SEQ ID NO: 324945 - DNA, 6350 bp, Homo sapiens
atattctgtgaacatttggaattctgtattcaaaatctattttgaccattcccaagtgattttgaaggtctttggcatgtcataatttgttattttgtcaaggccagtgtttgggtgtgagagtggtgcacagggcaggagtgtgtaactttgttaggaagtgagcctagccacaccctcctgagtcactggttctttactatcctggggtaggcaatatcttttgttcagctgataaaagctttgtcattgtgaagattggctcccaatgataggaaactgctggtgatgaaaataaaggggtcttaaagattattctcagccagaaaaaataagtgttagacaaattaaatggaaaataattaatattttagtagtctttacaatttggaggtctaaggctctgtcagcatgggttctttaaggtcaaggatctaggatacacatgcacaggaaaaaagactggaagtatgctaagcagtgactatctctgaatgattgtgaaaaaattttaggatgaataagcagaaaaaaacaataaatgacaaaatataacaatggagttttcttgacaatgaaattctcttaaacttaaatctctttaattaggcaggtaaactattttatcatcttcgtttgacctggcccttcttttcaatgttaacagaagccatgcagtgacacccgctaagacttgttggtagccatgtcggagccccacagggtccagttcacctctctcccaggttccctgaatcctgcgtttttgaagaagtcccggaaggaggaggctggggcaggagaacagcatcaggactgtgagccggctgcagcagctgttcggattacactcaccctctttgaaccagatcacaaacgctgcccagagttcttctacccagagctggtgaagaatatccgagggaaggtaaaaggccttcagcctggagataagaagaaagatctgtcagatcctttcaatgacgaagaaaaggaaaggcataaagtagaggcccttgcccgaaaatttgaagaaaaatacggtggaaagaaacgtagaaaagaccgaatacaggacttgatcgatatggggtatggttatgatgaatccgactccttcatcgataactctgaggcgtatgatgagcttgttcctgcttctttgactacgaagtatggaggattttacattaactcgggaaccctgcagtttagacaagcatcagagtctgaagatgacttcattaaagaaaagaagaaaaaatctccaaagaagcggaagttgaaggaaggtggtgagaagataaagaagaagaaaaaaggatgacacttatgacaaggagaagaaatcgaaaaagtccaagttttccaaagccggcttcacagccctcaatgccagtaaggagaagaagaagaagaaatattctggggctttaagcgttaaagagatgctaaagaaatttcagaaagagaaagaggctcagaaaaaaagggaggaggagcataagcctgttgcggtcccatcagcggaagttcagggcctgcgggaactggagggtgcctctgaccccttgctctcactctttggctctacttctgacaacgacttgctccaggcggccactgccatggactcgctgacggatttggacttggagcatctgctcagtgagtctccagaaggaagtcccttccgagatatggatgatggaagtgattcccttggggtgggattggaccaggaattcaggcagccctcttctctccccgaaggcctgccagcacccctggagaagcgcgttaaggagctggctcaggctgccagagctgctgagggggagagcagacagaagttcttcacccaggatattaatggaatcctattagacatagaggcgcagactcgggagctgagcagtcaggtccgctctggggtgtatgcctatcttgcgtcattcctgccctgcagcaaggatgccctgctcaagcgtgctcggaaacttcacctctatgaacaggggggccgtctgaaggagcctctccagaagctcaaggaagccattggcagggcgatgccagagcagatggccaagtaccaggacgaatgccaggcacacacgcaggcaaaggttgccaagatgctggaagaggagaaagacaaggagcagagggaccggatttgttcggatgaggaagaagatgaagaaaaagggggcaggaggataatgggacctcggaagaagttccaatggaatgatgagatcagggagctactgtgccaggtggtgaagatcaaactggagagccaggacctggagaggaacaacaaagcccaggcttgggaggactgtgtgaagggctttctggatgcggaagtcaagcccctctggcccaaaggctggatgcaggccagaactctgtttaaggagagcagacgaggccatgggcacctgacttcaatcctggccaagaagaaagttatggccccttctaaaatcaaggtgaaggaatcgtctacgaagcctgataaaaaggtttctgtcccatcaggacagattggtggccccattgctttgccctcagatcaccaaacaggaggcctgagtattggggcctcgagcagggagctcccatcccaggcatcgggcggccttgctaaccctcctcctgtcaacctggaggactcattggatgaagacttgatccgcaatccagcctcctcggtggaagccgtgtccaaggaattggctgcattgaatagcagagcagctgggaactctgaattcacactgcctgcaccctcaaaagcacctgcagaaaaagttggaggcgttttatgtacagaagaaaaaaggaactttgcgaagcctagtccttctgctccaccaccagctagctctctgcagtcacccctcaattttctggcagaacaggctctggcactggggcagtcctctcaggagaaaaaaccagagagttctggctacaaagagctgtcctgccaggctcccctcaataagggcctgccagaagtacatcagtccaaagctaagcaccacagcttgccacggacgtctcacgggccccaagtggcagttcctgtgcctggcccccaggtcaaagtctttcatgccggcactcagcagcagaaaaacttcacgcccccatctccatttgccaataagctccaaggcccaaaggcttctcccacacagtgtcatcgttccctcctgcagttagtgaagacagcggccaaaggccagggcttccatccctctgcaccagccacctcaggaggcctgtcagcctccagcagcagctctcacaagaccccagcctcgtcctcttctgccctgagccatccagcaaagccacattcagtcagctctgcaggctcatcttacaagaataatccctttgccagctcaatctccaaacatggggtttcttctggcagctcttcctcgggaggaacaccagtccagagttctgtttctgggagcctggtccctggcatacagcctccctccgtgggacaggccaccagccgacccgtcccaagttcagcagggaaaaaaatgcctgtttcccagaagttgactctggtagcccctccaggcggtccaaacggagattccagtggtgggacccagggagtggcaaagttgctgacctcgccgtccctaaagccctctgcagttagtagtgtgacatcgtctacctccttgtcaaaaggagcgagtgggactgtgctgctggccggctcctctttgatggcttcaccctacaaatccagcagcccaaagctgtctggggccatgagctcgaactccttgggaattataacccctgtccctattcctgtccatgtgctctccttcagcgctgactcctctgccaaagcaggggtctccaaggatgccatcgtcacaggccctgcccccgggtccttccaccatggccttggccacagtcttctggctggcttgcactccagcccgccccatgcagcgcctctcccacacgctgcggtgcccacccatatcccgcagagtctgccaggtgcttctcagcttcacgggaaagggcctgctgtaccacggaaattgtgaccgcttcagaggcaaggcttgccacttgggtctgggtggaatcagaacgtgcaggtctcccaggatgtacactcactgcgccctttctgctgcttggtgttcttctggaggagcgtgagttctcagcggagcgcttctcggcacttctgatgtgcctcccatggagggagccgggcccttgctgctcaggaggtgcagactgccccgtgctctgggccttgcagctctgtcgctagacggttgttagaggggcagctctaggctggggcttgcgctgggccgtggtgggaggcacagtgtttacaggctctggtggcagagcagttggcacacctgtgggtgaatctgcctgatcccctggcatttggtcagagtacctcagagcaccccactgctcaggggctccttctggctgcagtaagctccctggatggtcacagtgccgccccatccccaggctgtgtgctcaaagcggacaaaactcaggccagagccacagctgggagacctgcactgtccctgcgaaatactaagaacacctagggtgtgctcactgtgggggccagtttctcctcggaacatgacaatgaagctcttttagagaaaagacctttgtagattcaacaattatgataggatttttacagacacctattttgggctcagttttcatcattaccattaaatgcattggatagaaggggactgttcttcacacatcatattataggaagacataattccagtgcctttatggtggagcagaattcgacaacacatgtccattcagccctctgaatggatctgagacgaagacctttttaaagatatgtctgtattgaagagaaagccagttttgagttttttacacttgcacatcattatctgtgccgtcctgactagaaggttgtctgggcccccaaattccaagtcccagtatagccagggctcccattttgtttttccagagttcgtggaggtggactgcagagcccagagcccttcatctctctgagggtcaaggataccaggggtcccaagtcacagatagacattccagtttgtattcttaggaatcattcttaggcagtgcggcagaagcaggcctctgtgaagtgtctgccgggtagaaataggccttgaagtcctggggctctccaggcagtggggttatgtgtcgactgaagggtgatgtgcagaagagcttggagagtggatcagagagactaggacagttactgcagagctcctaagtcaccactcaaccagtggctgtttcacaaggatttgagggcacttgcctgtcttgtgaggtctgtgccacaaggtgagtctgaactgactgctccagctaagtgatcaggcacgttgagagtatacggtgtcctcagcacatacacctgtgggaaaacggaccgctcttggctcctgactcccagggtacagcgcccagtaactcatccttcattcagaggtttgctggccttcccggtttcccaaggagcaagacctctgtccgccctttggcccggcctctgctctgactcctttttttacataagaaccaatctgtgtttcacattgggctaagtggattccttatccctttgttatatatattttttgcaacttggatttccagtttgtttacagagtagtcttaggtagtagcaaaagagccaaagaagagatttgtattgctgagctcaaagccaagcagaggccggcagtggaggctgagcagggactctccaggcttctctgcccataaacacccgggtcccaggccctccttcctttccctttggtgctccctcctccccatgtaccattgcgcgtgcagctggagcagaataccctcatttttaggaatctagtgatgcctcttgcctcagggaaacgtttctttgatggggagtttgagatttcttttccttgtttatgctttatttgtggtaatgaaagagcgaatgactgaacagccatggcaaggcagacctacaggcgaggccgcagcagagggtggggcagagcagcctcggggtctgggggctgcaggggtttccctggcgcagcgaaagtctctgagcacttaccgggcgtgaccgtttcttaggtgtgagaggggctgtggcttttgtgcagcgactatgttggtgttaggggtggtgtggagattgttaatcttgtataaagcaattcaataaattgtttcaaggtttccaaaacaaaaaaaaa

SEQ ID NO: 324946 - DNA, 6309 bp, Homo sapiens
cgcgagcgccgcggtctccgcgcgccggagcgcagagactcccggctccttccccctcccttcggctcgtgacaacgaagcgcccgcggtctgaggcggcggcggcggcgacggtgcgaccggctgagcgcgagagggagccggcctcgcggctcgccccgcccccgggtcttggactccgcgcccctcccctctcggcgcttccgttacgcccgttggtccggcgcgggccccggggccattcccgagcccgaggcgctggtcggccccgtcgcagcgccagtgagctaccctgacggagctcggcgcggcctggaactcagcctccgccgggtctgggctcccgcgcccggcaactctgcttggccgcaggccgggaggccccggtgtccgcgcccgtccgctcccgccgcccgtgttctttggagcgctcctcccgacggccgctttcggaggcgccgtctgagcgcggggtcccgcgccgcaagttctcctggggcgaccggaggctgctcccccgaccccctggtgtccccggagtggctgcgcggacgtcgagttggcatttcttcgcttcctcctgggccggcgcgcggcgcggcacaccaggctcccctgggctcggggacccggccatgggccgaggcgcgggccgcccgcccgctgggagccacggcttagcagccgaccgctagctgcgccgccgcccggggaccggcatgaggaccgccgcggggggacgtctgcggcccgcgtcggcgctggggacaaagaagccatgcagtgacacccgctaagacttgttggtagccatgtcggagccccacagggtccagttcacctctctcccaggttccctgaatcctgcgtttttgaagaagtcccggaaggaggaggctggggcaggagaacagcatcaggactgtgagccggctgcagcagctgttcggattacactcaccctctttgaaccagatcacaaacgctgcccagagttcttctacccagagctggtgaagaatatccgagggaaggtaaaaggccttcagcctggagataagaagaaagatctgtcagatcctttcaatgacgaagaaaaggaaaggcataaagtagaggcccttgcccgaaaatttgaagaaaaatacggtggaaagaaacgtagaaaagaccgaatacaggacttgatcgatatggggtatggttatgatgaatccgactccttcatcgataactctgaggcgtatgatgagcttgttcctgcttctttgactacgaagtatggaggattttacattaactcgggaaccctgcagtttagacaagcatcagagtctgaagatgacttcattaaagaaaagaagaaaaaatctccaaagaagcggaagttgaaggaaggtggtgagaagataaagaagaagaaaaaaggatgacacttatgacaaggagaagaaatcgaaaaagtccaagttttccaaagccggcttcacagccctcaatgccagtaaggagaagaagaagaagaaatattctggggctttaagcgttaaagagatgctaaagaaatttcagaaagagaaagaggctcagaaaaaaagggaggaggagcataagcctgttgcggtcccatcagcggaagttcagggcctgcgggaactggagggtgcctctgaccccttgctctcactctttggctctacttctgacaacgacttgctccaggcggccactgccatggactcgctgacggatttggacttggagcatctgctcagtgagtctccagaaggaagtcccttccgagatatggatgatggaagtgattcccttggggtgggattggaccaggaattcaggcagccctcttctctccccgaaggcctgccagcacccctggagaagcgcgttaaggagctggctcaggctgccagagctgctgagggggagagcagacagaagttcttcacccaggatattaatggaatcctattagacatagaggcgcagactcgggagctgagcagtcaggtccgctctggggtgtatgcctatcttgcgtcattcctgccctgcagcaaggatgccctgctcaagcgtgctcggaaacttcacctctatgaacaggggggccgtctgaaggagcctctccagaagctcaaggaagccattggcagggcgatgccagagcagatggccaagtaccaggacgaatgccaggcacacacgcaggcaaaggttgccaagatgctggaagaggagaaagacaaggagcagagggaccggatttgttcggatgaggaagaagatgaagaaaaagggggcaggaggataatgggacctcggaagaagttccaatggaatgatgagatcagaactctgtttaaggagagcagacgaggccatgggcacctgacttcaatcctggccaagaagaaagttatggccccttctaaaatcaaggtgaaggaatcgtctacgaagcctgataaaaaggtttctgtcccatcaggacagattggtggccccattgctttgccctcagatcaccaaacaggaggcctgagtattggggcctcgagcagggagctcccatcccaggcatcgggcggccttgctaaccctcctcctgtcaacctggaggactcattggatgaagacttgatccgcaatccagcctcctcggtggaagccgtgtccaaggaattggctgcattgaatagcagagcagctgggaactctgaattcacactgcctgcaccctcaaaagcacctgcagaaaaagttggaggcgttttatgtacagaagaaaaaaggaactttgcgaagcctagtccttctgctccaccaccagctagctctctgcagtcacccctcaattttctggcagaacaggctctggcactggggcagtcctctcaggagaaaaaaccagagagttctggctacaaagagctgtcctgccaggctcccctcaataagggcctgccagaagtacatcagtccaaagctaagcaccacagcttgccacggacgtctcacgggccccaagtggcagttcctgtgcctggcccccaggtcaaagtctttcatgccggcactcagcagcagaaaaacttcacgcccccatctccatttgccaataagctccaaggcccaaaggcttctcccacacagtgtcatcgttccctcctgcagttagtgaagacagcggccaaaggccagggcttccatccctctgcaccagccacctcaggaggcctgtcagcctccagcagcagctctcacaagaccccagcctcgtcctcttctgccctgagccatccagcaaagccacattcagtcagctctgcaggctcatcttacaagaataatccctttgccagctcaatctccaaacatggggtttcttctggcagctcttcctcgggaggaacaccagtccagagttctgtttctgggagcctggtccctggcatacagcctccctccgtgggacaggccaccagccgacccgtcccaagttcagcagggaaaaaaatgcctgtttcccagaagttgactctggtagcccctccaggcggtccaaacggagattccagtggtgggacccagggagtggcaaagttgctgacctcgccgtccctaaagccctctgcagttagtagtgtgacatcgtctacctccttgtcaaaaggagcgagtgggactgtgctgctggccggctcctctttgatggcttcaccctacaaatccagcagcccaaagctgtctggggccatgagctcgaactccttgggaattataacccctgtccctattcctgtccatgtgctctccttcagcgctgactcctctgccaaagcaggggtctccaaggatgccatcgtcacaggccctgcccccgggtccttccaccatggccttggccacagtcttctggctggcttgcactccagcccgccccatgcagcgcctctcccacacgctgcggtgcccacccatatcccgcagagtctgccaggtgcttctcagcttcacgggaaagggcctgctgtaccacggaaattgtgaccgcttcagaggcaaggcttgccacttgggtctgggtggaatcagaacgtgcaggtctcccaggatgtacactcactgcgccctttctgctgcttggtgttcttctggaggagcgtgagttctcagcggagcgcttctcggcacttctgatgtgcctcccatggagggagccgggcccttgctgctcaggaggtgcagactgccccgtgctctgggccttgcagctctgtcgctagacggttgttagaggggcagctctaggctggggcttgcgctgggccgtggtgggaggcacagtgtttacaggctctggtggcagagcagttggcacacctgtgggtgaatctgcctgatcccctggcatttggtcagagtacctcagagcaccccactgctcaggggctccttctggctgcagtaagctccctggatggtcacagtgccgccccatccccaggctgtgtgctcaaagcggacaaaactcaggccagagccacagctgggagacctgcactgtccctgcgaaatactaagaacacctagggtgtgctcactgtgggggccagtttctcctcggaacatgacaatgaagctcttttagagaaaagacctttgtagattcaacaattatgataggatttttacagacacctattttgggctcagttttcatcattaccattaaatgcattggatagaaggggactgttcttcacacatcatattataggaagacataattccagtgcctttatggtggagcagaattcgacaacacatgtccattcagccctctgaatggatctgagacgaagacctttttaaagatatgtctgtattgaagagaaagccagttttgagttttttacacttgcacatcattatctgtgccgtcctgactagaaggttgtctgggcccccaaattccaagtcccagtatagccagggctcccattttgtttttccagagttcgtggaggtggactgcagagcccagagcccttcatctctctgagggtcaaggataccaggggtcccaagtcacagatagacattccagtttgtattcttaggaatcattcttaggcagtgcggcagaagcaggcctctgtgaagtgtctgccgggtagaaataggccttgaagtcctggggctctccaggcagtggggttatgtgtcgactgaagggtgatgtgcagaagagcttggagagtggatcagagagactaggacagttactgcagagctcctaagtcaccactcaaccagtggctgtttcacaaggatttgagggcacttgcctgtcttgtgaggtctgtgccacaaggtgagtctgaactgactgctccagctaagtgatcaggcacgttgagagtatacggtgtcctcagcacatacacctgtgggaaaacggaccgctcttggctcctgactcccagggtacagcgcccagtaactcatccttcattcagaggtttgctggccttcccggtttcccaaggagcaagacctctgtccgccctttggcccggcctctgctctgactcctttttttacataagaaccaatctgtgtttcacattgggctaagtggattccttatccctttgttatatatattttttgcaacttggatttccagtttgtttacagagtagtcttaggtagtagcaaaagagccaaagaagagatttgtattgctgagctcaaagccaagcagaggccggcagtggaggctgagcagggactctccaggcttctctgcccataaacacccgggtcccaggccctccttcctttccctttggtgctccctcctccccatgtaccattgcgcgtgcagctggagcagaataccctcatttttaggaatctagtgatgcctcttgcctcagggaaacgtttctttgatggggagtttgagatttcttttccttgtttatgctttatttgtggtaatgaaagagcgaatgactgaacagccatggcaaggcagacctacaggcgaggccgcagcagagggtggggcagagcagcctcggggtctgggggctgcaggggtttccctggcgcagcgaaagtctctgagcacttaccgggcgtgaccgtttcttaggtgtgagaggggctgtggcttttgtgcagcgactatgttggtgttaggggtggtgtggagattgttaatcttgtataaagcaattcaataaattgtttcaaggtttccaaaacaaaaaaaaa

SEQ ID NO: 324947 - DNA, 5550 bp, Homo sapiens
cccctcgcgaacgtgttatccgaacggctgcagcagctgttcggattacactcaccctctttgaaccagatcacaaacgctgcccagagttcttctacccagagctggtgaagaatatccgagggaaggtaaaaggccttcagcctggagataagaagaaagatctgtcagatcctttcaatgacgaagaaaaggaaaggcataaagtagaggcccttgcccgaaaatttgaagaaaaatacggtggaaagaaacgtagaaaagaccgaatacaggacttgatcgatatggggtatggttatgatgaatccgactccttcatcgataactctgaggcgtatgatgagcttgttcctgcttctttgactacgaagtatggaggattttacattaactcgggaaccctgcagtttagacaagcatcagagtctgaagatgacttcattaaagaaaagaagaaaaaatctccaaagaagcggaagttgaaggaaggtggtgagaagataaagaagaagaaaaaaggatgacacttatgacaaggagaagaaatcgaaaaagtccaagttttccaaagccggcttcacagccctcaatgccagtaaggagaagaagaagaagaaatattctggggctttaagcgttaaagagatgctaaagaaatttcagaaagagaaagaggctcagaaaaaaagggaggaggagcataagcctgttgcggtcccatcagcggaagttcagggcctgcgggaactggagggtgcctctgaccccttgctctcactctttggctctacttctgacaacgacttgctccaggcggccactgccatggactcgctgacggatttggacttggagcatctgctcagtgagtctccagaaggaagtcccttccgagatatggatgatggaagtgattcccttggggtgggattggaccaggaattcaggcagccctcttctctccccgaaggcctgccagcacccctggagaagcgcgttaaggagctggctcaggctgccagagctgctgagggggagagcagacagaagttcttcacccaggatattaatggaatcctattagacatagaggcgcagactcgggagctgagcagtcaggtccgctctggggtgtatgcctatcttgcgtcattcctgccctgcagcaaggatgccctgctcaagcgtgctcggaaacttcacctctatgaacaggggggccgtctgaaggagcctctccagaagctcaaggaagccattggcagggcgatgccagagcagatggccaagtaccaggacgaatgccaggcacacacgcaggcaaaggttgccaagatgctggaagaggagaaagacaaggagcagagggaccggatttgttcggatgaggaagaagatgaagaaaaagggggcaggaggataatgggacctcggaagaagttccaatggaatgatgagatcagggagctactgtgccaggtggtgaagatcaaactggagagccaggacctggagaggaacaacaaagcccaggcttgggaggactgtgtgaagggctttctggatgcggaagtcaagcccctctggcccaaaggctggatgcaggccagaactctgtttaaggagagcagacgaggccatgggcacctgacttcaatcctggccaagaagaaagttatggccccttctaaaatcaaggtgaaggaatcgtctacgaagcctgataaaaaggtttctgtcccatcaggacagattggtggccccattgctttgccctcagatcaccaaacaggaggcctgagtattggggcctcgagcagggagctcccatcccaggcatcgggcggccttgctaaccctcctcctgtcaacctggaggactcattggatgaagacttgatccgcaatccagcctcctcggtggaagccgtgtccaaggaattggctgcattgaatagcagagcagctgggaactctgaattcacactgcctgcaccctcaaaagcacctgcagaaaaagttggaggcgttttatgtacagaagaaaaaaggaactttgcgaagcctagtccttctgctccaccaccagctagctctctgcagtcacccctcaattttctggcagaacaggctctggcactggggcagtcctctcaggagaaaaaaccagagagttctggctacaaagagctgtcctgccaggctcccctcaataagggcctgccagaagtacatcagtccaaagctaagcaccacagcttgccacggacgtctcacgggccccaagtggcagttcctgtgcctggcccccaggtcaaagtctttcatgccggcactcagcagcagaaaaacttcacgcccccatctccatttgccaataagctccaaggcccaaaggcttctcccacacagtgtcatcgttccctcctgcagttagtgaagacagcggccaaaggccagggcttccatccctctgcaccagccacctcaggaggcctgtcagcctccagcagcagctctcacaagaccccagcctcgtcctcttctgccctgagccatccagcaaagccacattcagtcagctctgcaggctcatcttacaagaataatccctttgccagctcaatctccaaacatggggtttcttctggcagctcttcctcgggaggaacaccagtccagagttctgtttctgggagcctggtccctggcatacagcctccctccgtgggacaggccaccagccgacccgtcccaagttcagcagggaaaaaaatgcctgtttcccagaagttgactctggtagcccctccaggcggtccaaacggagattccagtggtgggacccagggagtggcaaagttgctgacctcgccgtccctaaagccctctgcagttagtagtgtgacatcgtctacctccttgtcaaaaggagcgagtgggactgtgctgctggccggctcctctttgatggcttcaccctacaaatccagcagcccaaagctgtctggggccatgagctcgaactccttgggaattataacccctgtccctattcctgtccatgtgctctccttcagcgctgactcctctgccaaagcaggggtctccaaggatgccatcgtcacaggccctgcccccgggtccttccaccatggccttggccacagtcttctggctggcttgcactccagcccgccccatgcagcgcctctcccacacgctgcggtgcccacccatatcccgcagagtctgccaggtgcttctcagcttcacgggaaagggcctgctgtaccacggaaattgtgaccgcttcagaggcaaggcttgccacttgggtctgggtggaatcagaacgtgcaggtctcccaggatgtacactcactgcgccctttctgctgcttggtgttcttctggaggagcgtgagttctcagcggagcgcttctcggcacttctgatgtgcctcccatggagggagccgggcccttgctgctcaggaggtgcagactgccccgtgctctgggccttgcagctctgtcgctagacggttgttagaggggcagctctaggctggggcttgcgctgggccgtggtgggaggcacagtgtttacaggctctggtggcagagcagttggcacacctgtgggtgaatctgcctgatcccctggcatttggtcagagtacctcagagcaccccactgctcaggggctccttctggctgcagtaagctccctggatggtcacagtgccgccccatccccaggctgtgtgctcaaagcggacaaaactcaggccagagccacagctgggagacctgcactgtccctgcgaaatactaagaacacctagggtgtgctcactgtgggggccagtttctcctcggaacatgacaatgaagctcttttagagaaaagacctttgtagattcaacaattatgataggatttttacagacacctattttgggctcagttttcatcattaccattaaatgcattggatagaaggggactgttcttcacacatcatattataggaagacataattccagtgcctttatggtggagcagaattcgacaacacatgtccattcagccctctgaatggatctgagacgaagacctttttaaagatatgtctgtattgaagagaaagccagttttgagttttttacacttgcacatcattatctgtgccgtcctgactagaaggttgtctgggcccccaaattccaagtcccagtatagccagggctcccattttgtttttccagagttcgtggaggtggactgcagagcccagagcccttcatctctctgagggtcaaggataccaggggtcccaagtcacagatagacattccagtttgtattcttaggaatcattcttaggcagtgcggcagaagcaggcctctgtgaagtgtctgccgggtagaaataggccttgaagtcctggggctctccaggcagtggggttatgtgtcgactgaagggtgatgtgcagaagagcttggagagtggatcagagagactaggacagttactgcagagctcctaagtcaccactcaaccagtggctgtttcacaaggatttgagggcacttgcctgtcttgtgaggtctgtgccacaaggtgagtctgaactgactgctccagctaagtgatcaggcacgttgagagtatacggtgtcctcagcacatacacctgtgggaaaacggaccgctcttggctcctgactcccagggtacagcgcccagtaactcatccttcattcagaggtttgctggccttcccggtttcccaaggagcaagacctctgtccgccctttggcccggcctctgctctgactcctttttttacataagaaccaatctgtgtttcacattgggctaagtggattccttatccctttgttatatatattttttgcaacttggatttccagtttgtttacagagtagtcttaggtagtagcaaaagagccaaagaagagatttgtattgctgagctcaaagccaagcagaggccggcagtggaggctgagcagggactctccaggcttctctgcccataaacacccgggtcccaggccctccttcctttccctttggtgctccctcctccccatgtaccattgcgcgtgcagctggagcagaataccctcatttttaggaatctagtgatgcctcttgcctcagggaaacgtttctttgatggggagtttgagatttcttttccttgtttatgctttatttgtggtaatgaaagagcgaatgactgaacagccatggcaaggcagacctacaggcgaggccgcagcagagggtggggcagagcagcctcggggtctgggggctgcaggggtttccctggcgcagcgaaagtctctgagcacttaccgggcgtgaccgtttcttaggtgtgagaggggctgtggcttttgtgcagcgactatgttggtgttaggggtggtgtggagattgttaatcttgtataaagcaattcaataaattgtttcaaggtttccaaaacaaaaaaaaa

SEQ ID NO: 324948 - DNA, 5841 bp, Homo sapiens
cgcgagcgccgcggtctccgcgcgccggagcgcagagactcccggctccttccccctcccttcggctcgtgacaacgaagcgcccgcggtctgaggcggcggcggcggcgacggtgcgaccggctgagcgcgagagggagccggcctcgcggctcgccccgcccccgggtcttggactccgcgcccctcccctctcggcgcttccgttacgcccgttggtccggcgcgggccccggggccattcccgagcccgaggcgctggtcggccccgtcgcagcgccagtgagctaccctgacggagctcggcgcggcctggaactcagcctccgccgggtctgggctcccgcgcccggcaactctgcttggccgcaggccgggaggccccggtgtccgcgcccgtccgctcccgccgcccgtgttctttggagcgctcctcccgacggccgctttcggaggcgccgtctgagcgcggggtcccgcgccgcaagttctcctggggcgaccggaggctgctcccccgaccccctggtgtccccggagtggctgcgcggacgtcgagttggcatttcttcgcttcctcctgggccggcgcgcggcgcggcacaccaggctcccctgggctcggggacccggccatgggccgaggcgcgggccgcccgcccgctgggagccacggcttagcagccgaccgctagctgcgccgccgcccggggaccggcatgaggaccgccgcggggggacgtctgcggcccgcgtcggcgctggggacaaagaagccatgcagtgacacccgctaagacttgttggtagccatgtcggagccccacagggtccagttcacctctctcccaggttccctgaatcctgcgtttttgaagaagtcccggaaggaggaggctggggcaggagaacagcatcaggactgtgagccggctgcagcagctgttcggattacactcaccctctttgaaccagatcacaaacgctgcccagagttcttctacccagagctggtgaagaatatccgagggaaggtaaaaggccttcagcctggagataagaagaaagatctgtcagatcctttcaatgacgaagaaaaggaaaggcataaagtagaggcccttgcccgaaaatttgaagaaaaatacggtggaaagaaacgtagaaaagaccgaatacaggacttgatcgatatggggtatggttatgatgaatccgactccttcatcgataactctgaggcgtatgatgagcttgttcctgcttctttgactacgaagtatggaggattttacattaactcgggaaccctgcagtttagacaagcatcagagtctgaagatgacttcattaaagaaaagaagaaaaaatctccaaagaagcggaagttgaaggaaggtggtgaaagcggaagtataaagcgttgagctcaacgctttatacttctaaataatataatcatagaaattaccctgtagtcaatgtctatttatttattcattttgagacaaagtctcactctgttgcccagactggagtgcaatggcacgatctcggctcactgcaacctccgcctcccaagttcaagcgaatctcctgcctcagcctcccgagtagctgggattacaggcactgcgccaccacgcctggctaacttttagtatttttagtacgagacggggtttcaccatgttggccaggctggtctcgaactcctgacctcaggtgatccacctgccttggcctccaaaagtgctgggattacaggcgtgagccactgcgcctggccagttgacatttaatgagggatagctactgaggaccagggacactagcaaagttctggaagcagagtcccagctttctggggcatgtacagatgcctggtgttctgtgtctttcagaactctgtttaaggagagcagacgaggccatgggcacctgacttcaatcctggccaagaagaaagttatggccccttctaaaatcaaggtgaaggaatcgtctacgaagcctgataaaaaggtttctgtcccatcaggacagattggtggccccattgctttgccctcagatcaccaaacaggaggcctgagtattggggcctcgagcagggagctcccatcccaggcatcgggcggccttgctaaccctcctcctgtcaacctggaggactcattggatgaagacttgatccgcaatccagcctcctcggtggaagccgtgtccaaggaattggctgcattgaatagcagagcagctgggaactctgaattcacactgcctgcaccctcaaaagcacctgcagaaaaagttggaggcgttttatgtacagaagaaaaaaggaactttgcgaagcctagtccttctgctccaccaccagctagctctctgcagtcacccctcaattttctggcagaacaggctctggcactggggcagtcctctcaggagaaaaaaccagagagttctggctacaaagagctgtcctgccaggctcccctcaataagggcctgccagaagtacatcagtccaaagctaagcaccacagcttgccacggacgtctcacgggccccaagtggcagttcctgtgcctggcccccaggtcaaagtctttcatgccggcactcagcagcagaaaaacttcacgcccccatctccatttgccaataagctccaaggcccaaaggcttctcccacacagtgtcatcgttccctcctgcagttagtgaagacagcggccaaaggccagggcttccatccctctgcaccagccacctcaggaggcctgtcagcctccagcagcagctctcacaagaccccagcctcgtcctcttctgccctgagccatccagcaaagccacattcagtcagctctgcaggctcatcttacaagaataatccctttgccagctcaatctccaaacatggggtttcttctggcagctcttcctcgggaggaacaccagtccagagttctgtttctgggagcctggtccctggcatacagcctccctccgtgggacaggccaccagccgacccgtcccaagttcagcagggaaaaaaatgcctgtttcccagaagttgactctggtagcccctccaggcggtccaaacggagattccagtggtgggacccagggagtggcaaagttgctgacctcgccgtccctaaagccctctgcagttagtagtgtgacatcgtctacctccttgtcaaaaggagcgagtgggactgtgctgctggccggctcctctttgatggcttcaccctacaaatccagcagcccaaagctgtctggggccatgagctcgaactccttgggaattataacccctgtccctattcctgtccatgtgctctccttcagcgctgactcctctgccaaagcaggggtctccaaggatgccatcgtcacaggccctgcccccgggtccttccaccatggccttggccacagtcttctggctggcttgcactccagcccgccccatgcagcgcctctcccacacgctgcggtgcccacccatatcccgcagagtctgccaggtgcttctcagcttcacgggaaagggcctgctgtaccacggaaattgtgaccgcttcagaggcaaggcttgccacttgggtctgggtggaatcagaacgtgcaggtctcccaggatgtacactcactgcgccctttctgctgcttggtgttcttctggaggagcgtgagttctcagcggagcgcttctcggcacttctgatgtgcctcccatggagggagccgggcccttgctgctcaggaggtgcagactgccccgtgctctgggccttgcagctctgtcgctagacggttgttagaggggcagctctaggctggggcttgcgctgggccgtggtgggaggcacagtgtttacaggctctggtggcagagcagttggcacacctgtgggtgaatctgcctgatcccctggcatttggtcagagtacctcagagcaccccactgctcaggggctccttctggctgcagtaagctccctggatggtcacagtgccgccccatccccaggctgtgtgctcaaagcggacaaaactcaggccagagccacagctgggagacctgcactgtccctgcgaaatactaagaacacctagggtgtgctcactgtgggggccagtttctcctcggaacatgacaatgaagctcttttagagaaaagacctttgtagattcaacaattatgataggatttttacagacacctattttgggctcagttttcatcattaccattaaatgcattggatagaaggggactgttcttcacacatcatattataggaagacataattccagtgcctttatggtggagcagaattcgacaacacatgtccattcagccctctgaatggatctgagacgaagacctttttaaagatatgtctgtattgaagagaaagccagttttgagttttttacacttgcacatcattatctgtgccgtcctgactagaaggttgtctgggcccccaaattccaagtcccagtatagccagggctcccattttgtttttccagagttcgtggaggtggactgcagagcccagagcccttcatctctctgagggtcaaggataccaggggtcccaagtcacagatagacattccagtttgtattcttaggaatcattcttaggcagtgcggcagaagcaggcctctgtgaagtgtctgccgggtagaaataggccttgaagtcctggggctctccaggcagtggggttatgtgtcgactgaagggtgatgtgcagaagagcttggagagtggatcagagagactaggacagttactgcagagctcctaagtcaccactcaaccagtggctgtttcacaaggatttgagggcacttgcctgtcttgtgaggtctgtgccacaaggtgagtctgaactgactgctccagctaagtgatcaggcacgttgagagtatacggtgtcctcagcacatacacctgtgggaaaacggaccgctcttggctcctgactcccagggtacagcgcccagtaactcatccttcattcagaggtttgctggccttcccggtttcccaaggagcaagacctctgtccgccctttggcccggcctctgctctgactcctttttttacataagaaccaatctgtgtttcacattgggctaagtggattccttatccctttgttatatatattttttgcaacttggatttccagtttgtttacagagtagtcttaggtagtagcaaaagagccaaagaagagatttgtattgctgagctcaaagccaagcagaggccggcagtggaggctgagcagggactctccaggcttctctgcccataaacacccgggtcccaggccctccttcctttccctttggtgctccctcctccccatgtaccattgcgcgtgcagctggagcagaataccctcatttttaggaatctagtgatgcctcttgcctcagggaaacgtttctttgatggggagtttgagatttcttttccttgtttatgctttatttgtggtaatgaaagagcgaatgactgaacagccatggcaaggcagacctacaggcgaggccgcagcagagggtggggcagagcagcctcggggtctgggggctgcaggggtttccctggcgcagcgaaagtctctgagcacttaccgggcgtgaccgtttcttaggtgtgagaggggctgtggcttttgtgcagcgactatgttggtgttaggggtggtgtggagattgttaatcttgtataaagcaattcaataaattgtttcaaggtttccaaaacaaaaaaaaa

SEQ ID NO: 324949 - DNA, 4518 bp, Homo sapiens
tgaagacaggagttgcagtgagctgcagccggtggtgactgtgttttgttcttcagcatagaggcgcagactcgggagctgagcagtcaggtccgctctggggtgtatgcctatcttgcgtcattcctgccctgcagcaaggatgccctgctcaagcgtgctcggaaacttcacctctatgaacaggggggccgtctgaaggagcctctccagaagctcaaggaagccattggcagggcgatgccagagcagatggccaagtaccaggacgaatgccaggcacacacgcaggcaaaggttgccaagatgctggaagaggagaaagacaaggagcagagggaccggatttgttcggatgaggaagaagatgaagaaaaagggggcaggaggataatgggacctcggaagaagttccaatggaatgatgagatcagggagctactgtgccaggtggtgaagatcaaactggagagccaggacctggagaggaacaacaaagcccaggcttgggaggactgtgtgaagggctttctggatgcggaagtcaagcccctctggcccaaaggctggatgcaggccagaactctgtttaaggagagcagacgaggccatgggcacctgacttcaatcctggccaagaagaaagttatggccccttctaaaatcaaggtgaaggaatcgtctacgaagcctgataaaaaggtttctgtcccatcaggacagattggtggccccattgctttgccctcagatcaccaaacaggaggcctgagtattggggcctcgagcagggagctcccatcccaggcatcgggcggccttgctaaccctcctcctgtcaacctggaggactcattggatgaagacttgatccgcaatccagcctcctcggtggaagccgtgtccaaggaattggctgcattgaatagcagagcagctgggaactctgaattcacactgcctgcaccctcaaaagcacctgcagaaaaagttggaggcgttttatgtacagaagaaaaaaggaactttgcgaagcctagtccttctgctccaccaccagctagctctctgcagtcacccctcaattttctggcagaacaggctctggcactggggcagtcctctcaggagaaaaaaccagagagttctggctacaaagagctgtcctgccaggctcccctcaataagggcctgccagaagtacatcagtccaaagctaagcaccacagcttgccacggacgtctcacgggccccaagtggcagttcctgtgcctggcccccaggtcaaagtctttcatgccggcactcagcagcagaaaaacttcacgcccccatctccatttgccaataagctccaaggcccaaaggcttctcccacacagtgtcatcgttccctcctgcagttagtgaagacagcggccaaaggccagggcttccatccctctgcaccagccacctcaggaggcctgtcagcctccagcagcagctctcacaagaccccagcctcgtcctcttctgccctgagccatccagcaaagccacattcagtcagctctgcaggctcatcttacaagaataatccctttgccagctcaatctccaaacatggggtttcttctggcagctcttcctcgggaggaacaccagtccagagttctgtttctgggagcctggtccctggcatacagcctccctccgtgggacaggccaccagccgacccgtcccaagttcagcagggaaaaaaatgcctgtttcccagaagttgactctggtagcccctccaggcggtccaaacggagattccagtggtgggacccagggagtggcaaagttgctgacctcgccgtccctaaagccctctgcagttagtagtgtgacatcgtctacctccttgtcaaaaggagcgagtgggactgtgctgctggccggctcctctttgatggcttcaccctacaaatccagcagcccaaagctgtctggggccatgagctcgaactccttgggaattataacccctgtccctattcctgtccatgtgctctccttcagcgctgactcctctgccaaagcaggggtctccaaggatgccatcgtcacaggccctgcccccgggtccttccaccatggccttggccacagtcttctggctggcttgcactccagcccgccccatgcagcgcctctcccacacgctgcggtgcccacccatatcccgcagagtctgccaggtgcttctcagcttcacgggaaagggcctgctgtaccacggaaattgtgaccgcttcagaggcaaggcttgccacttgggtctgggtggaatcagaacgtgcaggtctcccaggatgtacactcactgcgccctttctgctgcttggtgttcttctggaggagcgtgagttctcagcggagcgcttctcggcacttctgatgtgcctcccatggagggagccgggcccttgctgctcaggaggtgcagactgccccgtgctctgggccttgcagctctgtcgctagacggttgttagaggggcagctctaggctggggcttgcgctgggccgtggtgggaggcacagtgtttacaggctctggtggcagagcagttggcacacctgtgggtgaatctgcctgatcccctggcatttggtcagagtacctcagagcaccccactgctcaggggctccttctggctgcagtaagctccctggatggtcacagtgccgccccatccccaggctgtgtgctcaaagcggacaaaactcaggccagagccacagctgggagacctgcactgtccctgcgaaatactaagaacacctagggtgtgctcactgtgggggccagtttctcctcggaacatgacaatgaagctcttttagagaaaagacctttgtagattcaacaattatgataggatttttacagacacctattttgggctcagttttcatcattaccattaaatgcattggatagaaggggactgttcttcacacatcatattataggaagacataattccagtgcctttatggtggagcagaattcgacaacacatgtccattcagccctctgaatggatctgagacgaagacctttttaaagatatgtctgtattgaagagaaagccagttttgagttttttacacttgcacatcattatctgtgccgtcctgactagaaggttgtctgggcccccaaattccaagtcccagtatagccagggctcccattttgtttttccagagttcgtggaggtggactgcagagcccagagcccttcatctctctgagggtcaaggataccaggggtcccaagtcacagatagacattccagtttgtattcttaggaatcattcttaggcagtgcggcagaagcaggcctctgtgaagtgtctgccgggtagaaataggccttgaagtcctggggctctccaggcagtggggttatgtgtcgactgaagggtgatgtgcagaagagcttggagagtggatcagagagactaggacagttactgcagagctcctaagtcaccactcaaccagtggctgtttcacaaggatttgagggcacttgcctgtcttgtgaggtctgtgccacaaggtgagtctgaactgactgctccagctaagtgatcaggcacgttgagagtatacggtgtcctcagcacatacacctgtgggaaaacggaccgctcttggctcctgactcccagggtacagcgcccagtaactcatccttcattcagaggtttgctggccttcccggtttcccaaggagcaagacctctgtccgccctttggcccggcctctgctctgactcctttttttacataagaaccaatctgtgtttcacattgggctaagtggattccttatccctttgttatatatattttttgcaacttggatttccagtttgtttacagagtagtcttaggtagtagcaaaagagccaaagaagagatttgtattgctgagctcaaagccaagcagaggccggcagtggaggctgagcagggactctccaggcttctctgcccataaacacccgggtcccaggccctccttcctttccctttggtgctccctcctccccatgtaccattgcgcgtgcagctggagcagaataccctcatttttaggaatctagtgatgcctcttgcctcagggaaacgtttctttgatggggagtttgagatttcttttccttgtttatgctttatttgtggtaatgaaagagcgaatgactgaacagccatggcaaggcagacctacaggcgaggccgcagcagagggtggggcagagcagcctcggggtctgggggctgcaggggtttccctggcgcagcgaaagtctctgagcacttaccgggcgtgaccgtttcttaggtgtgagaggggctgtggcttttgtgcagcgactatgttggtgttaggggtggtgtggagattgttaatcttgtataaagcaattcaataaattgtttcaaggtttccaaaacaaaaaaaaa

SEQ ID NO: 324950 - DNA, 3102 bp, Homo sapiens
tatgtgtcattattatgagtcagtttttaaaactgtttaaggctctcagaggctggatgtggtggcattgagaggcaggaggattgcttgaacccaggaatcagagggtatagtgtgctgtgatcatgcttgtgaatagctgctgtactccagcctgggcaacatagtgagacctcatctctaaaaaaattttttttaatcagtttaaaagttcgaggaaaaagaaaatcaatcagaaaagcaactataccaaaacagggttatccaagtgagcttctctcacttccttagatggacttcagcttataggatgacacgagatgcgagtaagaagctatttgcgcatttcagctgcgtgacttgtgtctgcgttgctttcctttctttcttctgtggactgagaatgctagtgcctttgaatttgtctttacaggacctgagggtcttttgatggtaagagaatgaatgatcattgctgccttgagttctgtgtgatcgtcaggcctcgcctcaggatggcaattgtagcctgagatgacgtagcccaagttgcacagcagagttgctgttctggaaacactgtgctgagtgaccaccgaccttcacagtgctagtgtgcttgcaggctgtggccaggagtagtgtacacgaataactgctggctggtgtctcatggcttgtttgagctctagaacactcagcatttggggacttttgctatttaggtgtctcccttgaagtttggttactactgccttaaggaaatcagagagcatgaaaaacttgcgttctaatttttcttactcttttccaggtgcttctcagcttcacgggaaagggcctgctgtaccacggaaattgtgaccgcttcagaggcaaggcttgccacttgggtctgggtggaatcagaacgtgcaggtctcccaggatgtacactcactgcgccctttctgctgcttggtgttcttctggaggagcgtgagttctcagcggagcgcttctcggcacttctgatgtgcctcccatggagggagccgggcccttgctgctcaggaggtgcagactgccccgtgctctgggccttgcagctctgtcgctagacggttgttagaggggcagctctaggctggggcttgcgctgggccgtggtgggaggcacagtgtttacaggctctggtggcagagcagttggcacacctgtgggtgaatctgcctgatcccctggcatttggtcagagtacctcagagcaccccactgctcaggggctccttctggctgcagtaagctccctggatggtcacagtgccgccccatccccaggctgtgtgctcaaagcggacaaaactcaggccagagccacagctgggagacctgcactgtccctgcgaaatactaagaacacctagggtgtgctcactgtgggggccagtttctcctcggaacatgacaatgaagctcttttagagaaaagacctttgtagattcaacaattatgataggatttttacagacacctattttgggctcagttttcatcattaccattaaatgcattggatagaaggggactgttcttcacacatcatattataggaagacataattccagtgcctttatggtggagcagaattcgacaacacatgtccattcagccctctgaatggatctgagacgaagacctttttaaagatatgtctgtattgaagagaaagccagttttgagttttttacacttgcacatcattatctgtgccgtcctgactagaaggttgtctgggcccccaaattccaagtcccagtatagccagggctcccattttgtttttccagagttcgtggaggtggactgcagagcccagagcccttcatctctctgagggtcaaggataccaggggtcccaagtcacagatagacattccagtttgtattcttaggaatcattcttaggcagtgcggcagaagcaggcctctgtgaagtgtctgccgggtagaaataggccttgaagtcctggggctctccaggcagtggggttatgtgtcgactgaagggtgatgtgcagaagagcttggagagtggatcagagagactaggacagttactgcagagctcctaagtcaccactcaaccagtggctgtttcacaaggatttgagggcacttgcctgtcttgtgaggtctgtgccacaaggtgagtctgaactgactgctccagctaagtgatcaggcacgttgagagtatacggtgtcctcagcacatacacctgtgggaaaacggaccgctcttggctcctgactcccagggtacagcgcccagtaactcatccttcattcagaggtttgctggccttcccggtttcccaaggagcaagacctctgtccgccctttggcccggcctctgctctgactcctttttttacataagaaccaatctgtgtttcacattgggctaagtggattccttatccctttgttatatatattttttgcaacttggatttccagtttgtttacagagtagtcttaggtagtagcaaaagagccaaagaagagatttgtattgctgagctcaaagccaagcagaggccggcagtggaggctgagcagggactctccaggcttctctgcccataaacacccgggtcccaggccctccttcctttccctttggtgctccctcctccccatgtaccattgcgcgtgcagctggagcagaataccctcatttttaggaatctagtgatgcctcttgcctcagggaaacgtttctttgatggggagtttgagatttcttttccttgtttatgctttatttgtggtaatgaaagagcgaatgactgaacagccatggcaaggcagacctacaggcgaggccgcagcagagggtggggcagagcagcctcggggtctgggggctgcaggggtttccctggcgcagcgaaagtctctgagcacttaccgggcgtgaccgtttcttaggtgtgagaggggctgtggcttttgtgcagcgactatgttggtgttaggggtggtgtggagattgttaatcttgtataaagcaattcaataaattgtttcaaggtttccaaaacaaaaaaaaa

SEQ ID NO: 324951 - DNA, 6393 bp, Homo sapiens
cgcgagcgccgcggtctccgcgcgccggagcgcagagactcccggctccttccccctcccttcggctcgtgacaacgaagcgcccgcggtctgaggcggcggcggcggcgacggtgcgaccggctgagcgcgagagggagccggcctcgcggctcgccccgcccccgggtcttggactccgcgcccctcccctctcggcgcttccgttacgcccgttggtccggcgcgggccccggggccattcccgagcccgaggcgctggtcggccccgtcgcagcgccagtgagctaccctgacggagctcggcgcggcctggaactcagcctccgccgggtctgggctcccgcgcccggcaactctgcttggccgcaggccgggaggccccggtgtccgcgcccgtccgctcccgccgcccgtgttctttggagcgctcctcccgacggccgctttcggaggcgccgtctgagcgcggggtcccgcgccgcaagttctcctggggcgaccggaggctgctcccccgaccccctggtgtccccggagtggctgcgcggacgtcgagttggcatttcttcgcttcctcctgggccggcgcgcggcgcggcacaccaggctcccctgggctcggggacccggccatgggccgaggcgcgggccgcccgcccgctgggagccacggcttagcagccgaccgctagctgcgccgccgcccggggaccggcatgaggaccgccgcggggggacgtctgcggcccgcgtcggcgctggggacaaagaagccatgcagtgacacccgctaagacttgttggtagccatgtcggagccccacagggtccagttcacctctctcccaggttccctgaatcctgcgtttttgaagaagtcccggaaggaggaggctggggcaggagaacagcatcaggactgtgagccggctgcagcagctgttcggattacactcaccctctttgaaccagatcacaaacgctgcccagagttcttctacccagagctggtgaagaatatccgagggaaggtaaaaggccttcagcctggagataagaagaaagatctgtcagatcctttcaatgacgaagaaaaggaaaggcataaagtagaggcccttgcccgaaaatttgaagaaaaatacggtggaaagaaacgtagaaaagaccgaatacaggacttgatcgatatggggtatggttatgatgaatccgactccttcatcgataactctgaggcgtatgatgagcttgttcctgcttctttgactacgaagtatggaggattttacattaactcgggaaccctgcagtttagacaagcatcagagtctgaagatgacttcattaaagaaaagaagaaaaaatctccaaagaagcggaagttgaaggaaggtggtgagaagataaagaagaagaaaaaaggatgacacttatgacaaggagaagaaatcgaaaaagtccaagttttccaaagccggcttcacagccctcaatgccagtaaggagaagaagaagaagaaatattctggggctttaagcgttaaagagatgctaaagaaatttcagaaagagaaagaggctcagaaaaaaagggaggaggagcataagcctgttgcggtcccatcagcggaagttcagggcctgcgggaactggagggtgcctctgaccccttgctctcactctttggctctacttctgacaacgacttgctccaggcggccactgccatggactcgctgacggatttggacttggagcatctgctcagtgagtctccagaaggaagtcccttccgagatatggatgatggaagtgattcccttggggtgggattggaccaggaattcaggcagccctcttctctccccgaaggcctgccagcacccctggagaagcgcgttaaggagctggctcaggctgccagagctgctgagggggagagcagacagaagttcttcacccaggatattaatggaatcctattagacatagaggcgcagactcgggagctgagcagtcaggtccgctctggggtgtatgcctatcttgcgtcattcctgccctgcagcaaggatgccctgctcaagcgtgctcggaaacttcacctctatgaacaggggggccgtctgaaggagcctctccagaagctcaaggaagccattggcagggcgatgccagagcagatggccaagtaccaggacgaatgccaggcacacacgcaggcaaaggttgccaagatgctggaagaggagaaagacaaggagcagagggaccggatttgttcggatgaggaagaagatgaagaaaaagggggcaggaggataatgggacctcggaagaagttccaatggaatgatgagatcagggagctactgtgccaggtggtgaagatcaaactggagagccaggacctggagaggaacaacaaagcccaggcttgggaggactgtgtgaagggctttctggatgcggaagtcaagcccctctggcccaaaggctggatgcaggccagaactctgtttaaggagagcagacgaggccatgggcacctgacttcaatcctggccaagaagaaagttatggccccttctaaaatcaaggtgaaggaatcgtctacgaagcctgataaaaaggtttctgtcccatcaggacagattggtggccccattgctttgccctcagatcaccaaacaggaggcctgagtattggggcctcgagcagggagctcccatcccaggcatcgggcggccttgctaaccctcctcctgtcaacctggaggactcattggatgaagacttgatccgcaatccagcctcctcggtggaagccgtgtccaaggaattggctgcattgaatagcagagcagctgggaactctgaattcacactgcctgcaccctcaaaagcacctgcagaaaaagttggaggcgttttatgtacagaagaaaaaaggaactttgcgaagcctagtccttctgctccaccaccagctagctctctgcagtcacccctcaattttctggcagaacaggctctggcactggggcagtcctctcaggagaaaaaaccagagagttctggctacaaagagctgtcctgccaggctcccctcaataagggcctgccagaagtacatcagtccaaagctaagcaccacagcttgccacggacgtctcacgggccccaagtggcagttcctgtgcctggcccccaggtcaaagtctttcatgccggcactcagcagcagaaaaacttcacgcccccatctccatttgccaataagctccaaggcccaaaggcttctcccacacagtgtcatcgttccctcctgcagttagtgaagacagcggccaaaggccagggcttccatccctctgcaccagccacctcaggaggcctgtcagcctccagcagcagctctcacaagaccccagcctcgtcctcttctgccctgagccatccagcaaagccacattcagtcagctctgcaggctcatcttacaagaataatccctttgccagctcaatctccaaacatggggtttcttctggcagctcttcctcgggaggaacaccagtccagagttctgtttctgggagcctggtccctggcatacagcctccctccgtgggacaggccaccagccgacccgtcccaagttcagcagggaaaaaaatgcctgtttcccagaagttgactctggtagcccctccaggcggtccaaacggagattccagtggtgggacccagggagtggcaaagttgctgacctcgccgtccctaaagccctctgcagttagtagtgtgacatcgtctacctccttgtcaaaaggagcgagtgggactgtgctgctggccggctcctctttgatggcttcaccctacaaatccagcagcccaaagctgtctggggccatgagctcgaactccttgggaattataacccctgtccctattcctgtccatgtgctctccttcagcgctgactcctctgccaaagcaggggtctccaaggatgccatcgtcacaggccctgcccccgggtccttccaccatggccttggccacagtcttctggctggcttgcactccagcccgccccatgcagcgcctctcccacacgctgcggtgcccacccatatcccgcagagtctgccaggtgcttctcagcttcacgggaaagggcctgctgtaccacggaaattgtgaccgcttcagaggcaaggcttgccacttgggtctgggtggaatcagaacgtgcaggtctcccaggatgtacactcactgcgccctttctgctgcttggtgttcttctggaggagcgtgagttctcagcggagcgcttctcggcacttctgatgtgcctcccatggagggagccgggcccttgctgctcaggaggtgcagactgccccgtgctctgggccttgcagctctgtcgctagacggttgttagaggggcagctctaggctggggcttgcgctgggccgtggtgggaggcacagtgtttacaggctctggtggcagagcagttggcacacctgtgggtgaatctgcctgatcccctggcatttggtcagagtacctcagagcaccccactgctcaggggctccttctggctgcagtaagctccctggatggtcacagtgccgccccatccccaggctgtgtgctcaaagcggacaaaactcaggccagagccacagctgggagacctgcactgtccctgcgaaatactaagaacacctagggtgtgctcactgtgggggccagtttctcctcggaacatgacaatgaagctcttttagagaaaagacctttgtagattcaacaattatgataggatttttacagacacctattttgggctcagttttcatcattaccattaaatgcattggatagaaggggactgttcttcacacatcatattataggaagacataattccagtgcctttatggtggagcagaattcgacaacacatgtccattcagccctctgaatggatctgagacgaagacctttttaaagatatgtctgtattgaagagaaagccagttttgagttttttacacttgcacatcattatctgtgccgtcctgactagaaggttgtctgggcccccaaattccaagtcccagtatagccagggctcccattttgtttttccagagttcgtggaggtggactgcagagcccagagcccttcatctctctgagggtcaaggataccaggggtcccaagtcacagatagacattccagtttgtattcttaggaatcattcttaggcagtgcggcagaagcaggcctctgtgaagtgtctgccgggtagaaataggccttgaagtcctggggctctccaggcagtggggttatgtgtcgactgaagggtgatgtgcagaagagcttggagagtggatcagagagactaggacagttactgcagagctcctaagtcaccactcaaccagtggctgtttcacaaggatttgagggcacttgcctgtcttgtgaggtctgtgccacaaggtgagtctgaactgactgctccagctaagtgatcaggcacgttgagagtatacggtgtcctcagcacatacacctgtgggaaaacggaccgctcttggctcctgactcccagggtacagcgcccagtaactcatccttcattcagaggtttgctggccttcccggtttcccaaggagcaagacctctgtccgccctttggcccggcctctgctctgactcctttttttacataagaaccaatctgtgtttcacattgggctaagtggattccttatccctttgttatatatattttttgcaacttggatttccagtttgtttacagagtagtcttaggtagtagcaaaagagccaaagaagagatttgtattgctgagctcaaagccaagcagaggccggcagtggaggctgagcagggactctccaggcttctctgcccataaacacccgggtcccaggccctccttcctttccctttggtgctccctcctccccatgtaccattgcgcgtgcagctggagcagaataccctcatttttaggaatctagtgatgcctcttgcctcagggaaacgtttctttgatggggagtttgagatttcttttccttgtttatgctttatttgtggtaatgaaagagcgaatgactgaacagccatggcaaggcagacctacaggcgaggccgcagcagagggtggggcagagcagcctcgagatcgggaacaaataaacacggggggggggttcccccccctctactccattcactcttactctctattccctactctctcactttcacaccctaacctcccacctatgttggtgttaggggtggtgtggagat

SEQ ID NO: 324952 - DNA, 6194 bp, Homo sapiens
cgcgagcgccgcggtctccgcgcgccggagcgcagagactcccggctccttccccctcccttcggctcgtgacaacgaagcgcccgcggtctgaggcggcggcggcggcgacggtgcgaccggctgagcgcgagagggagccggcctcgcggctcgccccgcccccgggtcttggactccgcgcccctcccctctcggcgcttccgttacgcccgttggtccggcgcgggccccggggccattcccgagcccgaggcgctggtcggccccgtcgcagcgccagtgagctaccctgacggagctcggcgcggcctggaactcagcctccgccgggtctgggctcccgcgcccggcaactctgcttggccgcaggccgggaggccccggtgtccgcgcccgtccgctcccgccgcccgtgttctttggagcgctcctcccgacggccgctttcggaggcgccgtctgagcgcggggtcccgcgccgcaagttctcctggggcgaccggaggctgctcccccgaccccctggtgtccccggagtggctgcgcggacgtcgagttggcatttcttcgcttcctcctgggccggcgcgcggcgcggcacaccaggctcccctgggctcggggacccggccatgggccgaggcgcgggccgcccgcccgctgggagccacggcttagcagccgaccgctagctgcgccgccgcccggggaccggcatgaggaccgccgcggggggacgtctgcggcccgcgtcggcgctggggacaaagaagccatgcagtgacacccgctaagacttgttggtagccatgtcggagccccacagggtccagttcacctctctcccaggttccctgaatcctgcgtttttgaagaagtcccggaaggaggaggctggggcaggagaacagcatcaggactgtgagccggctgcagcagctgttcggattacactcaccctctttgaaccagatcacaaacgctgcccagagttcttctacccagagctggtgaagaatatccgagggaaggtaaaaggccttcagcctggagataagaagaaagatctgtcagatcctttcaatgacgaagaaaaggaaaggcataaagtagaggcccttgcccgaaaatttgaagaaaaatacggtggaaagaaacgtagaaaagaccgaatacaggacttgatcgatatggggtatggttatgatgaatccgactccttcatcgataactctgaggcgtatgatgagcttgttcctgcttctttgactacgaagtatggaggattttacattaactcgggaaccctgcagtttagacaagcatcagagtctgaagatgacttcattaaagaaaagaagaaaaaatctccaaagaagcggaagttgaaggaaggtggtgagaagataaagaagaagaaaaaaggatgacacttatgacaaggagaagaaatcgaaaaagtccaagttttccaaagccggcttcacagccctcaatgccagtaaggagaagaagaagaagaaatattctggggctttaagcgttaaagagatgctaaagaaatttcagaaagagaaagaggctcagaaaaaaagggaggaggagcataagcctgttgcggtcccatcagcggaagttcagggcctgcgggaactggagggtgcctctgaccccttgctctcactctttggctctacttctgacaacgacttgctccaggcggccactgccatggactcgctgacggatttggacttggagcatctgctcagtgagtctccagaaggaagtcccttccgagatatggatgatggaagtgattcccttggggtgggattggaccaggaattcaggcagccctcttctctccccgaaggcctgccagcacccctggagaagcgcgttaaggagctggctcaggctgccagagctgctgagggggagagcagacagaagttcttcacccaggatattaatggaatcctattagacatagaggcgcagactcgggagctgagcagtcaggtccgctctggggtgtatgcctatcttgcgtcattcctgccctgcagcaaggatgccctgctcaagcgtgctcggaaacttcacctctatgaacaggggggccgtctgaaggagcctctccagaagctcaaggaagccattggcagggcgatgccagagcagatggccaagtaccaggacgaatgccaggcacacacgcaggcaaaggttgccaagatgctggaagaggagaaagacaaggagcagagggaccggatttgttcggatgaggaagaagatgaagaaaaagggggcaggaggataatgggacctcggaagaagttccaatggaatgatgagatcagggagctactgtgccaggtggtgaagatcaaactggagagccaggacctggagaggaacaacaaagcccaggcttgggaggactgtgtgaagggctttctggatgcggaagtcaagcccctctggcccaaaggctggatgcaggccagaactctgtttaaggagagcagacgaggccatgggcacctgacttcaatcctggccaagaagaaagttatggccccttctaaaatcaaggtgaaggaatcgtctacgaagcctgataaaaaggtttctgtcccatcaggacagattggtggccccattgctttgccctcagatcaccaaacaggaggcctgagtattggggcctcgagcagggagctcccatcccaggcatcgggcggccttgctaaccctcctcctgtcaacctggaggactcattggatgaagacttgatccgcaatccagcctcctcggtggaagccgtgtccaaggaattggctgcattgaatagcagagcagctgggaactctgaattcacactgcctgcaccctcaaaagcacctgcagaaaaagttggaggcgttttatgtacagaagaaaaaaggaactttgcgaagcctagtccttctgctccaccaccagctagctctctgcagtcacccctcaattttctggcagaacaggctctggcactggggcagtcctctcaggagaaaaaaccagagagttctggctacaaagagctgtcctgccaggctcccctcaataagggcctgccagaagtacatcagtccaaagctaagcaccacagcttgccacggacgtctcacgggccccaagtggcagttcctgtgcctggcccccaggtcaaagtctttcatgccggcactcagcagcagaaaaacttcacgcccccatctccatttgccaataagctccaaggcccaaaggcttctcccacacagtgtcatcgttccctcctgcagttagtgaagacagcggccaaaggccagggcttccatccctctgcaccagccacctcaggaggcctgtcagcctccagcagcagctctcacaagaccccagcctcgtcctcttctgccctgagccatccagcaaagccacattcagtcagctctgcaggctcatcttacaagaataatccctttgccagctcaatctccaaacatggggtttcttctggcagctcttcctcgggaggaacaccagtccagagttctgtttctgggagcctggtccctggcatacagcctccctccgtgggacaggccaccagccgacccgtcccaagttcagcagggaaaaaaatgcctgtttcccagaagttgactctggtagcccctccaggcggtccaaacggagattccagtggtgggacccagggagtggcaaagttgctgacctcgccgtccctaaagccctctgcagttagtagtgtgacatcgtctacctccttgtcaaaaggagcgagtgggactgtgctgctggccggctcctctttgatggcttcaccctacaaatccagcagcccaaagctgtctggggccatgagctcgaactccttgggaattataacccctgtccctattcctgtccatgtgctctccttcagcgctgactcctctgccaaagcaggggtctccaaggatgccatcgtcacaggccctgcccccgggtccttccaccatggccttggccacagtcttctggctggcttgcactccagcccgccccatgcagcgcctctcccacacgctgcggtgcccacccatatcccgcagagtctgccaggtgcttctcagcttcacgggaaagggcctgctgtaccacggaaattgtgaccgcttcagaggcaaggcttgccacttgggtctgggtggaatcagaacgtgcaggtctcccaggatgtacactcactgcgccctttctgctgcttggtgttcttctggaggagcgtgagttctcagcggagcgcttctcggcacttctgatgtgcctcccatggagggagccgggcccttgctgctcaggaggtgcagactgccccgtgctctgggccttgcagctctgtcgctagacggttgttagaggggcagctctaggctggggcttgcgctgggccgtggtgggaggcacagtgtttacaggctctggtggcagagcagttggcacacctgtgggtgaatctgcctgatcccctggcatttggtcagagtacctcagagcaccccactgctcaggggctccttctggctgcagtaagctccctggatggtcacagtgccgccccatccccaggctgtgtgctcaaagcggacaaaactcaggccagagccacagctgggagacctgcactgtccctgcgaaatactaagaacacctagggtgtgctcactgtgggggccagtttctcctcggaacatgacaatgaagctcttttagagaaaagacctttgtagattcaacaattatgataggatttttacagacacctattttgggctcagttttcatcattaccattaaatgcattggatagaaggggactgttcttcacacatcatattataggaagacataattccagtgcctttatggtggagcagaattcgacaacacatgtccattcagccctctgaatggatctgagacgaagacctttttaaagatatgtctgtattgaagagaaagccagttttgagttttttacacttgcacatcattatctgtgccgtcctgactagaaggttgtctgggcccccaaattccaagtcccagtatagccagggctcccattttgtttttccagagttcgtggaggtggactgcagagcccagagcccttcatctctctgagggtcaaggataccaggggtcccaagtcacagatagacattccagtttgtattcttaggaatcattcttaggcagtgcggcagaagcaggcctctgtgaagtgtctgccgggtagaaataggccttgaagtcctggggctctccaggcagtggggttatgtgtcgactgaagggtgatgtgcagaagagcttggagagtggatcagagagactaggacagttactgcagagctcctaagtcaccactcaaccagtggctgtttcacaaggatttgagggcacttgcctgtcttgtgaggtctgtgccacaaggtgagtctgaactgactgctccagctaagtgatcaggcacgttgagagtatacggtgtcctcagcacatacacctgtgggaaaacggaccgctcttggctcctgactcccagggtacagcgcccagtaactcatccttcattcagaggtttgctggccttcccggtttcccaaggagcaagacctctgtccgccctttggcccggcctctgctctgactcctttttttacataagaaccaatctgtgtttcacattgggctaagtggattccttatccctttgttatatatattttttgcaacttggatttccagtttgtttacagagtagtcttaggtagtagcaaaagagccaaagaagagatttgtattgctgagctcaaagccaagcagaggccggcagtggaggctgagcagggactctccaggcttctctgcccataaacacccgggtcccaggccctccttcctttccctttggcgcagcgaaagtctctgagcacttaccgggcgtgaccgtttcttaggtgtgagaggggctgtggcttttgtgcagcgactatgttggtgttaggggtggtgtggagattgttaatcttgtataaagcaattcaataaattgtttcaaggtttccaaaacaaaaaaaaa

SEQ ID NO: 324953 - DNA, 1409 bp, Homo sapiens
  misc_feature (6)..(6): n is a, c, g, or t
cgaatngtaaccgttcgtacgagaatcgctgtcctctccttgctcgagatccattgtgctctaaagctgactagaaggttgtctgggcccccaaattccaagtcccagtatagccagggctcccattttgtttttccagagttcgtggaggtggactgcagagcccagagcccttcatctctctgagggtcaaggataccaggggtcccaagtcacagatagacattccagtttgtattcttaggaatcattcttaggcagtgcggcagaagcaggcctctgtgaagtgtctgccgggtagaaataggccttgaagtcctggggctctccaggcagtggggttatgtgtcgactgaagggtgatgtgcagaagagcttggagagtggatcagagagactaggacagttactgcagagctcctaagtcaccactcaaccagtggctgtttcacaaggatttgagggcacttgcctgtcttgtgaggtctgtgccacaaggtgagtctgaactgactgctccagctaagtgatcaggcacgttgagagtatacggtgtcctcagcacatacacctgtgggaaaacggaccgctcttggctcctgactcccagggtacagcgcccagtaactcatccttcattcagaggtttgctggccttcccggtttcccaaggagcaagacctctgtccgccctttggcccggcctctgctctgactcctttttttacataagaaccaatctgtgtttcacattgggctaagtggattccttatccctttgttatatatattttttgcaacttggatttccagtttgtttacagagtagtcttaggtagtagcaaaagagccaaagaagagatttgtattgctgagctcaaagccaagcagaggccggcagtggaggctgagcagggactctccaggcttctctgcccataaacacccgggtcccaggccctccttcctttccctttggtgctccctcctccccatgtaccattgcgcgtgcagctggagcagaataccctcatttttaggaatctagtgatgcctcttgcctcagggaaacgtttctttgatggggagtttgagatttcttttccttgtttatgctttatttgtggtaatgaaagagcgaatgactgaacagccatggcaaggcagacctacaggcgaggccgcagcagagggtggggcagagcagcctcggggtctgggggctgcaggggtttccctggcgcagcgaaagtctctgagcacttaccgggcgtgaccgtttcttaggtgtgagaggggctgtggcttttgtgcagcgactatgttggtgttaggggtggtgtggagattgttaatcttgtataaagcaattcaataaattgtttcaaggtttccaaaacaaaaaaaaa

SEQ ID NO: 324954 - DNA, 1453 bp, Homo sapiens
  misc_feature (6)..(6): n is a, c, g, or t
cgaatngtaaccgttcgtacgagaatcgctgtcctctccttgcggccgccagtgtggtggaattcccagttttgagttttttacacttgcacatcattatctgtgccgtcctgactagaaggttgtctgggcccccaaattccaagtcccagtatagccagggctcccattttgtttttccagagttcgtggaggtggactgcagagcccagagcccttcatctctctgagggtcaaggataccaggggtcccaagtcacagatagacattccagtttgtattcttaggaatcattcttaggcagtgcggcagaagcaggcctctgtgaagtgtctgccgggtagaaataggccttgaagtcctggggctctccaggcagtggggttatgtgtcgactgaagggtgatgtgcagaagagcttggagagtggatcagagagactaggacagttactgcagagctcctaagtcaccactcaaccagtggctgtttcacaaggatttgagggcacttgcctgtcttgtgaggtctgtgccacaaggtgagtctgaactgactgctccagctaagtgatcaggcacgttgagagtatacggtgtcctcagcacatacacctgtgggaaaacggaccgctcttggctcctgactcccagggtacagcgcccagtaactcatccttcattcagaggtttgctggccttcccggtttcccaaggagcaagacctctgtccgccctttggcccggcctctgctctgactcctttttttacataagaaccaatctgtgtttcacattgggctaagtggattccttatccctttgttatatatattttttgcaacttggatttccagtttgtttacagagtagtcttaggtagtagcaaaagagccaaagaagagatttgtattgctgagctcaaagccaagcagaggccggcagtggaggctgagcagggactctccaggcttctctgcccataaacacccgggtcccaggccctccttcctttccctttggtgctccctcctccccatgtaccattgcgcgtgcagctggagcagaataccctcatttttaggaatctagtgatgcctcttgcctcagggaaacgtttctttgatggggagtttgagatttcttttccttgtttatgctttatttgtggtaatgaaagagcgaatgactgaacagccatggcaaggcagacctacaggcgaggccgcagcagagggtggggcagagcagcctcggggtctgggggctgcaggggtttccctggcgcagcgaaagtctctgagcacttaccgggcgtgaccgtttcttaggtgtgagaggggctgtggcttttgtgcagcgactatgttggtgttaggggtggtgtggagattgttaatcttgtataaagcaattcaataaattgtttcaaggtttccaaaacaaaaaaaaa

SEQ ID NO: 324955 - DNA, 5128 bp, Homo sapiens
cgcgagcgccgcggtctccgcgcgccggagcgcagagactcccggctccttccccctcccttcggctcgtgacaacgaagcgcccgcggtctgaggcggcggcggcggcgacggtgcgaccggctgagcgcgagagggagccggcctcgcggctcgccccgcccccgggtcttggactccgcgcccctcccctctcggcgcttccgttacgcccgttggtccggcgcgggccccggggccattcccgagcccgaggcgctggtcggccccgtcgcagcgccagtgagctaccctgacggagctcggcgcggcctggaactcagcctccgccgggtctgggctcccgcgcccggcaactctgcttggccgcaggccgggaggccccggtgtccgcgcccgtccgctcccgccgcccgtgttctttggagcgctcctcccgacggccgctttcggaggcgccgtctgagcgcggggtcccgcgccgcaagttctcctggggcgaccggaggctgctcccccgaccccctggtgtccccggagtggctgcgcggacgtcgagttggcatttcttcgcttcctcctgggccggcgcgcggcgcggcacaccaggctcccctgggctcggggacccggccatgggccgaggcgcgggccgcccgcccgctgggagccacggcttagcagccgaccgctagctgcgccgccgcccggggaccggcatgaggaccgccgcggggggacgtctgcggcccgcgtcggcgctggggacaaagaagccatgcagtgacacccgctaagacttgttggtagccatgtcggagccccacagggtccagttcacctctctcccaggttccctgaatcctgcgtttttgaagaagtcccggaaggaggaggctggggcaggagaacagcatcaggactgtgagccggctgcagcagctgttcggattacactcaccctctttgaaccagatcacaaacgctgcccagagttcttctacccagagctggtgaagaatatccgagggaaggtaaaaggccttcagcctggagataagaagaaagatctgtcagatcctttcaatgacgaagaaaaggaaaggcataaagtagaggcccttgcccgaaaatttgaagaaaaatacggtggaaagaaacgtagaaaagaccgaatacaggacttgatcgatatggggtatggttatgatgaatccgactccttcatcgataactctgaggcgtatgatgagcttgttcctgcttctttgactacgaagtatggaggattttacattaactcgggaaccctgcagtttagacaagcatcagagtctgaagatgacttcattaaagaaaagaagaaaaaatctccaaagaagcggaagttgaaggaaggtggtgagaagataaagaagaagaaaaaaggatgacacttatgacaaggagaagaaatcgaaaaagtccaagttttccaaagccggcttcacagccctcaatgccagtaaggagaagaagaagaagaaatattctggggctttaagcgttaaagagatgctaaagaaatttcagaaagagaaagaggctcagaaaaaaagggaggaggagcataagcctgttgcggtcccatcagcggaagttcagggcctgcgggaactggagggtgcctctgaccccttgctctcactctttggctctacttctgacaacgacttgctccaggcggccactgccatggactcgctgacggatttggacttggagcatctgctcagtgagtctccagaaggaagtcccttccgagatatggatgatggaagtgattcccttggggtgggattggaccaggaattcaggcagccctcttctctccccgaaggcctgccagcacccctggagaagcgcgttaaggagctggctcaggctgccagagctgctgagggggagagcagacagaagttcttcacccaggatattaatggaatcctattagacatagaggcgcagactcgggagctgagcagtcaggtccgctctggggtgtatgcctatcttgcgtcattcctgccctgcagcaaggatgccctgctcaagcgtgctcggaaacttcacctctatgaacaggggggccgtctgaaggagcctctccagaagctcaaggaagccattggcagggcgatgccagagcagatggccaagtaccaggacgaatgccaggcacacacgcaggcaaaggttgccaagatgctggaagaggagaaagacaaggagcagagggaccggatttgttcggatgaggaagaagatgaagaaaaagggggcaggaggataatgggacctcggaagaagttccaatggaatgatgagatcagggagctactgtgccaggtggtgaagatcaaactggagagccaggacctggagaggaacaacaaagcccaggcttgggaggactgtgtgaagggctttctggatgcggaagtcaagcccctctggcccaaaggctggatgcaggccagaactctgtttaaggagagcagacgaggccatgggcacctgacttcaatcctggccaagaagaaagttatggccccttctaaaatcaaggtgaaggaatcgtctacgaagcctgataaaaaggtttctgtcccatcaggacagattggtggccccattgctttgccctcagatcaccaaacaggaggcctgagtattggggcctcgagcagggagctcccatcccaggcatcgggcggccttgctaaccctcctcctgtcaacctggaggactcattggatgaagacttgatccgcaatccagcctcctcggtggaagccgtgtccaaggaattggctgcattgaatagcagagcagctgggaactctgaattcacactgcctgcaccctcaaaagcacctgcagaaaaagttggaggcgttttatgtacagaagaaaaaaggaactttgcgaagcctagtccttctgctccaccaccagctagctctctgcagtcacccctcaattttctggcagaacaggctctggcactggggcagtcctctcaggagaaaaaaccagagagttctggctacaaagagctgtcctgccaggctcccctcaataagggcctgccagaagtacatcagtccaaagctaagcaccacagcttgccacggacgtctcacgggccccaagtggcagttcctgtgcctggcccccaggtcaaagtctttcatgccggcactcagcagcagaaaaacttcacgcccccatctccatttgccaataagctccaaggcccaaaggcttctcccacacagtgtcatcgttccctcctgcagttagtgaagacagcggccaaaggccagggcttccatccctctgcaccagccacctcaggaggcctgtcagcctccagcagcagctctcacaagaccccagcctcgtcctcttctgccctgagccatccagcaaagccacattcagtcagctctgcaggctcatcttacaagaataatccctttgccagctcaatctccaaacatggggtttcttctggcagctcttcctcgggaggaacaccagtccagagttctgtttctgggagcctggtccctggcatacagcctccctccgtgggacaggccaccagccgacccgtcccaagttcagcagggaaaaaaatgcctgtttcccagaagttgactctggtagcccctccaggcggtccaaacggagattccagtggtgggacccagggagtggcaaagttgctgacctcgccgtccctaaagccctctgcagttagtagtgtgacatcgtctacctccttgtcaaaaggagcgagtgggactgtgctgctggccggctcctctttgatggcttcaccctacaaatccagcagcccaaagctgtctggggccatgagctcgaactccttgggaattataacccctgtccctattcctgtccatgtgctctccttcagcgctgactcctctgccaaagcaggggtctccaaggatgccatcgtcacaggccctgcccccgggtccttccaccatggccttggccacagtcttctggctggcttgcactccagcccgccccatgcagcgcctctcccacacgctgcggtgcccacccatatcccgcagagtctgccaggtgcttctcagcttcacgggaaagggcctgctgtaccacggaaattgtgaccgcttcagaggcaaggcttgccacttgggtctgggtggaatcagaacgtgcaggtctcccaggatgtacactcactgcgccctttctgctgcttggtgttcttctggaggagcgtgagttctcagcggagcgcttctcggcacttctgatgtgcctcccatggagggagccgggcccttgctgctcaggaggtgcagactgccccgtgctctgggccttgcagctctgtcgctagacggttgttagaggggcagctctaggctggggcttgcgctgggccgtggtgggaggcacagtgtttacaggctctggtggcagagcagttggcacacctgtgggtgaatctgcctgatcccctggcatttggtcagagtacctcagagcaccccactgctcaggggctccttctggctgcagtaagctccctggatggtcacagtgccgccccatccccaggctgtgtgctcaaagcggacaaaactcaggccagagccacagctgggagacctgcactgtccctgcgaaatacctcatttttaggaatctagtgatgcctcttgcctcagggaaacgtttctttgatggggagtttgagatttcttttccttgtttatgctttatttgtggtaatgaaagagcgaatgactgaacagccatggcaaggcagacctacaggcgaggccgcagcagagggtggggcagagcagcctcggggtctgggggctgcaggggtttccctggcgcagcgaaagtctctgagcacttaccgggcgtgaccgtttcttaggtgtgagaggggctgtggcttttgtgcagcgactatgttggtgttaggggtggtgtggagattgttaatcttgtataaagcaattcaataaattgtttcaaggtttccaaaacaaaaaaaaa

SEQ ID NO: 324956 - DNA, 1072 bp, Homo sapiens
gatgctcgggttgcgtactctagagatctcggcaacagaggactactatacactaagagcgagtacggaatgacaccgtgagatcatcactcatccagcggctggtcatgcaaggtattggacgggcccgtgcccgtacagctgtacgtctgtgccacaaggtgagtctgaactgactgctccagctaagtgatcaggcacgttgagagtatacggtgtcctcagcacatacacctgtgggaaaacggaccgctcttggctcctgactcccagggtacagcgcccagtaactcatccttcattcagaggtttgctggccttcccggtttcccaaggagcaagacctctgtccgccctttggcccggcctctgctctgactcctttttttacataagaaccaatctgtgtttcacattgggctaagtggattccttatccctttgttatatatattttttgcaacttggatttccagtttgtttacagagtagtcttaggtagtagcaaaagagccaaagaagagatttgtattgctgagctcaaagccaagcagaggccggcagtggaggctgagcagggactctccaggcttctctgcccataaacacccgggtcccaggccctccttcctttccctttggtgctccctcctccccatgtaccattgcgcgtgcagctggagcagaataccctcatttttaggaatctagtgatgcctcttgcctcagggaaacgtttctttgatggggagtttgagatttcttttccttgtttatgctttatttgtggtaatgaaagagcgaatgactgaacagccatggcaaggcagacctacaggcgaggccgcagcagagggtggggcagagcagcctcggggtctgggggctgcaggggtttccctggcgcagcgaaagtctctgagcacttaccgggcgtgaccgtttcttaggtgtgagaggggctgtggcttttgtgcagcgactatgttggtgttaggggtggtgtggagattgttaatcttgtataaagcaattcaataaattgtttcaaggtttccaaaacaaaaaaaaa

SEQ ID NO: 324957 - DNA, 4139 bp, Homo sapiens
cgcgagcgccgcggtctccgcgcgccggagcgcagagactcccggctccttccccctcccttcggctcgtgacaacgaagcgcccgcggtctgaggcggcggcggcggcgacggtgcgaccggctgagcgcgagagggagccggcctcgcggctcgccccgcccccgggtcttggactccgcgcccctcccctctcggcgcttccgttacgcccgttggtccggcgcgggccccggggccattcccgagcccgaggcgctggtcggccccgtcgcagcgccagtgagctaccctgacggagctcggcgcggcctggaactcagcctccgccgggtctgggctcccgcgcccggcaactctgcttggccgcaggccgggaggccccggtgtccgcgcccgtccgctcccgccgcccgtgttctttggagcgctcctcccgacggccgctttcggaggcgccgtctgagcgcggggtcccgcgccgcaagttctcctggggcgaccggaggctgctcccccgaccccctggtgtccccggagtggctgcgcggacgtcgagttggcatttcttcgcttcctcctgggccggcgcgcggcgcggcacaccaggctcccctgggctcggggacccggccatgggccgaggcgcgggccgcccgcccgctgggagccacggcttagcagccgaccgctagctgcgccgccgcccggggaccggcatgaggaccgccgcggggggacgtctgcggcccgcgtcggcgctggggacaaagaagccatgcagtgacacccgctaagacttgttggtagccatgtcggagccccacagggtccagttcacctctctcccaggttccctgaatcctgcgtttttgaagaagtcccggaaggaggaggctggggcaggagaacagcatcaggactgtgagccggctgcagcagctgttcggattacactcaccctctttgaaccagatcacaaacgctgcccagagttcttctacccagagctggtgaagaatatccgagggaaggtaaaaggccttcagcctggagataagaagaaagatctgtcagatcctttcaatgacgaagaaaaggaaaggcataaagtagaggcccttgcccgaaaatttgaagaaaaatacggtggaaagaaacgtagaaaagaccgaatacaggacttgatcgatatggggtatggttatgatgaatccgactccttcatcgataactctgaggcgtatgatgagcttgttcctgcttctttgactacgaagtatggaggattttacattaactcgggaaccctgcagtttagacaagcatcagagtctgaagatgacttcattaaagaaaagaagaaaaaatctccaaagaagcggaagttgaaggaaggtggtgagaagataaagaagaagaaaaaaggatgacacttatgacaaggagaagaaatcgaaaaagtccaagttttccaaagccggcttcacagccctcaatgccagtaaggagaagaagaagaagaaatattctggggctttaagcgttaaagagatgctaaagaaatttcagaaagagaaagaggctcagaaaaaaagggaggaggagcataagcctgttgcggtcccatcagcggaagttcagggcctgcgggaactggagggtgcctctgaccccttgctctcactctttggctctacttctgacaacgacttgctccaggcggccactgccatggactcgctgacggatttggacttggagcatctgctcagtgagtctccagaaggaagtcccttccgagatatggatgatggaagtgattcccttggggtgggattggaccaggaattcaggcagccctcttctctccccgaaggcctgccagcacccctggagaagcgcgttaaggagctggctcaggctgccagagctgctgagggggagagcagacagaagttcttcacccaggatattaatggaatcctattagacatagaggcgcagactcgggagctgagcagtcaggtccgctctggggtgtatgcctatcttgcgtcattcctgccctgcagcaaggatgccctgctcaagcgtgctcggaaacttcacctctatgaacaggggggccgtctgaaggagcctctccagaagctcaaggaagccattggcagggcgatgccagagcagatggccaagtaccaggacgaatgccaggcacacacgcaggcaaaggttgccaagatgctggaagaggagaaagacaaggagcagagggaccggatttgttcggatgaggaagaagatgaagaaaaagggggcaggaggataatgggacctcggaagaagttccaatggaatgatgagatcagggagctactgtgccaggtggtgaagatcaaactggagagccaggacctggagaggaacaacaaagcccaggcttgggaggactgtgtgaagggctttctggatgcggaagtcaagcccctctggcccaaaggctggatgcaggccagaactctgtttaaggagagcagacgaggccatgggcacctgacttcaatcctggccaagaagaaagttatggccccttctaaaatcaaggtgaaggaatcgtctacgaagcctgataaaaaggtttctgtcccatcaggacagattggtggccccattgctttgccctcagatcaccaaacaggaggcctgagtattggggcctcgagcagggagctcccatcccaggcatcgggcggccttgctaaccctcctcctgtcaacctggaggactcattggatgaagacttgatccgcaatccagcctcctcggtggaagccgtgtccaaggaattggctgcattgaatagcagagcagctgggaactctgaattcacactgcctgcaccctcaaaagcacctgcagaaaaagttggaggcgttttatgtacagaagaaaaaaggaactttgcgaagcctagtccttctgctccaccaccagctagctctctgcagtcacccctcaattttctggcagaacaggctctggcactggggcagtcctctcaggagaaaaaaccagagagttctggctacaaagagctgtcctgccaggctcccctcaataagggcctgccagaagtacatcagtccaaagctaagcaccacagcttgccacggacgtctcacgggccccaagtggcagttcctgtgcctggcccccaggtcaaagtctttcatgccggcactcagcagcagaaaaacttcacgcccccatctccatttgccaataagctccaaggcccaaaggcttctcccacacagtgtcatcgttccctcctgcagttagtgaagacagcggccaaaggccagggcttccatccctctgcaccagccacctcaggaggcctgtcagcctccagcagcagctctcacaagaccccagcctcgtcctcttctgccctgagccatccagcaaagccacattcagtcagctctgcaggctcatcttacaagaataatccctttgccagctcaatctccaaacatggggtttcttctggcagctcttcctcgggaggaacaccagtccagagttctgtttctgggagcctggtccctggcatacagcctccctccgtgggacaggccaccagccgacccgtcccaagttcagcagggaaaaaaatgcctgtttcccagaagttgactctggtagcccctccaggcggtccaaacggagattccagtggtgggacccagggagtggcaaagttgctgacctcgccgtccctaaagccctctgcagttagtagtgtgacatcgtctacctccttgtcaaaaggagcgagtgggactgtgctgctggccggctcctctttgatggcttcaccctacaaatccagcagcccaaagctgtctggggccatgagctcgaactcctcggggtctgggggctgcaggggtttccctggcgcagcgaaagtctctgagcacttaccgggcgtgaccgtttcttaggtgtgagaggggctgtggcttttgtgcagcgactatgttggtgttaggggtggtgtggagattgttaatcttgtataaagcaattcaataaattgtttcaaggtttccaaaacaaaaaaaaa

SEQ ID NO: 324958 - DNA, 1463 bp, Homo sapiens
cgcgagcgccgcggtctccgcgcgccggagcgcagagactcccggctccttccccctcccttcggctcgtgacaacgaagcgcccgcggtctgaggcggcggcggcggcgacggtgcgaccggctgagcgcgagagggagccggcctcgcggctcgccccgcccccgggtcttggactccgcgcccctcccctctcggcgcttccgttacgcccgttggtccggcgcgggccccggggccattcccgagcccgaggcgctggtcggccccgtcgcagcgccagtgagctaccctgacggagctcggcgcggcctggaactcagcctccgccgggtctgggctcccgcgcccggcaactctgcttggccgcaggccgggaggccccggtgtccgcgcccgtccgctcccgccgcccgtgttctttggagcgctcctcccgacggccgctttcggaggcgccgtctgagcgcggggtcccgcgccgcaagttctcctggggcgaccggaggctgctcccccgaccccctggtgtccccggagtggctgcgcggacgtcgagttggcatttcttcgcttcctcctgggccggcgcgcggcgcggcacaccaggctcccctgggctcggggacccggccatgggccgaggcgcgggccgcccgcccgctgggagccacggcttagcagccgaccgctagctgcgccgccgcccggggaccggcatgaggaccgccgcggggggacgtctgcggcccgcgtcggcgctggggacaaagaagccatgcagtgacacccgctaagacttgttggtagccatgtcggagccccacagggtccagttcacctctctcccaggttccctgaatcctgcgtttttgaagaagtcccggaaggaggaggctggggcaggagaacagcatcaggactgtgagccggctgcagcagctgttcggattacactcaccctctttgaaccagatcacaaacgctgcccagagttcttctacccagagctggtgaagaatatccgagggaaggtaaaaggccttcagcctggagataagaagaaagatctgtcagatcctttcaatgacgaagaaaaggaaaggcataaagtagaggcccttgcccgaaaatttgaagaaaaatacggtggaaagaaacgtagaaaagaccgaatacaggacttgatcgatatggggtatggttatgatgaatccgactccttcatcgataactctgaggcgtatgatgagcttgttcctgcttctttgactacgaagtatggaggattttacattaactcgggaaccctgcagtttagacaagcatcagagtctgaagatgacttcattaaagaaaagaagaaaaaatctccaaagaagcggaagttgaaggaaggtggtgagaagataaagaagaagaaaaaaggatgacacgttcgcgagggtaccggctcgattcta

SEQ ID NO: 324959 - DNA, 1571 bp, Homo sapiens
cgcgagcgccgcggtctccgcgcgccggagcgcagagactcccggctccttccccctcccttcggctcgtgacaacgaagcgcccgcggtctgaggcggcggcggcggcgacggtgcgaccggctgagcgcgagagggagccggcctcgcggctcgccccgcccccgggtcttggactccgcgcccctcccctctcggcgcttccgttacgcccgttggtccggcgcgggccccggggccattcccgagcccgaggcgctggtcggccccgtcgcagcgccagtgagctaccctgacggagctcggcgcggcctggaactcagcctccgccgggtctgggctcccgcgcccggcaactctgcttggccgcaggccgggaggccccggtgtccgcgcccgtccgctcccgccgcccgtgttctttggagcgctcctcccgacggccgctttcggaggcgccgtctgagcgcggggtcccgcgccgcaagttctcctggggcgaccggaggctgctcccccgaccccctggtgtccccggagtggctgcgcggacgtcgagttggcatttcttcgcttcctcctgggccggcgcgcggcgcggcacaccaggctcccctgggctcggggacccggccatgggccgaggcgcgggccgcccgcccgctgggagccacggcttagcagccgaccgctagctgcgccgccgcccggggaccggcatgaggaccgccgcggggggacgtctgcggcccgcgtcggcgctggggacaaagaagccatgcagtgacacccgctaagacttgttggtagccatgtcggagccccacagggtccagttcacctctctcccaggttccctgaatcctgcgtttttgaagaagtcccggaaggaggaggctggggcaggagaacagcatcaggactgtgagccggctgcagcagctgttcggattacactcaccctctttgaaccagatcacaaacgctgcccagagttcttctacccagagctggtgaagaatatccgagggaaggtaaaaggccttcagcctggagataagaagaaagatctgtcagatcctttcaatgacgaagaaaaggaaaggcataaagtagaggcccttgcccgaaaatttgaagaaaaatacggtggaaagaaacgtagaaaagaccgaatacaggacttgatcgatatggggtatggttatgatgaatccgactccttcatcgataactctgaggcgtatgatgagcttgttcctgcttctttgactacgaagtatggaggattttacattaactcgggaaccctgcagtttagacaagcatcagagtctgaagatgacttcattaaagaaaagaagaaaaaatctccaaagaagcggaagttgaaggaaggtggtgaaagcggaagtataaagcgttgagctcaacgctttatacttctccatgcatactttgaatatgtgcttctactgggtagaatgtggagatagcgaataatgtgggtataaaattcagactgggataaatggcaataggtattataacggaagttgatagactgcatg

SEQ ID NO: 324960 - DNA, 377 bp, Homo sapiens
tatgatgagcttgttcctgcttctttgactacgaagtatggaggattttacattaactcgggaaccctgcagtttagacaagcatcagagtctgaagatgacttcattaaagaaaagaagaaaaaatctccaaaggttagaatgtgcttgcttttggatttcagaaatgctttttgacgtgaccctatcagatcagtaggtgacttgccagaatacgtggcgcttggccggctcaggaggatggtggaaaggcagagccgtgccaggttgatggctcgcctcttacacgtgtgccctaatgaggacacgtgcccgtgggggctctgttcagcacttggtcattatgtccatgtcacatgacatcccagcaggctcag

SEQ ID NO: 324961 - DNA, 372 bp, Homo sapiens
tcacatctcgggacaagtgttgtttttggtctcctctggatattctctaaacttttctgtgctcattcctttgaacagggccaagaagaaagttatggccccttctaaaatcaaggtgaaggtgagtcagtttgctcgggtcacatgtcagctatgcccatctccctacaactatgctctggaaacagtcaagtgactgtggaagctcattgatctttgctcgtctggggacagctgctcaggatgacattcttgaagtcataacaggacagagacccaagccacttaacccccctctagccttggttctacaaacagtacccagctggcccagttcctggggttcatgtgggattaagtgggatcttcttg

SEQ ID NO: 324962 - DNA, 359 bp, Homo sapiens
ggagctactgtgccaggtggtgaagatcaaactggagagccaggacctggagaggaacaacaaagcccaggcttgggaggactgtgtgaagggctttctggatgcggaagtcaagcccctctggcccaaaggctggatgcaggccaggtgagggccgtgtgctgagatgggcatctgtgcagtcaagacacgtttgaacgctgcttttgtgccaggccaacaggatccttgctcacagggagtcactgtctagctgcctcaactctgatctcacctgagtaactgggggacatgcaggtagctgggaaagggtcttctggatcttccctggaggaagggaagttgcctccagggttttg

SEQ ID NO: 324963 - DNA, 210 bp, Homo sapiens
agggtggagttggaaaggtggcggtgtgactgtattgacaggtgctctttatggagcgatgactcctgtgcctgtgggtgagcgtaagggacatgtggggaaagtgcactaacggctgttactgtctgctgtgcaccaggctgccagagctgctgagggggagagcagacagaagttcttcacccaggatattaatggaatcctattaga

SEQ ID NO: 324964 - DNA, 477 bp, Homo sapiens
gctttcctgttcctgtcttcaatgtgtgtgttttgttcttttctcccctcctgttttctctcaggtcttctggctggcttgcactccagcccgccccatgcagcgcctctcccacacgctgcggtgcccacccatatcccgcagagtctgccaggtaatcacccgacggtcagtgtgccacgcgcaccgtgtgcctttgccctctccacccctaggtgctttgccgctgccaagggtcttggtgtctttgccttgacgctgttgttgttttggtttgtcctttgaggctgtgctttgtcagtactcagggtgacacgcacttctactcttggggtttcctctggtccccacttggactgccgccaggtcagcctcagcctgtgtgatcacagggaaagttgcggggggcagggtggtgcgcttttgtgtgcggtggaggagttcctaaccctcggcttgtttttttctcttcagttt

SEQ ID NO: 324965 - DNA, 557 bp, Homo sapiens
cccctcgcgaacgtgttatccgaacggctgcagcagctgttcggattacactcaccctctttgaaccagatcacaaacgctgcccagagttcttctacccagagctggtgaagaatatccgagggaaggtaaaaggccttcagcctggagataagaagaaagatctgtcagatcctttcaatgacgaagaaaaggaaaggcataaagtagaggcccttgcccgaaaatttgaagaaaaatacggtggaaagaaacgtagaaaagaccgaatacaggacttgatcgatatggggtatggttatgatgaatccgactccttcatcgataactctgaggcgtatgatgagcttgttcctgcttctttgactacgaagtatggaggattttacattaactcgggaaccctgcagtttagacaagcatcagagtctgaagatgacttcattaaagaaaagaagaaaaaatctccaaagaagcggaagttgaaggaaggtggtgagaagataaagaagaagaaaaaaggatgacacgttcgcgagggtaccggctcgattcta

SEQ ID NO: 324966 - DNA, 4976 bp, Homo sapiens
  misc_feature (132)..(132): n is a, c, g, or t
  misc_feature (164)..(164): n is a, c, g, or t
tatatatccaagaggtaataaaaccctggcccaagcttagcttagatgatggtttaaggagcacagctttcctgatagttctgacctcaatgaccaagtgaataggttttaagtaaacggaataaaacagcnaaattagctagagccaaagagaaggtttccanggcccagagccagttatctagaaggaaagacgtgactgcaaggtgactacagaatggcctgtagcccagagggatgggttggcacaagctaaagaggtatcttcttcgaagtataaagcgttgagctcaacgctttatacttcgtagtggaaagaaacgtagaaaagaccgaatacaggacttgatcgatatggggtatggttatgatgaatccgactccttcatcgataactctgaggcgtatgatgagcttgttcctgcttctttgactacgaagtatggaggattttacattaactcgggaaccctgcagtttagacaagcatcagagtctgaagatgacttcattaaagaaaagaagaaaaaatctccaaagaagcggaagtataaagcgttgagctcaacgctttatacttctaaataatataatcatagaaattaccctgtagtcaatgtctatttatttattcattttgagacaaagtctcactctgttgcccagactggagtgcaatggcacgatctcggctcactgcaacctccgcctcccaagttcaagcgaatctcctgcctcagcctcccgagtagctgggattacaggcactgcgccaccacgcctggctaacttttagtatttttagtacgagacggggtttcaccatgttggccaggctggtctcgaactcctgacctcaggtgatccacctgccttggcctccaaaagtgctgggattacaggcgtgagccactgcgcctggccagttgacatttaatgagggatagctactgaggaccagggacactagcaaagttctggaagcagagtcccagctttctggggcatgtacagatgcctggtgttctgtgtctttcagaactctgtttaaggagagcagacgaggccatgggcacctgacttcaatcctggccaagaagaaagttatggccccttctaaaatcaaggtgaaggaatcgtctacgaagcctgataaaaaggtttctgtcccatcaggacagattggtggccccattgctttgccctcagatcaccaaacaggaggcctgagtattggggcctcgagcagggagctcccatcccaggcatcgggcggccttgctaaccctcctcctgtcaacctggaggactcattggatgaagacttgatccgcaatccagcctcctcggtggaagccgtgtccaaggaattggctgcattgaatagcagagcagctgggaactctgaattcacactgcctgcaccctcaaaagcacctgcagaaaaagttggaggcgttttatgtacagaagaaaaaaggaactttgcgaagcctagtccttctgctccaccaccagctagctctctgcagtcacccctcaattttctggcagaacaggctctggcactggggcagtcctctcaggagaaaaaaccagagagttctggctacaaagagctgtcctgccaggctcccctcaataagggcctgccagaagtacatcagtccaaagctaagcaccacagcttgccacggacgtctcacgggccccaagtggcagttcctgtgcctggcccccaggtcaaagtctttcatgccggcactcagcagcagaaaaacttcacgcccccatctccatttgccaataagctccaaggcccaaaggcttctcccacacagtgtcatcgttccctcctgcagttagtgaagacagcggccaaaggccagggcttccatccctctgcaccagccacctcaggaggcctgtcagcctccagcagcagctctcacaagaccccagcctcgtcctcttctgccctgagccatccagcaaagccacattcagtcagctctgcaggctcatcttacaagaataatccctttgccagctcaatctccaaacatggggtttcttctggcagctcttcctcgggaggaacaccagtccagagttctgtttctgggagcctggtccctggcatacagcctccctccgtgggacaggccaccagccgacccgtcccaagttcagcagggaaaaaaatgcctgtttcccagaagttgactctggtagcccctccaggcggtccaaacggagattccagtggtgggacccagggagtggcaaagttgctgacctcgccgtccctaaagccctctgcagttagtagtgtgacatcgtctacctccttgtcaaaaggagcgagtgggactgtgctgctggccggctcctctttgatggcttcaccctacaaatccagcagcccaaagctgtctggggccatgagctcgaactccttgggaattataacccctgtccctattcctgtccatgtgctctccttcagcgctgactcctctgccaaagcaggggtctccaaggatgccatcgtcacaggccctgcccccgggtccttccaccatggccttggccacagtcttctggctggcttgcactccagcccgccccatgcagcgcctctcccacacgctgcggtgcccacccatatcccgcagagtctgccaggtgcttctcagcttcacgggaaagggcctgctgtaccacggaaattgtgaccgcttcagaggcaaggcttgccacttgggtctgggtggaatcagaacgtgcaggtctcccaggatgtacactcactgcgccctttctgctgcttggtgttcttctggaggagcgtgagttctcagcggagcgcttctcggcacttctgatgtgcctcccatggagggagccgggcccttgctgctcaggaggtgcagactgccccgtgctctgggccttgcagctctgtcgctagacggttgttagaggggcagctctaggctggggcttgcgctgggccgtggtgggaggcacagtgtttacaggctctggtggcagagcagttggcacacctgtgggtgaatctgcctgatcccctggcatttggtcagagtacctcagagcaccccactgctcaggggctccttctggctgcagtaagctccctggatggtcacagtgccgccccatccccaggctgtgtgctcaaagcggacaaaactcaggccagagccacagctgggagacctgcactgtccctgcgaaatactaagaacacctagggtgtgctcactgtgggggccagtttctcctcggaacatgacaatgaagctcttttagagaaaagacctttgtagattcaacaattatgataggatttttacagacacctattttgggctcagttttcatcattaccattaaatgcattggatagaaggggactgttcttcacacatcatattataggaagacataattccagtgcctttatggtggagcagaattcgacaacacatgtccattcagccctctgaatggatctgagacgaagacctttttaaagatatgtctgtattgaagagaaagccagttttgagttttttacacttgcacatcattatctgtgccgtcctgactagaaggttgtctgggcccccaaattccaagtcccagtatagccagggctcccattttgtttttccagagttcgtggaggtggactgcagagcccagagcccttcatctctctgagggtcaaggataccaggggtcccaagtcacagatagacattccagtttgtattcttaggaatcattcttaggcagtgcggcagaagcaggcctctgtgaagtgtctgccgggtagaaataggccttgaagtcctggggctctccaggcagtggggttatgtgtcgactgaagggtgatgtgcagaagagcttggagagtggatcagagagactaggacagttactgcagagctcctaagtcaccactcaaccagtggctgtttcacaaggatttgagggcacttgcctgtcttgtgaggtctgtgccacaaggtgagtctgaactgactgctccagctaagtgatcaggcacgttgagagtatacggtgtcctcagcacatacacctgtgggaaaacggaccgctcttggctcctgactcccagggtacagcgcccagtaactcatccttcattcagaggtttgctggccttcccggtttcccaaggagcaagacctctgtccgccctttggcccggcctctgctctgactcctttttttacataagaaccaatctgtgtttcacattgggctaagtggattccttatccctttgttatatatattttttgcaacttggatttccagtttgtttacagagtagtcttaggtagtagcaaaagagccaaagaagagatttgtattgctgagctcaaagccaagcagaggccggcagtggaggctgagcagggactctccaggcttctctgcccataaacacccgggtcccaggccctccttcctttccctttggtgctccctcctccccatgtaccattgcgcgtgcagctggagcagaataccctcatttttaggaatctagtgatgcctcttgcctcagggaaacgtttctttgatggggagtttgagatttcttttccttgtttatgctttatttgtggtaatgaaagagcgaatgactgaacagccatggcaaggcagacctacaggcgaggccgcagcagagggtggggcagagcagcctcggggtctgggggctgcaggggtttccctggcgcagcgaaagtctctgagcacttaccgggcgtgaccgtttcttaggtgtgagaggggctgtggcttttgtgcagcgactatgttggtgttaggggtggtgtggagattgttaatcttgtataaagcaattcaataaattgtttcaaggtttccaaaacaaaaaaaaa

SEQ ID NO: 324967 - DNA, 4501 bp, Homo sapiens
cgcgagcgccgcggtctccgcgcgccggagcgcagagactcccggctccttccccctcccttcggctcgtgacaacgaagcgcccgcggtctgaggcggcggcggcggcgacggtgcgaccggctgagcgcgagagggagccggcctcgcggctcgccccgcccccgggtcttggactccgcgcccctcccctctcggcgcttccgttacgcccgttggtccggcgcgggccccggggccattcccgagcccgaggcgctggtcggccccgtcgcagcgccagtgagctaccctgacggagctcggcgcggcctggaactcagcctccgccgggtctgggctcccgcgcccggcaactctgcttggccgcaggccgggaggccccggtgtccgcgcccgtccgctcccgccgcccgtgttctttggagcgctcctcccgacggccgctttcggaggcgccgtctgagcgcggggtcccgcgccgcaagttctcctggggcgaccggaggctgctcccccgaccccctggtgtccccggagtggctgcgcggacgtcgagttggcatttcttcgcttcctcctgggccggcgcgcggcgcggcacaccaggctcccctgggctcggggacccggccatgggccgaggcgcgggccgcccgcccgctgggagccacggcttagcagccgaccgctagctgcgccgccgcccggggaccggcatgaggaccgccgcggggggacgtctgcggcccgcgtcggcgctggggacaaagaagccatgcagtgacacccgctaagacttgttggtagccatgtcggagccccacagggtccagttcacctctctcccaggttccctgaatcctgcgtttttgaagaagtcccggaaggaggaggctggggcaggagaacagcatcaggactgtgagccggctgcagcagctgttcggattacactcaccctctttgaaccagatcacaaacgctgcccagagttcttctacccagagctggtgaagaatatccgagggaaggtaaaaggccttcagcctggagataagaagaaagatctgtcagatcctttcaatgacgaagaaaaggaaaggcataaagtagaggcccttgcccgaaaatttgaagaaaaatacggtggaaagaaacgtagaaaagaccgaatacaggacttgatcgatatggggtatggttatgatgaatccgactccttcatcgataactctgaggcgtatgatgagcttgttcctgcttctttgactacgaagtatggaggattttacattaactcgggaaccctgcagtttagacaagcatcagagtctgaagatgacttcattaaagaaaagaagaaaaaatctccaaagaagcggaagttgaaggaaggtggtgagaagataaagaagaagaaaaaaggatgacacttatgacaaggagaagaaatcgaaaaagtccaagttttccaaagccggcttcacagccctcaatgccagtaaggagaagaagaagaagaaatattctggggctttaagcgttaaagagatgctaaagaaatttcagaaagagaaagaggctcagaaaaaaagggaggaggagcataagcctgttgcggtcccatcagcggaagttcagggcctgcgggaactggagggtgcctctgaccccttgctctcactctttggctctacttctgacaacgacttgctccaggcggccactgccatggactcgctgacggatttggacttggagcatctgctcagtgagtctccagaaggaagtcccttccgagatatggatgatggaagtgattcccttggggtgggattggaccaggaattcaggcagccctcttctctccccgaaggcctgccagcacccctggagaagcgcgttaaggagctggctcaggctgccagagctgctgagggggagagcagacagaagttcttcacccaggatattaatggaatcctattagacatagaggcgcagactcgggagctgagcagtcaggtccgctctggggtgtatgcctatcttgcgtcattcctgccctgcagcaaggatgccctgctcaagcgtgctcggaaacttcacctctatgaacaggggggccgtctgaaggagcctctccagaagctcaaggaagccattggcagggcgatgccagagcagatggccaagtaccaggacgaatgccaggcacacacgcaggcaaaggttgccaagatgctggaagaggagaaagacaaggagcagagggaccggatttgttcggatgaggaagaagatgaagaaaaagggggcaggaggataatgggacctcggaagaagttccaatggaatgatgagatcagggagctactgtgccaggtggtgaagatcaaactggagagccaggacctggagaggaacaacaaagcccaggcttgggaggactgtgtgaagggctttctggatgcggaagtcaagcccctctggcccaaaggctggatgcaggccagaactctgtttaaggagagcagacgaggccatgggcacctgacttcaatcctggccaagaagaaagttatggccccttctaaaatcaaggtgaaggaatcgtctacgaagcctgataaaaaggtttctgtcccatcaggacagattggtggccccattgctttgccctcagatcaccaaacaggaggcctgagtattggggcctcgagcagggagctcccatcccaggcatcgggcggccttgctaaccctcctcctgtcaacctggaggactcattggatgaagacttgatccgcaatccagcctcctcggtggaagccgtgtccaaggaattggctgcattgaatagcagagcagctgggaactctgaattcacactgcctgcaccctcaaaagcacctgcagaaaaagttggaggcgttttatgtacagaagaaaaaaggaactttgcgaagcctagtccttctgctccaccaccagctagctctctgcagtcacccctcaattttctggcagaacaggctctggcactggggcagtcctctcaggagaaaaaaccagagagttctggctacaaagagctgtcctgccaggctcccctcaataagggcctgccagaagtacatcagtccaaagctaagcaccacagcttgccacggacgtctcacgggccccaagtggcagttcctgtgcctggcccccaggtcaaagtctttcatgccggcactcagcagcagaaaaacttcacgcccccatctccatttgccaataagctccaaggcccaaaggcttctcccacacagtgtcatcgttccctcctgcagttagtgaagacagcggccaaaggccagggcttccatccctctgcaccagccacctcaggaggcctgtcagcctccagcagcagctctcacaagaccccagcctcgtcctcttctgccctgagccatccagcaaagccacattcagtcagctctgcaggctcatcttacaagaataatccctttgccagctcaatctccaaacatggggtttcttctggcagctcttcctcgggaggaacaccagtccagagttctgtttctgggagcctggtccctggcatacagcctccctccgtgggacaggccaccagccgacccgtcccaagttcagcagggaaaaaaatgcctgtttcccagaagttgactctggtagcccctccaggcggtccaaacggagattccagtggtgggacccagggagtggcaaagttgctgacctcgccgtccctaaagccctctgcagttagtagtgtgacatcgtctacctccttgtcaaaaggagcgagtgggactgtgctgctggccggctcctctttgatggcttcaccctacaaatccagcagcccaaagctgtctggggccatgagctcgaactccttgggaattataacccctgtccctattcctgtccatgtgctctccttcagcgctgactcctctgccaaagcaggggtctccaaggatgccatcgtcacaggccctgcccccgggtccttccaccatggccttggccacagtcttctggctggcttgcactccagcccgccccatgcagcgcctctcccacacgctgcggtgcccacccatatcccgcagagtctgccaggtaatcacccgacggtcagtgtgccacgcgcaccgtgtgcctttgccctctccacccctaggtgctttgccgctgccaagggtcttggtgtctttgccttgacgctgttgttgttttggtttgtcctttgaggctgtgctttgtcagtactcagggtgacacgcacttctactcttggggtttcctctggtccccacttggactgccgccaggtcagcctcagcctgtgtgatcacagggaaagttgcggggggcagggtggtgcgcttttgtgtgcggtggaggagttcctaaccctcggcttgtttttttctcttcagtttaaaaaaaaaa

SEQ ID NO: 324968 - DNA, 4688 bp, Homo sapiens
cgcgagcgccgcggtctccgcgcgccggagcgcagagactcccggctccttccccctcccttcggctcgtgacaacgaagcgcccgcggtctgaggcggcggcggcggcgacggtgcgaccggctgagcgcgagagggagccggcctcgcggctcgccccgcccccgggtcttggactccgcgcccctcccctctcggcgcttccgttacgcccgttggtccggcgcgggccccggggccattcccgagcccgaggcgctggtcggccccgtcgcagcgccagtgagctaccctgacggagctcggcgcggcctggaactcagcctccgccgggtctgggctcccgcgcccggcaactctgcttggccgcaggccgggaggccccggtgtccgcgcccgtccgctcccgccgcccgtgttctttggagcgctcctcccgacggccgctttcggaggcgccgtctgagcgcggggtcccgcgccgcaagttctcctggggcgaccggaggctgctcccccgaccccctggtgtccccggagtggctgcgcggacgtcgagttggcatttcttcgcttcctcctgggccggcgcgcggcgcggcacaccaggctcccctgggctcggggacccggccatgggccgaggcgcgggccgcccgcccgctgggagccacggcttagcagccgaccgctagctgcgccgccgcccggggaccggcatgaggaccgccgcggggggacgtctgcggcccgcgtcggcgctggggacaaagaagccatgcagtgacacccgctaagacttgttggtagccatgtcggagccccacagggtccagttcacctctctcccaggttccctgaatcctgcgtttttgaagaagtcccggaaggaggaggctggggcaggagaacagcatcaggactgtgagccggctgcagcagctgttcggattacactcaccctctttgaaccagatcacaaacgctgcccagagttcttctacccagagctggtgaagaatatccgagggaaggtaaaaggccttcagcctggagataagaagaaagatctgtcagatcctttcaatgacgaagaaaaggaaaggcataaagtagaggcccttgcccgaaaatttgaagaaaaatacggtggaaagaaacgtagaaaagaccgaatacaggacttgatcgatatggggtatggttatgatgaatccgactccttcatcgataactctgaggcgtatgatgagcttgttcctgcttctttgactacgaagtatggaggattttacattaactcgggaaccctgcagtttagacaagcatcagagtctgaagatgacttcattaaagaaaagaagaaaaaatctccaaagaagcggaagttgaaggaaggtggtgagaagataaagaagaagaaaaaaggatgacacttatgacaaggagaagaaatcgaaaaagtccaagttttccaaagccggcttcacagccctcaatgccagtaaggagaagaagaagaagaaatattctggggctttaagcgttaaagagatgctaaagaaatttcagaaagagaaagaggctcagaaaaaaagggaggaggagcataagcctgttgcggtcccatcagcggaagttcagggcctgcgggaactggagggtgcctctgaccccttgctctcactctttggctctacttctgacaacgacttgctccaggcggccactgccatggactcgctgacggatttggacttggagcatctgctcagtgagtctccagaaggaagtcccttccgagatatggatgatggaagtgattcccttggggtgggattggaccaggaattcaggcagccctcttctctccccgaaggcctgccagcacccctggagaagcgcgttaaggagctggctcaggctgccagagctgctgagggggagagcagacagaagttcttcacccaggatattaatggaatcctattagacatagaggcgcagactcgggagctgagcagtcaggtccgctctggggtgtatgcctatcttgcgtcattcctgccctgcagcaaggatgccctgctcaagcgtgctcggaaacttcacctctatgaacaggggggccgtctgaaggagcctctccagaagctcaaggaagccattggcagggcgatgccagagcagatggccaagtaccaggacgaatgccaggcacacacgcaggcaaaggttgccaagatgctggaagaggagaaagacaaggagcagagggaccggatttgttcggatgaggaagaagatgaagaaaaagggggcaggaggataatgggacctcggaagaagttccaatggaatgatgagatcagggagctactgtgccaggtggtgaagatcaaactggagagccaggacctggagaggaacaacaaagcccaggcttgggaggactgtgtgaagggctttctggatgcggaagtcaagcccctctggcccaaaggctggatgcaggccagaactctgtttaaggagagcagacgaggccatgggcacctgacttcaatcctggccaagaagaaagttatggccccttctaaaatcaaggtgaaggaatcgtctacgaagcctgataaaaaggtttctgtcccatcaggacagattggtggccccattgctttgccctcagatcaccaaacaggaggcctgagtattggggcctcgagcagggagctcccatcccaggcatcgggcggccttgctaaccctcctcctgtcaacctggaggactcattggatgaagacttgatccgcaatccagcctcctcggtggaagccgtgtccaaggaattggctgcattgaatagcagagcagctgggaactctgaattcacactgcctgcaccctcaaaagcacctgcagaaaaagttggaggcgttttatgtacagaagaaaaaaggaactttgcgaagcctagtccttctgctccaccaccagctagctctctgcagtcacccctcaattttctggcagaacaggctctggcactggggcagtcctctcaggagaaaaaaccagagagttctggctacaaagagctgtcctgccaggctcccctcaataagggcctgccagaagtacatcagtccaaagctaagcaccacagcttgccacggacgtctcacgggccccaagtggcagttcctgtgcctggcccccaggtcaaagtctttcatgccggcactcagcagcagaaaaacttcacgcccccatctccatttgccaataagctccaaggcccaaaggcttctcccacacagtgtcatcgttccctcctgcagttagtgaagacagcggccaaaggccagggcttccatccctctgcaccagccacctcaggaggcctgtcagcctccagcagcagctctcacaagaccccagcctcgtcctcttctgccctgagccatccagcaaagccacattcagtcagctctgcaggctcatcttacaagaataatccctttgccagctcaatctccaaacatggggtttcttctggcagctcttcctcgggaggaacaccagtccagagttctgtttctgggagcctggtccctggcatacagcctccctccgtgggacaggccaccagccgacccgtcccaagttcagcagggaaaaaaatgcctgtttcccagaagttgactctggtagcccctccaggcggtccaaacggagattccagtggtgggacccagggagtggcaaagttgctgacctcgccgtccctaaagccctctgcagttagtagtgtgacatcgtctacctccttgtcagtgagtatctgtcatagcagcctgccctgccccactcacaggggccttggggatgaggattgcttggccttgccccgggtggagagtgagatctaaaaccacaggtcaggtaggaacagtgggctcagacgtaggaagggagactgggctccctgttctcaggtattcacttttctggtgacaggaagcccaggatggcctaaagcttcttctgaggagggcagagggacctaaaggatggccagcaccaagcaccatgcctcttcggaggctgtctgtgtggcacagaatgagcaacagcccttgccttccgtgaccccttgcctctccatctctctaaagggggctggaaatgctgtcttctatcagttgagtcatgtggaggtgttcatggaccaggaatagcaggaccttctaagagtgattctgttggtttttgaaggacagagtccaataattaatgcatctcgcttgtgtgtaatcacagcaggttcgggaagagggagtgagcattttcttttctttttttcttttttttttttttgagacgaagtcttgctctttcaccaaggctggagtgcagtggcgctatctcggctcagcgcaagctccacctcccgggttcacgccattctcctgcctcagcttcttgagtagctgggactacaggcgtccgccaccacgcccagctaattttttgtgtttttagtagagatggagtttcaccatgttagccaggatagtctcgatctcctgacctcgtgatctgcccgcctcggcctcccaaagtgctgggattgcaggtgtgagccactgcacccggcctctttttctaatatataaatgaagtg

SEQ ID NO: 324969 - DNA, 345 bp, Homo sapiens
tttcatctgtaagtagttcactaggtagctctaaaagactctaaggactttttcttaaacataaccacaaataccatcatcacccaaaaaattagcaataattccctaatagcatcccatgtctagtcagtgtccagatttccttgattgtctcatggaagtgctgtttgtttgtttgtttgtttattttgccagttggctggtttgaatcaggatccacatactgcctacatatgcatttattgatttgtctatgtttcttttagtctgtaggttaccctttcttttactgcctttcagtttgctgttgttggtattgaagacatcagtccttttcaaaaaaaa

SEQ ID NO: 324970 - DNA, 9158 bp, Homo sapiens
  misc_feature (66)..(66): n is a, c, g, or t
aagttataatttagtatgagaagtatttaaaggtaaataaattgtaaaaaacatagagataataanatagatatttttttattcaagagagccagcccactgttggcatttatcagagtttatttaatcttctcatcaactactattgttaccctcagttgccaagtgaagggagcatgcgggaaggttaagtgacttgcccaagcccacacaaccggtaggagccccaattccaggccctagttccaaggctacattcttccaggcggcctccaactgggttggttaagggttgaaaggacagtgggacaataactgaggcccgtattgcccagagcgtccccatcccccgtccggagctggaagaggccatagaccgctgcctccacatcttttcctctccttcgggttcggtgactcacgacccttcttcctctctcccgggatatgacctcaaatttcaccccttatccagtagcgtctgggtccctggactaaagccgtcaaatgtaaccaattgctgaggagctctcccctaagaatcccgcctccactctgaggaacagcttcgctgatcaatggatcccctcctagacgcaatgagcgcgcggggcaagtggagaagcggctgaactgcccaatgaacaagcggtttccgtggttaggggcgtggcagaagcggtcgtcaggggcgtggcggcagttacttgggcggggccggtagcggcgggagctgcactggccagggttccggctgtatatccatgagcgccgctggcagccggggagctgcaggaaccagactgggggcgagctgagcacctgtagtcaatcacacgcagcttttaggtttgtttgaataagagatctgacctgaccggcccaactgtacaactcttcaaggaaaattcgtatttgcagtgggaagaataagtaacattgatcaagatgaatgccatgctggagactcccgaactcccagccgtgtttgatggagtgaagctggctgcagtggctgctgtgctgtacgtgatcgtccggtgtttgaacctgaagagccccacagccccacctgacctctacttccaggactcggggctctcacgctttctgctcaagtcctgtcctcttctgaccaaagaatacattccaccgttgatctgggggaaaagtggacacatccagacagccttgtatgggaagatgggaagggtgaggtcgccacatccttatgggcaccggaagttcatcactatgtctgatggagccacttctacattcgacctcttcgagcccttggctgagcactgtgttggagatgatatcaccatggtcatctgccctggaattgccaatcacagcgagaagcaatacatccgcactttcgttgactacgcccagaaaaatggctatcggtgcgccgtgctgaaccacctgggtgccctgcccaacattgaattgacctcgccacgcatgttcacctatggctgcacgtgggaatttggagccatggtgaactacatcaagaagacatatcccctgacccagctggtcgtcgtgggcttcagcctgggtggtaacattgtgtgcaaatacttgggggagactcaggcaaaccaagagaaggtcctgtgctgcgtcagcgtgtgccaggggtacagtgcactgagggcccaggaaaccttcatgcaatgggatcagtgccggcggttctacaacttcctcatggctgacaacatgaagaagatcatcctctcgcacaggcaagctctttttggagaccatgttaagaaaccccagagcctggaagacacggacttgagccggctctacacagcaacatccctgatgcagattgatgacaatgtgatgaggaagtttcacggctataactccctgaaggaatactatgaggaagaaagttgcatgcggtacctgcacaggatttatgttcctctcatgctggttaatgcagctgacgatccgttggtgcatgaaagtcttctaaccattccaaaatctctttcagagaaacgagagaacgtcatgtttgtgctgcctctgcatgggggccacttgggcttctttgagggctctgtgctgttccccgagcccctgacatggatggataagctggtggtggagtacgccaacgccatttgccaatgggagcgtaacaagttgcagtgctctgacacggagcaggtggaggccgacctggagtgaggcctccggactctggcacgctccagcagccctcctctggaagctgcgtcccctcaccccctgtttcaggtctcccatctccctcagtgacctggatctgacctcacaccatcagcagggggcacccaccatgcacacctgtctcggagtaggcagctcttcctgggagctccaggctatttttgtgcttagttactggttttctccattgcattgttaggcatggtgacaagtgacagagttcttgccctctgtccagtttcagcatctggttgcttttaagccaagtacatctagtttccctattaaaaatgtgtctgaatagcgattttgctttgccaccaaaaggcttttccctgagaacagtgaaggatgtatgtcattttgtggtggttgtatgtgtccttacatagaccttaaaaagagctcacccttccaggccaatgctgaagacacagctccgcttgggagcctgagaacccaggcttcccaggccagagtgtggcttcttaaacggcaaaggaaattcctttgagtcacaagccaagttttcgccctgtctcctgagaccatttccctacgctttgctgctgctgagagttacctgaggcacttgttaaaaattcagcctcccaggtccctcccctcggagaggctgattcactgggtctgggaaggagcctggggattttaatttttcacaagtgccccagatgattctcatcaccaagcaaattttggaaatgctgttcaacagcgcccttaaattggaaacatctttgcagctcgttttattgaaattcataatcaggggtgtcctctagctcccacggtctccagagcagcaaggccggctatggagctgccgtcgtgtgaccacagtgtgatgtctcagaagggctctgggtgggctgagcatctgggctgtgccctggctctgcttttcaccctggacaaagtcgctgtggacttcaatttcttcacctctaaaatgggggacttggaccaggtagattgctgagctcactaccaggttcaaagttcaatgacaaactcagtttactgaggtttgagagaacatccctccaggggagcctgggagctgctctcccagtctaagcatgtagatatcatcgtttgccttttgtgtgtgtgtgtcccttatttgataaaaagatgttttgagttgttttttttttaagcactcacttgtaattttagtttttaaacccaagtccctctaactttgcctttgataccaaacaattcaaaagttggatctgagtttggagaaagatatttccaacctaagtgggtattattttgaaaccagatttttaatttaatagcctatatttgtagtctgttggataggtgtttccaaagtgtgtcttctcaagtgaaaacgcaactctaggtttcaagtactccttttctccgatcctgtggtacttgaatatccaaaaaccctgcactttgaacaatcagctgttgctatctggaactaaacagaactatgagtaaaattgcctggatactttaaaaagatatttttcctccttcatctcctttgactccaggacagactggaatataagtagtgggtctgcatggatgtttcagggatcaaaggagccacctgggcgcctgagtgccaaccctcagggccacaggtgggtgtggtttgggcacgggtccaagtgactgtgacgggacccctgggcatggggccaggtctgtaacctgaagaagttgttttctgacaatcaccaaatcatccgaatgacatcaaaagcagcccttatctcagagaccgagatttctgtggtctcaacttcgctttggtataatttctggcactcaccagcctctatcattatgactttccccccagtgtattatttctctaataggtttccttttcacgttcttttagcacagactggcactttaccctctcaatttggaagttagcccctctcctctgttacttttcccttcacccaactacagctgtgatctagaacattcatagtcatatttctgctactactaccttcatttatcaagactttttatgagaataggtaaaccaagcaataacttcctaggactgaatcaccaccccagaagagcgagaggctcctttcatatgcctgaggccacaccccttaacctgttctgacaaaatagtggctggcccatgtaccagctccattcagaaattcaggaagagaaaagacagccctgttgtcacacaaaccggtgtgggggagggtggagcctggtctgcacggcagtcctggtggcccctgtggaggacaggcagggctggcagcatagcctttgttgccacacaaccggaatttgctcccccaggactgtgggagccagtgtcccagctgaaatctttttagtgtgtggctctgaatggcactcacattccattttggctcacatgaaactaactgaagccctttgttcaagcttcaggctcttaggcatggaaatgagaatgtgactgtggctgtcttacaggaaaattcttgtttgtccctgaatgagagcacagaggcattgaattcacagagctgcaaacttgcctgataaatgagggagtggcagtttatagataggtcatcttttttccttcctccaggtgtccttgcctttcttcccaaagtcattcatttctgatgagtatatgaatccccctcttgctagtaaggttctatttgggctaaaacaaggctgaatttttaaagagtatttgaatatattttagaatcaaattgaggctataaattgcatcaatctggacaattccattgcaggaataatatgttaaaaaccaatggggagaagcacccacatctctcctgtagcactccgtgtctcataagcaatttgaagacacttacaagtaactgattccagtcaaattaggattaactgactcaaaaaatggtgtcaagtttctttaatgtttttatgttagaagtgagtttaacagacttgaagaaaactgttatcttttcctgctgtgagtttacacaaatgattccagagcagaatgaaagcagaaagctgttggttacaatattcttttaacctctctgcagcattttacacttactgggaaccttatgattcaccgtaagagtggaaatatacctgagttcgtgtcctaatggtctctaattcacattggatcgtgggcaaatcacctcacctctctgagcctgttccctcctcttagaccatctctaagaccacttcatctatttacacatcatttgcttgaacattgctgaacatctgcgtgaacttggcctctccagcccttgcaggtggaaacagctgtgtcaaggctcaaggctcacgctgaggggacttggagggagggggcttctgcattaagctttcctggtgaagacccttgatcttgtccaaagccctgtgtctttgactggcttctcttcagagtccccgttgtcatcgtaagacccttgctgtttggagggtggtcttgtgactgtggcagctgctggccgctggaatgaggagcctatctccatcctccagtgtgactcaggcagagcattgagaattcccagggcagaaatccttcctgctcaggctttcattctaaaactacagtcttcattaaagctgaactttctgggtagctgagcttatatgcccggcatctgaatgagagctctctttgtaactgtgtgacttgagatctagtttgccagctcctgggaaacaatacatgtgttcttgtttgtgtttgctcagcaagcagatgtctgagatgtaagaagcttttcttttcctgtggcattgattctgacttagagctgaagtaaagatcactgaaacatcacgtcaagttgaagtcactcataggtctttgtcctttaggcaggacaggagagtcattaagaagcatttcactgtagcattctatcacaatatcatctggaattgttttctttgcccagaaagccttaacttgcctctagagaatccctggtattacaacgatattgcggcattagaattccaactcttctgctgtggaagtttgaagcgaagctgcagcaaaaccagagaatttcctcaagtggcctgtaggctccttgttatcttatgcccccacccctccctcaacaatatgagtgatccagaactggcccaaacacctcagctctggtccctttttgcccttcttggccttactctgttgttcaaagccactttggattgcttggatgcttcgaacagccatgaaaagtagcctgcctgtggcatttagaggccaagcaattgacagaaagggtttcttctacctctgttatctaagcagagggaagtaaacttctcaccgccccccacccctcactgcccccgattacactagaattgctttcgccaaattgtagttgaagctaaggaaggggaatctggcccctgctgggagagggaactggaatgccacacaaggcaaggcctgcttccttccttcccctctgctgctgctgcctcggaacgctgcagcccaggcttcctcccacagtggcccttggaagcaggccgcagagtagacagctgctccttttggaagagtcagtcccctgtgttttctgaactgtttttcctagcatgtatgtgggtagagctttcatgcatctctagtaataataagctgaaattagttttttttttaattctccaatttaaaacttttaattaaaaagtaaattttaatgtcgaaaatgcaaacttggggagggcagaaagatcacacacaaggctgtcacttcatacttgcaggattgcacagcagccgggcagaggcgctcctcacttcccagatggggcggcgggcagcagagacgcacctcacttcctagacagtgcggcagccaggcacaggcacacctcacttcccagacagttgggcggccaggcaagcgctcctcacttcccagatggggcggctcccgggaagcggggctcctcacttcccagacagggtggccaggcagaggtgctcctcacttcccagaacaattctttatgaatttgataaaggactgaagtgcaactgaaagctgctagtgatgatctggtaatatacaatttgtccagtagccagtttgtttttattgtgttttctaaccataagagatcattaaaggcaaagcctgtatgacgctgtacacacacaaaaaaatggtcaccgcaggccatactaccaatgaaatggtaggtaaacaaatcttctggtcaagagaaaaaaaaaagaaatagcactctgcatgctttgctctacaagatgaatttccctagaaagaatccaatgaaggccgggcatagtggctcactcctgtaatcccagcactttggaggccgaggcgggtagatcacctgaggttaggagttcaagaccagcctggccaacatggtgaaaccccttctctactaaaaatgcaaaaattagctgggtgtggtggcgggcgcctgtaatcccagctactcgggaggctgaggtgggagaattgcttgaacccaggagacggaggttgcagtgagccgagatcacgcctctgcactccagcctgggcaacaagagtgagactccgtctccaaaaaaagaaaaggaatccagtgaaaatggctgcaattacaacaagaagtgaaggaagaagactggtgacatctctgaaggatgcagttgaggttgatccaggtttatccgaatatgctacctttctgagccttaaaccttcatctctcaggtgttgattttcttctgatagcttcatcatttctccctgaagtcttttacactcttctgttagtttccttgtttcagtatcatgaagtgaagcactgtgtggttgtggcgtgggcccgtcttgcttagatgcattcagtgggacagctttgctgggttccatgtcattcaatttatcattttcattggggatctccatttggaatccattaattcatgaggttttgcctcattccacacagcttccatatctgaagtgtttagtggagcaaaaattgtaccataaacttgtgtttactcttttcattcggatcatagtcaaagggctgtagcattactgaaacagtcacagttgaccctgggtcaataattccactgttgggcctcacacagtaccggtgaggcacggtagtcttcactttgaaacacacttttctatccgatggatttcgcaatttaagatttgtagtgactacatctgtgaaggggcctttgaatttgaggtctatgggcgggtcgaggaccaggatctgctcgtgcttcgccgtggccccggaggcagacgccattggagagacagcgcagagcagggggcggcttgctcgctgggggcgggggacgatggcgagaggggagggggagcgagttcgcatctctccttttcctggttagactctgttcaaccacattcttatgttggcagatctgcttccagattgatttttagagcaccatcactttcacattcctgattctgattttgttttgttttgtttgggttttctgaaacttaaaatgctgccccgaaaatactatatttttgagtttgtgttctgaaagcctccgtgctgctggatctttggggggaaatacaggatccttcagcactgaggtgtttaagatttgcaactagcaatgcaattttttctaaatatggggatatttacctttattaagaaattatactaaacattgatgtccttgatcattttatgttctcatattacttttgattctactatgattgtgtggtggtgaacaaagatcattacaaacaaaaactgtaattttgttatatttgattcaatggaatttacctaaaaaataaagactaaaaatgtgg

SEQ ID NO: 324971 - DNA, 9142 bp, Homo sapiens
tgagaagctatttctgtccacactctgtgatgtctacaccttcagaatggggaatgggtttcaggggtctctgacagatagagctcatgcaatgatttctggtccggtgctgatcagccttcaaaggatgttatttggttacgctccataaaacttgagccagcccactgttccttgtcacaacccaagcccacacaaccggtaggagccccaattccaggccctagttccaaggctacattcttccaggcggcctccaactgggttggttaagggttgaaaggacagtgggacaataactgaggcccgtattgcccagagcgtccccatcccccgtccggagctggaagaggccatagaccgctgcctccacatcttttcctctccttcgggttcggtgactcacgacccttcttcctctctcccgggatatgacctcaaatttcaccccttatccagtagcgtctgggtccctggactaaagccgtcaaatgtaaccaattgctgaggagctctcccctaagaatcccgcctccactctgaggaacagcttcgctgatcaatggatcccctcctagacgcaatgagcgcgcggggcaagtggagaagcggctgaactgcccaatgaacaagcggtttccgtggttaggggcgtggcagaagcggtcgtcaggggcgtggcggcagttacttgggcggggccggtagcggcgggagctgcactggccagggttccggctgtatatccatgagcgccgctggcagccggggagctgcaggaaccagactgggggcgagctgagcacctgtagtcaatcacacgcagcttttaggtttgtttgaataagagatctgacctgaccggcccaactgtacaactcttcaaggaaaattcgtatttgcagtgggaagaataagtaacattgatcaagatgaatgccatgctggagactcccgaactcccagccgtgtttgatggagtgaagctggctgcagtggctgctgtgctgtacgtgatcgtccggtgtttgaacctgaagagccccacagccccacctgacctctacttccaggactcggggctctcacgctttctgctcaagtcctgtcctcttctgaccaaagaatacattccaccgttgatctgggggaaaagtggacacatccagacagccttgtatgggaagatgggaagggtgaggtcgccacatccttatgggcaccggaagttcatcactatgtctgatggagccacttctacattcgacctcttcgagcccttggctgagcactgtgttggagatgatatcaccatggtcatctgccctggaattgccaatcacagcgagaagcaatacatccgcactttcgttgactacgcccagaaaaatggctatcggtgcgccgtgctgaaccacctgggtgccctgcccaacattgaattgacctcgccacgcatgttcacctatggctgcacgtgggaatttggagccatggtgaactacatcaagaagacatatcccctgacccagctggtcgtcgtgggcttcagcctgggtggtaacattgtgtgcaaatacttgggggagactcaggcaaaccaagagaaggtcctgtgctgcgtcagcgtgtgccaggggtacagtgcactgagggcccaggaaaccttcatgcaatgggatcagtgccggcggttctacaacttcctcatggctgacaacatgaagaagatcatcctctcgcacaggcaagctctttttggagaccatgttaagaaaccccagagcctggaagacacggacttgagccggctctacacagcaacatccctgatgcagattgatgacaatgtgatgaggaagtttcacggctataactccctgaaggaatactatgaggaagaaagttgcatgcggtacctgcacaggatttatgttcctctcatgctggttaatgcagctgacgatccgttggtgcatgaaagtcttctaaccattccaaaatctctttcagagaaacgagagaacgtcatgtttgtgctgcctctgcatgggggccacttgggcttctttgagggctctgtgctgttccccgagcccctgacatggatggataagctggtggtggagtacgccaacgccatttgccaatgggagcgtaacaagttgcagtgctctgacacggagcaggtggaggccgacctggagtgaggcctccggactctggcacgctccagcagccctcctctggaagctgcgtcccctcaccccctgtttcaggtctcccatctccctcagtgacctggatctgacctcacaccatcagcagggggcacccaccatgcacacctgtctcggagtaggcagctcttcctgggagctccaggctatttttgtgcttagttactggttttctccattgcattgttaggcatggtgacaagtgacagagttcttgccctctgtccagtttcagcatctggttgcttttaagccaagtacatctagtttccctattaaaaatgtgtctgaatagcgattttgctttgccaccaaaaggcttttccctgagaacagtgaaggatgtatgtcattttgtggtggttgtatgtgtccttacatagaccttaaaaagagctcacccttccaggccaatgctgaagacacagctccgcttgggagcctgagaacccaggcttcccaggccagagtgtggcttcttaaacggcaaaggaaattcctttgagtcacaagccaagttttcgccctgtctcctgagaccatttccctacgctttgctgctgctgagagttacctgaggcacttgttaaaaattcagcctcccaggtccctcccctcggagaggctgattcactgggtctgggaaggagcctggggattttaatttttcacaagtgccccagatgattctcatcaccaagcaaattttggaaatgctgttcaacagcgcccttaaattggaaacatctttgcagctcgttttattgaaattcataatcaggggtgtcctctagctcccacggtctccagagcagcaaggccggctatggagctgccgtcgtgtgaccacagtgtgatgtctcagaagggctctgggtgggctgagcatctgggctgtgccctggctctgcttttcaccctggacaaagtcgctgtggacttcaatttcttcacctctaaaatgggggacttggaccaggtagattgctgagctcactaccaggttcaaagttcaatgacaaactcagtttactgaggtttgagagaacatccctccaggggagcctgggagctgctctcccagtctaagcatgtagatatcatcgtttgccttttgtgtgtgtgtgtcccttatttgataaaaagatgttttgagttgttttttttttaagcactcacttgtaattttagtttttaaacccaagtccctctaactttgcctttgataccaaacaattcaaaagttggatctgagtttggagaaagatatttccaacctaagtgggtattattttgaaaccagatttttaatttaatagcctatatttgtagtctgttggataggtgtttccaaagtgtgtcttctcaagtgaaaacgcaactctaggtttcaagtactccttttctccgatcctgtggtacttgaatatccaaaaaccctgcactttgaacaatcagctgttgctatctggaactaaacagaactatgagtaaaattgcctggatactttaaaaagatatttttcctccttcatctcctttgactccaggacagactggaatataagtagtgggtctgcatggatgtttcagggatcaaaggagccacctgggcgcctgagtgccaaccctcagggccacaggtgggtgtggtttgggcacgggtccaagtgactgtgacgggacccctgggcatggggccaggtctgtaacctgaagaagttgttttctgacaatcaccaaatcatccgaatgacatcaaaagcagcccttatctcagagaccgagatttctgtggtctcaacttcgctttggtataatttctggcactcaccagcctctatcattatgactttccccccagtgtattatttctctaataggtttccttttcacgttcttttagcacagactggcactttaccctctcaatttggaagttagcccctctcctctgttacttttcccttcacccaactacagctgtgatctagaacattcatagtcatatttctgctactactaccttcatttatcaagactttttatgagaataggtaaaccaagcaataacttcctaggactgaatcaccaccccagaagagcgagaggctcctttcatatgcctgaggccacaccccttaacctgttctgacaaaatagtggctggcccatgtaccagctccattcagaaattcaggaagagaaaagacagccctgttgtcacacaaaccggtgtgggggagggtggagcctggtctgcacggcagtcctggtggcccctgtggaggacaggcagggctggcagcatagcctttgttgccacacaaccggaatttgctcccccaggactgtgggagccagtgtcccagctgaaatctttttagtgtgtggctctgaatggcactcacattccattttggctcacatgaaactaactgaagccctttgttcaagcttcaggctcttaggcatggaaatgagaatgtgactgtggctgtcttacaggaaaattcttgtttgtccctgaatgagagcacagaggcattgaattcacagagctgcaaacttgcctgataaatgagggagtggcagtttatagataggtcatcttttttccttcctccaggtgtccttgcctttcttcccaaagtcattcatttctgatgagtatatgaatccccctcttgctagtaaggttctatttgggctaaaacaaggctgaatttttaaagagtatttgaatatattttagaatcaaattgaggctataaattgcatcaatctggacaattccattgcaggaataatatgttaaaaaccaatggggagaagcacccacatctctcctgtagcactccgtgtctcataagcaatttgaagacacttacaagtaactgattccagtcaaattaggattaactgactcaaaaaatggtgtcaagtttctttaatgtttttatgttagaagtgagtttaacagacttgaagaaaactgttatcttttcctgctgtgagtttacacaaatgattccagagcagaatgaaagcagaaagctgttggttacaatattcttttaacctctctgcagcattttacacttactgggaaccttatgattcaccgtaagagtggaaatatacctgagttcgtgtcctaatggtctctaattcacattggatcgtgggcaaatcacctcacctctctgagcctgttccctcctcttagaccatctctaagaccacttcatctatttacacatcatttgcttgaacattgctgaacatctgcgtgaacttggcctctccagcccttgcaggtggaaacagctgtgtcaaggctcaaggctcacgctgaggggacttggagggagggggcttctgcattaagctttcctggtgaagacccttgatcttgtccaaagccctgtgtctttgactggcttctcttcagagtccccgttgtcatcgtaagacccttgctgtttggagggtggtcttgtgactgtggcagctgctggccgctggaatgaggagcctatctccatcctccagtgtgactcaggcagagcattgagaattcccagggcagaaatccttcctgctcaggctttcattctaaaactacagtcttcattaaagctgaactttctgggtagctgagcttatatgcccggcatctgaatgagagctctctttgtaactgtgtgacttgagatctagtttgccagctcctgggaaacaatacatgtgttcttgtttgtgtttgctcagcaagcagatgtctgagatgtaagaagcttttcttttcctgtggcattgattctgacttagagctgaagtaaagatcactgaaacatcacgtcaagttgaagtcactcataggtctttgtcctttaggcaggacaggagagtcattaagaagcatttcactgtagcattctatcacaatatcatctggaattgttttctttgcccagaaagccttaacttgcctctagagaatccctggtattacaacgatattgcggcattagaattccaactcttctgctgtggaagtttgaagcgaagctgcagcaaaaccagagaatttcctcaagtggcctgtaggctccttgttatcttatgcccccacccctccctcaacaatatgagtgatccagaactggcccaaacacctcagctctggtccctttttgcccttcttggccttactctgttgttcaaagccactttggattgcttggatgcttcgaacagccatgaaaagtagcctgcctgtggcatttagaggccaagcaattgacagaaagggtttcttctacctctgttatctaagcagagggaagtaaacttctcaccgccccccacccctcactgcccccgattacactagaattgctttcgccaaattgtagttgaagctaaggaaggggaatctggcccctgctgggagagggaactggaatgccacacaaggcaaggcctgcttccttccttcccctctgctgctgctgcctcggaacgctgcagcccaggcttcctcccacagtggcccttggaagcaggccgcagagtagacagctgctccttttggaagagtcagtcccctgtgttttctgaactgtttttcctagcatgtatgtgggtagagctttcatgcatctctagtaataataagctgaaattagttttttttttaattctccaatttaaaacttttaattaaaaagtaaattttaatgtcgaaaatgcaaacttggggagggcagaaagatcacacacaaggctgtcacttcatacttgcaggattgcacagcagccgggcagaggcgctcctcacttcccagatggggcggcgggcagcagagacgcacctcacttcctagacagtgcggcagccaggcacaggcacacctcacttcccagacagttgggcggccaggcaagcgctcctcacttcccagatggggcggctcccgggaagcggggctcctcacttcccagacagggtggccaggcagaggtgctcctcacttcccagaacaattctttatgaatttgataaaggactgaagtgcaactgaaagctgctagtgatgatctggtaatatacaatttgtccagtagccagtttgtttttattgtgttttctaaccataagagatcattaaaggcaaagcctgtatgacgctgtacacacacaaaaaaatggtcaccgcaggccatactaccaatgaaatggtaggtaaacaaatcttctggtcaagagaaaaaaaaaagaaatagcactctgcatgctttgctctacaagatgaatttccctagaaagaatccaatgaaggccgggcatagtggctcactcctgtaatcccagcactttggaggccgaggcgggtagatcacctgaggttaggagttcaagaccagcctggccaacatggtgaaaccccttctctactaaaaatgcaaaaattagctgggtgtggtggcgggcgcctgtaatcccagctactcgggaggctgaggtgggagaattgcttgaacccaggagacggaggttgcagtgagccgagatcacgcctctgcactccagcctgggcaacaagagtgagactccgtctccaaaaaaagaaaaggaatccagtgaaaatggctgcaattacaacaagaagtgaaggaagaagactggtgacatctctgaaggatgcagttgaggttgatccaggtttatccgaatatgctacctttctgagccttaaaccttcatctctcaggtgttgattttcttctgatagcttcatcatttctccctgaagtcttttacactcttctgttagtttccttgtttcagtatcatgaagtgaagcactgtgtggttgtggcgtgggcccgtcttgcttagatgcattcagtgggacagctttgctgggttccatgtcattcaatttatcattttcattggggatctccatttggaatccattaattcatgaggttttgcctcattccacacagcttccatatctgaagtgtttagtggagcaaaaattgtaccataaacttgtgtttactcttttcattcggatcatagtcaaagggctgtagcattactgaaacagtcacagttgaccctgggtcaataattccactgttgggcctcacacagtaccggtgaggcacggtagtcttcactttgaaacacacttttctatccgatggatttcgcaatttaagatttgtagtgactacatctgtgaaggggcctttgaatttgaggtctatgggcgggtcgaggaccaggatctgctcgtgcttcgccgtggccccggaggcagacgccattggagagacagcgcagagcagggggcggcttgctcgctgggggcgggggacgatggcgagaggggagggggagcgagttcgcatctctccttttcctggttagactctgttcaaccacattcttatgttggcagatctgcttccagattgatttttagagcaccatcactttcacattcctgattctgattttgttttgttttgtttgggttttctgaaacttaaaatgctgccccgaaaatactatatttttgagtttgtgttctgaaagcctccgtgctgctggatctttggggggaaatacaggatccttcagcactgaggtgtttaagatttgcaactagcaatgcaattttttctaaatatggggatatttacctttattaagaaattatactaaacattgatgtccttgatcattttatgttctcatattacttttgattctactatgattgtgtggtggtgaacaaagatcattacaaacaaaaactgtaattttgttatatttgattcaatggaatttacctaaaaaataaagactaaaaatgtgg

SEQ ID NO: 324972 - DNA, 8446 bp, Homo sapiens
aaagtcaggctggtacggtctggagagttaggagggttccggctgtatatccatgagcgccgctggcagccggggagctgcaggaaccagactgggggcgagctgagcacctgtagtcaatcacacgcagcttttaggtttgtttgaataagagatctgacctgaccggcccaactgtacaactcttcaaggaaaattcgtatttgcagtgggaagaataagtaacattgatcaagatgaatgccatgctggagactcccgaactcccagccgtgtttgatggagtgaagctggctgcagtggctgctgtgctgtacgtgatcgtccggtgtttgaacctgaagagccccacagccccacctgacctctacttccaggactcggggctctcacgctttctgctcaagtcctgtcctcttctgaccaaagaatacattccaccgttgatctgggggaaaagtggacacatccagacagccttgtatgggaagatgggaagggtgaggtcgccacatccttatgggcaccggaagttcatcactatgtctgatggagccacttctacattcgacctcttcgagcccttggctgagcactgtgttggagatgatatcaccatggtcatctgccctggaattgccaatcacagcgagaagcaatacatccgcactttcgttgactacgcccagaaaaatggctatcggtgcgccgtgctgaaccacctgggtgccctgcccaacattgaattgacctcgccacgcatgttcacctatggctgcacgtgggaatttggagccatggtgaactacatcaagaagacatatcccctgacccagctggtcgtcgtgggcttcagcctgggtggtaacattgtgtgcaaatacttgggggagactcaggcaaaccaagagaaggtcctgtgctgcgtcagcgtgtgccaggggtacagtgcactgagggcccaggaaaccttcatgcaatgggatcagtgccggcggttctacaacttcctcatggctgacaacatgaagaagatcatcctctcgcacaggcaagctctttttggagaccatgttaagaaaccccagagcctggaagacacggacttgagccggctctacacagcaacatccctgatgcagattgatgacaatgtgatgaggaagtttcacggctataactccctgaaggaatactatgaggaagaaagttgcatgcggtacctgcacaggatttatgttcctctcatgctggttaatgcagctgacgatccgttggtgcatgaaagtcttctaaccattccaaaatctctttcagagaaacgagagaacgtcatgtttgtgctgcctctgcatgggggccacttgggcttctttgagggctctgtgctgttccccgagcccctgacatggatggataagctggtggtggagtacgccaacgccatttgccaatgggagcgtaacaagttgcagtgctctgacacggagcaggtggaggccgacctggagtgaggcctccggactctggcacgctccagcagccctcctctggaagctgcgtcccctcaccccctgtttcaggtctcccatctccctcagtgacctggatctgacctcacaccatcagcagggggcacccaccatgcacacctgtctcggagtaggcagctcttcctgggagctccaggctatttttgtgcttagttactggttttctccattgcattgttaggcatggtgacaagtgacagagttcttgccctctgtccagtttcagcatctggttgcttttaagccaagtacatctagtttccctattaaaaatgtgtctgaatagcgattttgctttgccaccaaaaggcttttccctgagaacagtgaaggatgtatgtcattttgtggtggttgtatgtgtccttacatagaccttaaaaagagctcacccttccaggccaatgctgaagacacagctccgcttgggagcctgagaacccaggcttcccaggccagagtgtggcttcttaaacggcaaaggaaattcctttgagtcacaagccaagttttcgccctgtctcctgagaccatttccctacgctttgctgctgctgagagttacctgaggcacttgttaaaaattcagcctcccaggtccctcccctcggagaggctgattcactgggtctgggaaggagcctggggattttaatttttcacaagtgccccagatgattctcatcaccaagcaaattttggaaatgctgttcaacagcgcccttaaattggaaacatctttgcagctcgttttattgaaattcataatcaggggtgtcctctagctcccacggtctccagagcagcaaggccggctatggagctgccgtcgtgtgaccacagtgtgatgtctcagaagggctctgggtgggctgagcatctgggctgtgccctggctctgcttttcaccctggacaaagtcgctgtggacttcaatttcttcacctctaaaatgggggacttggaccaggtagattgctgagctcactaccaggttcaaagttcaatgacaaactcagtttactgaggtttgagagaacatccctccaggggagcctgggagctgctctcccagtctaagcatgtagatatcatcgtttgccttttgtgtgtgtgtgtcccttatttgataaaaagatgttttgagttgttttttttttaagcactcacttgtaattttagtttttaaacccaagtccctctaactttgcctttgataccaaacaattcaaaagttggatctgagtttggagaaagatatttccaacctaagtgggtattattttgaaaccagatttttaatttaatagcctatatttgtagtctgttggataggtgtttccaaagtgtgtcttctcaagtgaaaacgcaactctaggtttcaagtactccttttctccgatcctgtggtacttgaatatccaaaaaccctgcactttgaacaatcagctgttgctatctggaactaaacagaactatgagtaaaattgcctggatactttaaaaagatatttttcctccttcatctcctttgactccaggacagactggaatataagtagtgggtctgcatggatgtttcagggatcaaaggagccacctgggcgcctgagtgccaaccctcagggccacaggtgggtgtggtttgggcacgggtccaagtgactgtgacgggacccctgggcatggggccaggtctgtaacctgaagaagttgttttctgacaatcaccaaatcatccgaatgacatcaaaagcagcccttatctcagagaccgagatttctgtggtctcaacttcgctttggtataatttctggcactcaccagcctctatcattatgactttccccccagtgtattatttctctaataggtttccttttcacgttcttttagcacagactggcactttaccctctcaatttggaagttagcccctctcctctgttacttttcccttcacccaactacagctgtgatctagaacattcatagtcatatttctgctactactaccttcatttatcaagactttttatgagaataggtaaaccaagcaataacttcctaggactgaatcaccaccccagaagagcgagaggctcctttcatatgcctgaggccacaccccttaacctgttctgacaaaatagtggctggcccatgtaccagctccattcagaaattcaggaagagaaaagacagccctgttgtcacacaaaccggtgtgggggagggtggagcctggtctgcacggcagtcctggtggcccctgtggaggacaggcagggctggcagcatagcctttgttgccacacaaccggaatttgctcccccaggactgtgggagccagtgtcccagctgaaatctttttagtgtgtggctctgaatggcactcacattccattttggctcacatgaaactaactgaagccctttgttcaagcttcaggctcttaggcatggaaatgagaatgtgactgtggctgtcttacaggaaaattcttgtttgtccctgaatgagagcacagaggcattgaattcacagagctgcaaacttgcctgataaatgagggagtggcagtttatagataggtcatcttttttccttcctccaggtgtccttgcctttcttcccaaagtcattcatttctgatgagtatatgaatccccctcttgctagtaaggttctatttgggctaaaacaaggctgaatttttaaagagtatttgaatatattttagaatcaaattgaggctataaattgcatcaatctggacaattccattgcaggaataatatgttaaaaaccaatggggagaagcacccacatctctcctgtagcactccgtgtctcataagcaatttgaagacacttacaagtaactgattccagtcaaattaggattaactgactcaaaaaatggtgtcaagtttctttaatgtttttatgttagaagtgagtttaacagacttgaagaaaactgttatcttttcctgctgtgagtttacacaaatgattccagagcagaatgaaagcagaaagctgttggttacaatattcttttaacctctctgcagcattttacacttactgggaaccttatgattcaccgtaagagtggaaatatacctgagttcgtgtcctaatggtctctaattcacattggatcgtgggcaaatcacctcacctctctgagcctgttccctcctcttagaccatctctaagaccacttcatctatttacacatcatttgcttgaacattgctgaacatctgcgtgaacttggcctctccagcccttgcaggtggaaacagctgtgtcaaggctcaaggctcacgctgaggggacttggagggagggggcttctgcattaagctttcctggtgaagacccttgatcttgtccaaagccctgtgtctttgactggcttctcttcagagtccccgttgtcatcgtaagacccttgctgtttggagggtggtcttgtgactgtggcagctgctggccgctggaatgaggagcctatctccatcctccagtgtgactcaggcagagcattgagaattcccagggcagaaatccttcctgctcaggctttcattctaaaactacagtcttcattaaagctgaactttctgggtagctgagcttatatgcccggcatctgaatgagagctctctttgtaactgtgtgacttgagatctagtttgccagctcctgggaaacaatacatgtgttcttgtttgtgtttgctcagcaagcagatgtctgagatgtaagaagcttttcttttcctgtggcattgattctgacttagagctgaagtaaagatcactgaaacatcacgtcaagttgaagtcactcataggtctttgtcctttaggcaggacaggagagtcattaagaagcatttcactgtagcattctatcacaatatcatctggaattgttttctttgcccagaaagccttaacttgcctctagagaatccctggtattacaacgatattgcggcattagaattccaactcttctgctgtggaagtttgaagcgaagctgcagcaaaaccagagaatttcctcaagtggcctgtaggctccttgttatcttatgcccccacccctccctcaacaatatgagtgatccagaactggcccaaacacctcagctctggtccctttttgcccttcttggccttactctgttgttcaaagccactttggattgcttggatgcttcgaacagccatgaaaagtagcctgcctgtggcatttagaggccaagcaattgacagaaagggtttcttctacctctgttatctaagcagagggaagtaaacttctcaccgccccccacccctcactgcccccgattacactagaattgctttcgccaaattgtagttgaagctaaggaaggggaatctggcccctgctgggagagggaactggaatgccacacaaggcaaggcctgcttccttccttcccctctgctgctgctgcctcggaacgctgcagcccaggcttcctcccacagtggcccttggaagcaggccgcagagtagacagctgctccttttggaagagtcagtcccctgtgttttctgaactgtttttcctagcatgtatgtgggtagagctttcatgcatctctagtaataataagctgaaattagttttttttttaattctccaatttaaaacttttaattaaaaagtaaattttaatgtcgaaaatgcaaacttggggagggcagaaagatcacacacaaggctgtcacttcatacttgcaggattgcacagcagccgggcagaggcgctcctcacttcccagatggggcggcgggcagcagagacgcacctcacttcctagacagtgcggcagccaggcacaggcacacctcacttcccagacagttgggcggccaggcaagcgctcctcacttcccagatggggcggctcccgggaagcggggctcctcacttcccagacagggtggccaggcagaggtgctcctcacttcccagaacaattctttatgaatttgataaaggactgaagtgcaactgaaagctgctagtgatgatctggtaatatacaatttgtccagtagccagtttgtttttattgtgttttctaaccataagagatcattaaaggcaaagcctgtatgacgctgtacacacacaaaaaaatggtcaccgcaggccatactaccaatgaaatggtaggtaaacaaatcttctggtcaagagaaaaaaaaaagaaatagcactctgcatgctttgctctacaagatgaatttccctagaaagaatccaatgaaggccgggcatagtggctcactcctgtaatcccagcactttggaggccgaggcgggtagatcacctgaggttaggagttcaagaccagcctggccaacatggtgaaaccccttctctactaaaaatgcaaaaattagctgggtgtggtggcgggcgcctgtaatcccagctactcgggaggctgaggtgggagaattgcttgaacccaggagacggaggttgcagtgagccgagatcacgcctctgcactccagcctgggcaacaagagtgagactccgtctccaaaaaaagaaaaggaatccagtgaaaatggctgcaattacaacaagaagtgaaggaagaagactggtgacatctctgaaggatgcagttgaggttgatccaggtttatccgaatatgctacctttctgagccttaaaccttcatctctcaggtgttgattttcttctgatagcttcatcatttctccctgaagtcttttacactcttctgttagtttccttgtttcagtatcatgaagtgaagcactgtgtggttgtggcgtgggcccgtcttgcttagatgcattcagtgggacagctttgctgggttccatgtcattcaatttatcattttcattggggatctccatttggaatccattaattcatgaggttttgcctcattccacacagcttccatatctgaagtgtttagtggagcaaaaattgtaccataaacttgtgtttactcttttcattcggatcatagtcaaagggctgtagcattactgaaacagtcacagttgaccctgggtcaataattccactgttgggcctcacacagtaccggtgaggcacggtagtcttcactttgaaacacacttttctatccgatggatttcgcaatttaagatttgtagtgactacatctgtgaaggggcctttgaatttgaggtctatgggcgggtcgaggaccaggatctgctcgtgcttcgccgtggccccggaggcagacgccattggagagacagcgcagagcagggggcggcttgctcgctgggggcgggggacgatggcgagaggggagggggagcgagttcgcatctctccttttcctggttagactctgttcaaccacattcttatgttggcagatctgcttccagattgatttttagagcaccatcactttcacattcctgattctgattttgttttgttttgtttgggttttctgaaacttaaaatgctgccccgaaaatactatatttttgagtttgtgttctgaaagcctccgtgctgctggatctttggggggaaatacaggatccttcagcactgaggtgtttaagatttgcaactagcaatgcaattttttctaaatatggggatatttacctttattaagaaattatactaaacattgatgtccttgatcattttatgttctcatattacttttgattctactatgattgtgtggtggtgaacaaagatcattacaaacaaaaactgtaattttgttatatttgattcaatggaatttacctaaaaaataaagactaaaaatgtgg

SEQ ID NO: 324973 - DNA, 9105 bp, Homo sapiens
  misc_feature (66)..(66): n is a, c, g, or t
aagttataatttagtatgagaagtatttaaaggtaaataaattgtaaaaaacatagagataataanatagatatttttttattcaagagagccagcccactgttggcatttatcagagtttatttaatcttctcatcaactactattgttaccctcagttgccaagtgaagggagcatgcgggaaggttaagtgacttgcccaagcccacacaaccggtaggagccccaattccaggccctagttccaaggctacattcttccaggcggcctccaactgggttggttaagggttgaaaggacagtgggacaataactgaggcccgtattgcccagagcgtccccatcccccgtccggagctggaagaggccatagaccgctgcctccacatcttttcctctccttcgggttcggtgactcacgacccttcttcctctctcccgggatatgacctcaaatttcaccccttatccagtagcgtctgggtccctggactaaagccgtcaaatgtaaccaattgctgaggagctctcccctaagaatcccgcctccactctgaggaacagcttcgctgatcaatggatcccctcctagacgcaatgagcgcgcggggcaagtggagaagcggctgaactgcccaatgaacaagcggtttccgtggttaggggcgtggcagaagcggtcgtcaggggcgtggcggcagttacttgggcggggccggtagcggcgggagctgcactggccagggttccggctgtatatccatgagcgccgctggcagccggggagctgcaggaaccagactgggggcgagctgagcacctgtagtcaatcacacgcagcttttaggtttgtttgaataagagatctgacctgaccggcccaactgtacaactcttcaaggaaaattcgtatttgcagtgggaagaataagtaacattgatcaagatgaatgccatgctggagactcccgaactcccagccgtgtttgatggagtgaagctggctgcagtggctgctgtgctgtacgtgatcgtccggtgtttgaacctgaagagccccacagccccacctgacctctacttccaggactcggggctctcacgctttctgctcaagtcctgtcctcttctgaccaaagaatacattccaccgttgatctgggggaaaagtggacacatccagacagccttgtatgggaagatgggaagggtgaggtcgccacatccttatgggcaccggaagttcatcactatgtctgatggagccacttctacattcgacctcttcgagcccttggctgagcactgtgttggagatgatatcaccatggtcatctgccctggaattgccaatcacagcgagaagcaatacatccgcactttcgttgactacgcccagaaaaatggctatcggtgcgccgtgctgaaccacctgggtgccctgcccaacattgaattgacctcgccacgcatgttcacctatggctgcacgtgggaatttggagccatggtgaactacatcaagaagacatatcccctgacccagctggtcgtcgtgggcttcagcctgggtggtaacattgtgtgcaaatacttgggggagactcaggcaaaccaagagaaggtcctgtgctgcgtcagcgtgtgccaggggtacagtgcactgagggcccaggaaaccttcatgcaatgggatcagtgccggcggttctacaacttcctcatggctgacaacatgaagaagatcatcctctcgcacaggcaagctctttttggagaccatgttaagaaaccccagagcctggaagacacggacttgagccggctctacacagcaacatccctgatgcagattgatgacaatgtgatgaggaagtttcacggctataactccctgaaggaatactatgaggaagaaagttgcatgcggtacctgcacaggatttatgttcctctcatgctggttaatgcagctgacgatccgttggtgcatgaaagtcttctaaccattccaaaatctctttcagagaaacgagagaacgtcatgtttgtgctgcctctgcatgggggccacttgggcttctttgagggctctgtgctgttccccgagcccctgacatggatggataagctggtggtggagtacgccaacgccatttgccaatgggagcgtaacaagttgcagtgctctgacacggagcaggtggaggccgacctggagtgaggcctccggactctggcacgctccagcagccctcctctggaagctgcgtcccctcaccccctgtttcaggtctcccatctccctcagtgacctggatctgacctcacaccatcagcagggggcacccaccatgcacacctgtctcggagtaggcagctcttcctgggagctccaggctatttttgtgcttagttactggttttctccattgcattgttaggcatggtgacaagtgacagagttcttgccctctgtccagtttcagcatctggttgcttttaagccaagtacatctagtttccctattaaaaatgtgtctgaatagcgattttgctttgccaccaaaaggcttttccctgagaacagtgaaggatgtatgtcattttgtggtggttgtatgtgtccttacatagaccttaaaaagagctcacccttccaggccaatgctgaagacacagctccgcttgggagcctgagaacccaggcttcccaggccagagtgtggcttcttaaacggcaaaggaaattcctttgagtcacaagccaagttttcgccctgtctcctgagaccatttccctacgctttgctgctgctgagagttacctgaggcacttgttaaaaattcagcctcccaggtccctcccctcggagaggctgattcactgggtctgggaaggagcctggggattttaatttttcacaagtgccccagatgattctcatcaccaagcaaattttggaaatgctgttcaacagcgcccttaaattggaaacatctttgcagctcgttttattgaaattcataatcaggggtgtcctctagctcccacggtctccagagcagcaaggccggctatggagctgccgtcgtgtgaccacagtgtgatgtctcagaagggctctgggtgggctgagcatctgggctgtgccctggctctgcttttcaccctggacaaagtcgctgtggacttcaatttcttcacctctaaaatgggggacttggaccaggtagattgctgagctcactaccaggttcaaagttcaatgacaaactcagtttactgaggtttgagagaacatccctccaggggagcctgggagctgctctcccagtctaagcatgtagatatcatcgtttgccttttgtgtgtgtgtgtcccttatttgataaaaagatgttttgagttgttttttttttaagcactcacttgtaattttagtttttaaacccaagtccctctaactttgcctttgataccaaacaattcaaaagttggatctgagtttggagaaagatatttccaacctaagtgggtattattttgaaaccagatttttaatttaatagcctatatttgtagtctgttggataggtgtttccaaagtgtgtcttctcaagtgaaaacgcaactctaggtttcaagtactccttttctccgatcctgtggtacttgaatatccaaaaaccctgcactttgaacaatcagctgttgctatctggaactaaacagaactatgagtaaaattgcctggatactttaaaaagatatttttcctccttcatctcctttgactccaggacagactggaatataagtagtgggtctgcatggatgtttcagggatcaaaggagccacctgggcgcctgagtgccaaccctcagggccacaggtgggtgtggtttgggcacgggtccaagtgactgtgacgggacccctgggcatggggccaggtctgtaacctgaagaagttgttttctgacaatcaccaaatcatccgaatgacatcaaaagcagcccttatctcagagaccgagatttctgtggtctcaacttcgctttggtataatttctggcactcaccagcctctatcattatgactttccccccagtgtattatttctctaataggtttccttttcacgttcttttagcacagactggcactttaccctctcaatttggaagttagcccctctcctctgttacttttcccttcacccaactacagctgtgatctagaacattcatagtcatatttctgctactactaccttcatttatcaagactttttatgagaataggtaaaccaagcaataacttcctaggactgaatcaccaccccagaagagcgagaggctcctttcatatgcctgaggccacaccccttaacctgttctgacaaaatagtggctggcccatgtaccagctccattcagaaattcaggaagagaaaagacagccctgttgtcacacaaaccggtgtgggggagggtggagcctggtctgcacggcagtcctggtggcccctgtggaggacaggcagggctggcagcatagcctttgttgccacacaaccggaatttgctcccccaggactgtgggagccagtgtcccagctgaaatctttttagtgtgtggctctgaatggcactcacattccattttggctcacatgaaactaactgaagccctttgttcaagcttcaggctcttaggcatggaaatgagaatgtgactgtggctgtcttacaggaaaattcttgtttgtccctgaatgagagcacagaggcattgaattcacagagctgcaaacttgcctgataaatgagggagtggcagtttatagataggtcatcttttttccttcctccaggtgtccttgcctttcttcccaaagtcattcatttctgatgagtatatgaatccccctcttgctagtaaggttctatttgggctaaaacaaggctgaatttttaaagagtatttgaatatattttagaatcaaattgaggctataaattgcatcaatctggacaattccattgcaggaataatatgttaaaaaccaatggggagaagcacccacatctctcctgtagcactccgtgtctcataagcaatttgaagacacttacaagtaactgattccagtcaaattaggattaactgactcaaaaaatggtgtcaagtttctttaatgtttttatgttagaagtgagtttaacagacttgaagaaaactgttatcttttcctgctgtgagtttacacaaatgattccagagcagaatgaaagcagaaagctgttggttacaatattcttttaacctctctgcagcattttacacttactgggaaccttatgattcaccgtaagagtggaaatatacctgagttcgtgtcctaatggtctctaattcacattggatcgtgggcaaatcacctcacctctctgagcctgttccctcctcttagaccatctctaagaccacttcatctatttacacatcatttgcttgaacattgctgaacatctgcgtgaacttggcctctccagcccttgcaggtggaaacagctgtgtcaaggctcaaggctcacgctgaggggacttggagggagggggcttctgcattaagctttcctggtgaagacccttgatcttgtccaaagccctgtgtctttgactggcttctcttcagagtccccgttgtcatcgtaagacccttgctgtttggagggtggtcttgtgactgtggcagctgctggccgctggaatgaggagcctatctccatcctccagtgtgactcaggcagagcattgagaattcccagggcagaaatccttcctgctcaggctttcattctaaaactacagtcttcattaaagctgaactttctgggtagctgagcttatatgcccggcatctgaatgagagctctctttgtaactgtgtgacttgagatctagtttgccagctcctgggaaacaatacatgtgttcttgtttgtgtttgctcagcaagcagatgtctgagatgtaagaagcttttcttttcctgtggcattgattctgacttagagctgaagtaaagatcactgaaacatcacgtcaagttgaagtcactcataggtctttgtcctttaggcaggacaggagagtcattaagaagcatttcactgtagcattctatcacaatatcatctggaattgttttctttgcccagaaagccttaacttgcctctagagaatccctggtattacaacgatattgcggcattagaattccaactcttctgctgtggaagtttgaagcgaagctgcagcaaaaccagagaatttcctcaagtggcctgtaggctccttgttatcttatgcccccacccctccctcaacaatatgagtgatccagaactggcccaaacacctcagctctggtccctttttgcccttcttggccttactctgttgttcaaagccactttggattgcttggatgcttcgaacagccatgaaaagtagcctgcctgtggcatttagaggccaagcaattgacagaaagggtttcttctacctctgttatctaagcagagggaagtaaacttctcaccgccccccacccctcactgcccccgattacactagaattgctttcgccaaattgtagttgaagctaaggaaggggaatctggcccctgctgggagagggaactggaatgccacacaaggcaaggcctgcttccttccttcccctctgctgctgctgcctcggaacgctgcagcccaggcttcctcccacagtggcccttggaagcaggccgcagagtagacagctgctccttttggaagagtcagtcccctgtgttttctgaactgtttttcctagcatgtatgtgggtagagctttcatgcatctctagtaataataagctgaaattagttttttttttaattctccaatttaaaacttttaattaaaaagtaaattttaatgtcgaaaatgcaaacttggggagggcagaaagatcacacacaaggctgtcacttcatacttgcaggattgcacagcagccgggcagaggcgctcctcacttcccagatggggcggcgggcagcagagacgcacctcacttcctagacagtgcggcagccaggcacaggcacacctcacttcccagacagttgggcggccaggcaagcgctcctcacttcccagatggggcggctcccgggaagcggggctcctcacttcccagacagggtggccaggcagaggtgctcctcacttcccagaacaattctttatgaatttgataaaggactgaagtgcaactgaaagctgctagtgatgatctggtaatatacaatttgtccagtagccagtttgtttttattgtgttttctaaccataagagatcattaaaggcaaagcctgtatgacgctgtacacacacaaaaaaatggtcaccgcaggccatactaccaatgaaatggtaggtaaacaaatcttctggtcaagagaaaaaaaaaagaaatagcactctgcatgctttgctctacaagatgaatttccctagaaagaatccaatgaaggccgggcatagtggctcactcctgtaatcccagcactttggaggccgaggcgggtagatcacctgaggttaggagttcaagaccagcctggccaacatggtgaaaccccttctctactaaaaatgcaaaaattagctgggtgtggtggcgggcgcctgtaatcccagctactcgggaggctgaggtgggagaattgcttgaacccaggagacggaggttgcagtgagccgagatcacgcctctgcactccagcctgggcaacaagagtgagactccgtctccaaaaaaagaaaaggaatccagtgaaaatggctgcaattacaacaagaagtgaaggaagaagactggtgacatctctgaaggatgcagttgaggttgatccaggtttatccgaatatgctacctttctgagccttaaaccttcatctctcaggtgttgattttcttctgatagcttcatcatttctccctgaagtcttttacactcttctgttagtttccttgtttcagtatcatgaagtgaagcactgtgtggttgtggcgtgggcccgtcttgcttagatgcattcagtgggacagctttgctgggttccatgtcattcaatttatcattttcattggggatctccatttggaatccattaattcatgaggttttgcctcattccacacagcttccatatctgaagtgtttagtggagcaggctgtagcattactgaaacagtcacagttgaccctgggtcaataattccactgttgggcctcacacagtaccggtgaggcacggtagtcttcactttgaaacacacttttctatccgatggatttcgcaatttaagatttgtagtgactacatctgtgaaggggcctttgaatttgaggtctatgggcgggtcgaggaccaggatctgctcgtgcttcgccgtggccccggaggcagacgccattggagagacagcgcagagcagggggcggcttgctcgctgggggcgggggacgatggcgagaggggagggggagcgagttcgcatctctccttttcctggttagactctgttcaaccacattcttatgttggcagatctgcttccagattgatttttagagcaccatcactttcacattcctgattctgattttgttttgttttgtttgggttttctgaaacttaaaatgctgccccgaaaatactatatttttgagtttgtgttctgaaagcctccgtgctgctggatctttggggggaaatacaggatccttcagcactgaggtgtttaagatttgcaactagcaatgcaattttttctaaatatggggatatttacctttattaagaaattatactaaacattgatgtccttgatcattttatgttctcatattacttttgattctactatgattgtgtggtggtgaacaaagatcattacaaacaaaaactgtaattttgttatatttgattcaatggaatttacctaaaaaataaagactaaaaatgtgg

SEQ ID NO: 324974 - DNA, 9188 bp, Homo sapiens
  misc_feature (66)..(66): n is a, c, g, or t
aagttataatttagtatgagaagtatttaaaggtaaataaattgtaaaaaacatagagataataanatagatatttttttattcaagagagccagcccactgttggcatttatcagagtttatttaatcttctcatcaactactattgttaccctcagttgccaagtgaagggagcatgcgggaaggttaagtgacttgcccaagcccacacaaccggtaggagccccaattccaggccctagttccaaggctacattcttccaggcggcctccaactgggttggttaagggttgaaaggacagtgggacaataactgaggcccgtattgcccagagcgtccccatcccccgtccggagctggaagaggccatagaccgctgcctccacatcttttcctctccttcgggttcggtgactcacgacccttcttcctctctcccgggatatgacctcaaatttcaccccttatccagtagcgtctgggtccctggactaaagccgtcaaatgtaaccaattgctgaggagctctcccctaagaatcccgcctccactctgaggaacagcttcgctgatcaatggatcccctcctagacgcaatgagcgcgcggggcaagtggagaagcggctgaactgcccaatgaacaagcggtttccgtggttaggggcgtggcagaagcggtcgtcaggggcgtggcggcagttacttgggcggggccggtagcggcgggagctgcactggccagggttccggctgtatatccatgagcgccgctggcagccggggagctgcaggaaccagactgggggcgagctgagcacctgtagtcaatcacacgcagcttttaggtttgtttgaataagagatctgacctgaccggcccaactgtacaactcttcaaggaaaattcgtatttgcagtgggaagaataagtaacattgatcaagatgaatgccatgctggagactcccgaactcccagccgtgtttgatggagtgaagctggctgcagtggctgctgtgctgtacgtgatcgtccggtgtttgaacctgaagagccccacagccccacctgacctctacttccaggactcggggctctcacgctttctgctcaagtcctgtcctcttctgaccaaagaatacattccaccgttgatctgggggaaaagtggacacatccagacagccttgtatgggaagatgggaagggtgaggtcgccacatccttatgggcaccggaagttcatcactatgtctgatggagccacttctacattcgacctcttcgagcccttggctgagcactgtgttggagatgatatcaccatggtcatctgccctggaattgccaatcacagcgagaagcaatacatccgcactttcgttgactacgcccagaaaaatggctatcggtgcgccgtgctgaaccacctgggtgccctgcccaacattgaattgacctcgccacgcatgttcacctatggctgcacgtgggaatttggagccatggtgaactacatcaagaagacatatcccctgacccagctggtcgtcgtgggcttcagcctgggtggtaacattgtgtgcaaatacttgggggagactcaggcaaaccaagagaaggtcctgtgctgcgtcagcgtgtgccaggggtacagtgcactgagggcccaggaaaccttcatgcaatgggatcagtgccggcggttctacaacttcctcatggctgacaacatgaagaagatcatcctctcgcacaggcaagctctttttggagaccatgttaagaaaccccagagcctggaagacacggacttgagccggctctacacagcaacatccctgatgcagattgatgacaatgtgatgaggaagtttcacggctataactccctgaaggaatactatgaggaagaaagttgcatgcggtacctgcacaggatttatgttcctctcatgctggttaatgcagctgacgatccgttggtgcatgaaagtcttctaaccattccaaaatctctttcagagaaacgagagaacgtcatgtttgtgctgcctctgcatgggggccacttgggcttctttgagggctctgtgctgttccccgagcccctgacatggatggataagctggtggtggagtacgccaacgccatttgccaatgggagcgtaacaagttgcagtgctctgacacggagcaggtggaggccgacctggagtgaggcctccggactctggcacgctccagcagccctcctctggaagctgcgtcccctcaccccctgtttcaggtctcccatctccctcagtgacctggatctgacctcacaccatcagcagggggcacccaccatgcacacctgtctcggagtaggcagctcttcctgggagctccaggctatttttgtgcttagttactggttttctccattgcattgttaggcatggtgacaagtgacagagttcttgccctctgtccagtttcagcatctggttgcttttaagccaagtacatctagtttccctattaaaaatgtgtctgaatagcgattttgctttgccaccaaaaggcttttccctgagaacagtgaaggatgtatgtcattttgtggtggttgtatgtgtccttacatagaccttaaaaagagctcacccttccaggccaatgctgaagacacagctccgcttgggagcctgagaacccaggcttcccaggccagagtgtggcttcttaaacggcaaaggaaattcctttgagtcacaagccaagttttcgccctgtctcctgagaccatttccctacgctttgctgctgctgagagttacctgaggcacttgttaaaaattcagcctcccaggtccctcccctcggagaggctgattcactgggtctgggaaggagcctggggattttaatttttcacaagtgccccagatgattctcatcaccaagcaaattttggaaatgctgttcaacagcgcccttaaattggaaacatctttgcagctcgttttattgaaattcataatcaggggtgtcctctagctcccacggtctccagagcagcaaggccggctatggagctgccgtcgtgtgaccacagtgtgatgtctcagaagggctctgggtgggctgagcatctgggctgtgccctggctctgcttttcaccctggacaaagtcgctgtggacttcaatttcttcacctctaaaatgggggacttggaccaggtagattgctgagctcactaccaggttcaaagttcaatgacaaactcagtttactgaggtttgagagaacatccctccaggggagcctgggagctgctctcccagtctaagcatgtagatatcatcgtttgccttttgtgtgtgtgtgtcccttatttgataaaaagatgttttgagttgttttttttttaagcactcacttgtaattttagtttttaaacccaagtccctctaactttgcctttgataccaaacaattcaaaagttggatctgagtttggagaaagatatttccaacctaagtgggtattattttgaaaccagatttttaatttaatagcctatatttgtagtctgttggataggtgtttccaaagtgtgtcttctcaagtgaaaacgcaactctaggtttcaagtactccttttctccgatcctgtggtacttgaatatccaaaaaccctgcactttgaacaatcagctgttgctatctggaactaaacagaactatgagtaaaattgcctggatactttaaaaagatatttttcctccttcatctcctttgactccaggacagactggaatataagtagtgggtctgcatggatgtttcagggatcaaaggagccacctgggcgcctgagtgccaaccctcagggccacaggtgggtgtggtttgggcacgggtccaagtgactgtgacgggacccctgggcatggggccaggtctgtaacctgaagaagttgttttctgacaatcaccaaatcatccgaatgacatcaaaagcagcccttatctcagagaccgagatttctgtggtctcaacttcgctttggtataatttctggcactcaccagcctctatcattatgactttccccccagtgtattatttctctaataggtttccttttcacgttcttttagcacagactggcactttaccctctcaatttggaagttagcccctctcctctgttacttttcccttcacccaactacagctgtgatctagaacattcatagtcatatttctgctactactaccttcatttatcaagactttttatgagaataggtaaaccaagcaataacttcctaggactgaatcaccaccccagaagagcgagaggctcctttcatatgcctgaggccacaccccttaacctgttctgacaaaatagtggctggcccatgtaccagctccattcagaaattcaggaagagaaaagacagccctgttgtcacacaaaccggtgtgggggagggtggagcctggtctgcacggcagtcctggtggcccctgtggaggacaggcagggctggcagcatagcctttgttgccacacaaccggaatttgctcccccaggactgtgggagccagtgtcccagctgaaatctttttagtgtgtggctctgaatggcactcacattccattttggctcacatgaaactaactgaagccctttgttcaagcttcaggctcttaggcatggaaatgagaatgtgactgtggctgtcttacaggaaaattcttgtttgtccctgaatgagagcacagaggcattgaattcacagagctgcaaacttgcctgataaatgagggagtggcagtttatagataggtcatcttttttccttcctccaggtgtccttgcctttcttcccaaagtcattcatttctgatgagtatatgaatccccctcttgctagtaaggttctatttgggctaaaacaaggctgaatttttaaagagtatttgaatatattttagaatcaaattgaggctataaattgcatcaatctggacaattccattgcaggaataatatgttaaaaaccaatggggagaagcacccacatctctcctgtagcactccgtgtctcataagcaatttgaagacacttacaagtaactgattccagtcaaattaggattaactgactcaaaaaatggtgtcaagtttctttaatgtttttatgttagaagtgagtttaacagacttgaagaaaactgttatcttttcctgctgtgagtttacacaaatgattccagagcagaatgaaagcagaaagctgttggttacaatattcttttaacctctctgcagcattttacacttactgggaaccttatgattcaccgtaagagtggaaatatacctgagttcgtgtcctaatggtctctaattcacattggatcgtgggcaaatcacctcacctctctgagcctgttccctcctcttagaccatctctaagaccacttcatctatttacacatcatttgcttgaacattgctgaacatctgcgtgaacttggcctctccagcccttgcaggtggaaacagctgtgtcaaggctcaaggctcacgctgaggggacttggagggagggggcttctgcattaagctttcctggtgaagacccttgatcttgtccaaagccctgtgtctttgactggcttctcttcagagtccccgttgtcatcgtaagacccttgctgtttggagggtggtcttgtgactgtggcagctgctggccgctggaatgaggagcctatctccatcctccagtgtgactcaggcagagcattgagaattcccagggcagaaatccttcctgctcaggctttcattctaaaactacagtcttcattaaagctgaactttctgggtagctgagcttatatgcccggcatctgaatgagagctctctttgtaactgtgtgacttgagatctagtttgccagctcctgggaaacaatacatgtgttcttgtttgtgtttgctcagcaagcagatgtctgagatgtaagaagcttttcttttcctgtggcattgattctgacttagagctgaagtaaagatcactgaaacatcacgtcaagttgaagtcactcataggtctttgtcctttaggcaggacaggagagtcattaagaagcatttcactgtagcattctatcacaatatcatctggaattgttttctttgcccagaaagccttaacttgcctctagagaatccctggtattacaacgatattgcggcattagaattccaactcttctgctgtggaagtttgaagcgaagctgcagcaaaaccagagaatttcctcaagtggcctgtaggctccttgttatcttatgcccccacccctccctcaacaatatgagtgatccagaactggcccaaacacctcagctctggtccctttttgcccttcttggccttactctgttgttcaaagccactttggattgcttggatgcttcgaacagccatgaaaagtagcctgcctgtggcatttagaggccaagcaattgacagaaagggtttcttctacctctgttatctaagcagagggaagtaaacttctcaccgccccccacccctcactgcccccgattacactagaattgctttcgccaaattgtagttgaagctaaggaaggggaatctggcccctgctgggagagggaactggaatgccacacaaggcaaggcctgcttccttccttcccctctgctgctgctgcctcggaacgctgcagcccaggcttcctcccacagtggcccttggaagcaggccgcagagtagacagctgctccttttggaagagtcagtcccctgtgttttctgaactgtttttcctagcatgtatgtgggtagagctttcatgcatctctagtaataataagctgaaattagttttttttttaattctccaatttaaaacttttaattaaaaagtaaattttaatgtcgaaaatgcaaacttggggagggcagaaagatcacacacaaggctgtcacttcatacttgcaggattgcacagcagccgggcagaggcgctcctcacttcccagatggggcggcgggcagcagagacgcacctcacttcctagacagtgcggcagccaggcacaggcacacctcacttcccagacagttgggcggccaggcaagcgctcctcacttcccagatggggcggctcccgggaagcggggctcctcacttcccagacagggtggccaggcagaggtgctcctcacttcccagaacaattctttatgaatttgataaaggactgaagtgcaactgaaagctgctagtgatgatctggtaatatacaatttgtccagtagccagtttgtttttattgtgttttctaaccataagagatcattaaaggcaaagcctgtatgacgctgtacacacacaaaaaaatggtcaccgcaggccatactaccaatgaaatggtaggtaaacaaatcttctggtcaagagaaaaaaaaaagaaatagcactctgcatgctttgctctacaagatgaatttccctagaaagaatccaatgaaggccgggcatagtggctcactcctgtaatcccagcactttggaggccgaggcgggtagatcacctgaggttaggagttcaagaccagcctggccaacatggtgaaaccccttctctactaaaaatgcaaaaattagctgggtgtggtggcgggcgcctgtaatcccagctactcgggaggctgaggtgggagaattgcttgaacccaggagacggaggttgcagtgagccgagatcacgcctctgcactccagcctgggcaacaagagtgagactccgtctccaaaaaaagaaaaggaatccagtgaaaatggctgcaattacaacaagaagtgaaggaagaagactggtgacatctctgaaggatgcagttgaggttgatccaggtttatccgaatatgctacctttctgagccttaaaccttcatctctcaggtgttgattttcttctgatagcttcatcatttctccctgaagtcttttacactcttctgttagtttccttgtttcagtatcatgaagtgaagcactgtgtggttgtggcgtgggcccgtcttgcttagatgcattcagtgggacagctttgctgggttccatgtcattcaatttatcattttcattggggatctccatttggaatccattaattcatgaggttttgcctcattccacacagcttccatatctgaagtgtttagtggagcaaaaattgtaccataaacttgtgtttactcttttcattcggatcatagtcaaagggctgtagcattactgaaacagtcacagttgaccctgggtcaataattccactgttgggcctcacacagtaccggtgaggcacggtagtcttcactttgaaacacacttttctatccgatggatttcgcaatttaagatttgtagtgactacatctgtgaaggggcctttgaatttgaggtctatgggcgggtcgaggaccaggatctgctcgtgcttcgccgtggccccggaggcagacgccattggagagacagcgcagagcagggggcggcttgctcgctgggggcgggggacgatggcgagaggggagggggagcgagttcgcatctctccttttcctggttagactctgttcaaccacattcttatgttggcagatctgcttccagattgatttttagagcaccatcactttcacattcctgattctgattttgttttgttttgtttgggttttctgaaacttaaaatgctgccccgaaaatactatatttttgagtttgtgttctgaaagcctccgtgctgctggatctttggggggaaatacaggatccttcagcactgaggtgtttaagatttgcaactagcaatgcaattttttctaaatatggggatatttacctttattaagaaattatactaaacattgatgtccttgatcattttatgttctcatattacttttgattctactatgattgtgtggtggtgaacaaagatcattacaaacaaaaactgtaattttgttatatttgattcaatggaatttacctaaaaaataaagactaaaaatgtggaaaaaaaaaaaaggggcggcggcaaaatac

SEQ ID NO: 324975 - DNA, 9104 bp, Homo sapiens
  misc_feature (66)..(66): n is a, c, g, or t
aagttataatttagtatgagaagtatttaaaggtaaataaattgtaaaaaacatagagataataanatagatatttttttattcaagagagccagcccactgttggcatttatcagagtttatttaatcttctcatcaactactattgttaccctcagttgccaagtgaagggagcatgcgggaaggttaagtgacttgcccaagcccacacaaccggtaggagccccaattccaggccctagttccaaggctacattcttccaggcggcctccaactgggttggttaagggttgaaaggacagtgggacaataactgaggcccgtattgcccagagcgtccccatcccccgtccggagctggaagaggccatagaccgctgcctccacatcttttcctctccttcgggttcggtgactcacgacccttcttcctctctcccgggatatgacctcaaatttcaccccttatccagtagcgtctgggtccctggactaaagccgtcaaatgtaaccaattgctgaggagctctcccctaagaatcccgcctccactctgaggaacagcttcgctgatcaatggatcccctcctagacgcaatgagcgcgcggggcaagtggagaagcggctgaactgcccaatgaacaagcggtttccgtggttaggggcgtggcagaagcggtcgtcaggggcgtggcggcagttacttgggcggggccggtagcggcgggagctgcactggccagggttccggctgtatatccatgagcgccgctggcagccggggagctgcaggaaccagactgggggcgagctgagcacctgtagtcaatcacacgcagcttttaggtttgtttgaataagagatctgacctgaccggcccaactgtacaactcttcaaggaaaattcgtatttgcagtgggaagaataagtaacattgatcaagatgaatgccatgctggagactcccgaactcccagccgtgtttgatggagtgaagctggctgcagtggctgctgtgctgtacgtgatcgtccggtgtttgaacctgaagagccccacagccccacctgacctctacttccaggactcggggctctcacgctttctgctcaagtcctgtcctcttctgaccaaagaatacattccaccgttgatctgggggaaaagtggacacatccagacagccttgtatgggaagatgggaagggtgaggtcgccacatccttatgggcaccggaagttcatcactatgtctgatggagccacttctacattcgacctcttcgagcccttggctgagcactgtgttggagatgatatcaccatggtcatctgccctggaattgccaatcacagcgagaagcaatacatccgcactttcgttgactacgcccagaaaaatggctatcggtgcgccgtgctgaaccacctgggtgccctgcccaacattgaattgacctcgccacgcatgttcacctatggctgcacgtgggaatttggagccatggtgaactacatcaagaagacatatcccctgacccagctggtcgtcgtgggcttcagcctgggtggtaacattgtgtgcaaatacttgggggagactcaggcaaaccaagagaaggtcctgtgctgcgtcagcgtgtgccaggggtacagtgcactgagggcccaggaaaccttcatgcaatgggatcagtgccggcggttctacaacttcctcatggctgacaacatgaagaagatcatcctctcgcacaggcaagctctttttggagaccatgttaagaaaccccagagcctggaagacacggacttgagccggctctacacagcaacatccctgatgcagattgatgacaatgtgatgaggaagtttcacggctataactccctgaaggaatactatgaggaagaaagttgcatgcggtacctgcacaggatttatgttcctctcatgctggttaatgcagctgacgatccgttggtgcatgaaagtcttctaaccattccaaaatctctttcagagaaacgagagaacgtcatgtttgtgctgcctctgcatgggggccacttgggcttctttgagggctctgtgctgttccccgagcccctgacatggatggataagctggtggtggagtacgccaacgccatttgccaatgggagcgtaacaagttgcagtgctctgacacggagcaggtggaggccgacctggagtgaggcctccggactctggcacgctccagcagccctcctctggaagctgcgtcccctcaccccctgtttcaggtctcccatctccctcagtgacctggatctgacctcacaccatcagcagggggcacccaccatgcacacctgtctcggagtaggcagctcttcctgggagctccaggctatttttgtgcttagttactggttttctccattgcattgttaggcatggtgacaagtgacagagttcttgccctctgtccagtttcagcatctggttgcttttaagccaagtacatctagtttccctattaaaaatgtgtctgaatagcgattttgctttgccaccaaaaggcttttccctgagaacagtgaaggatgtatgtcattttgtggtggttgtatgtgtccttacatagaccttaaaaagagctcacccttccaggccaatgctgaagacacagctccgcttgggagcctgagaacccaggcttcccaggccagagtgtggcttcttaaacggcaaaggaaattcctttgagtcacaagccaagttttcgccctgtctcctgagaccatttccctacgctttgctgctgctgagagttacctgaggcacttgttaaaaattcagcctcccaggtccctcccctcggagaggctgattcactgggtctgggaaggagcctggggattttaatttttcacaagtgccccagatgattctcatcaccaagcaaattttggaaatgctgttcaacagcgcccttaaattggaaacatctttgcagctcgttttattgaaattcataatcaggggtgtcctctagctcccacggtctccagagcagcaaggccggctatggagctgccgtcgtgtgaccacagtgtgatgtctcagaagggctctgggtgggctgagcatctgggctgtgccctggctctgcttttcaccctggacaaagtcgctgtggacttcaatttcttcacctctaaaatgggggacttggaccaggtagattgctgagctcactaccaggttcaaagttcaatgacaaactcagtttactgaggtttgagagaacatccctccaggggagcctgggagctgctctcccagtctaagcatgtagatatcatcgtttgccttttgtgtgtgtgtgtcccttatttgataaaaagatgttttgagttgttttttttttaagcactcacttgtaattttagtttttaaacccaagtccctctaactttgcctttgataccaaacaattcaaaagttggatctgagtttggagaaagatatttccaacctaagtgggtattattttgaaaccagatttttaatttaatagcctatatttgtagtctgttggataggtgtttccaaagtgtgtcttctcaagtgaaaacgcaactctaggtttcaagtactccttttctccgatcctgtggtacttgaatatccaaaaaccctgcactttgaacaatcagctgttgctatctggaactaaacagaactatgagtaaaattgcctggatactttaaaaagatatttttcctccttcatctcctttgactccaggacagactggaatataagtagtgggtctgcatggatgtttcagggatcaaaggagccacctgggcgcctgagtgccaaccctcagggccacaggtgggtgtggtttgggcacgggtccaagtgactgtgacgggacccctgggcatggggccaggtctgtaacctgaagaagttgttttctgacaatcaccaaatcatccgaatgacatcaaaagcagcccttatctcagagaccgagatttctgtggtctcaacttcgctttggtataatttctggcactcaccagcctctatcattatgactttccccccagtgtattatttctctaataggtttccttttcacgttcttttagcacagactggcactttaccctctcaatttggaagttagcccctctcctctgttacttttcccttcacccaactacagctgtgatctagaacattcatagtcatatttctgctactactaccttcatttatcaagactttttatgagaataggtaaaccaagcaataacttcctaggactgaatcaccaccccagaagagcgagaggctcctttcatatgcctgaggccacaccccttaacctgttctgacaaaatagtggctggcccatgtaccagctccattcagaaattcaggaagagaaaagacagccctgttgtcacacaaaccggtgtgggggagggtggagcctggtctgcacggcagtcctggtggcccctgtggaggacaggcagggctggcagcatagcctttgttgccacacaaccggaatttgctcccccaggactgtgggagccagtgtcccagctgaaatctttttagtgtgtggctctgaatggcactcacattccattttggctcacatgaaactaactgaagccctttgttcaagcttcaggctcttaggcatggaaatgagaatgtgactgtggctgtcttacaggaaaattcttgtttgtccctgaatgagagcacagaggcattgaattcacagagctgcaaacttgcctgataaatgagggagtggcagtttatagataggtcatcttttttccttcctccaggtgtccttgcctttcttcccaaagtcattcatttctgatgagtatatgaatccccctcttgctagtaaggttctatttgggctaaaacaaggctgaatttttaaagagtatttgaatatattttagaatcaaattgaggctataaattgcatcaatctggacaattccattgcaggaataatatgttaaaaaccaatggggagaagcacccacatctctcctgtagcactccgtgtctcataagcaatttgaagacacttacaagtaactgattccagtcaaattaggattaactgactcaaaaaatggtgtcaagtttctttaatgtttttatgttagaagtgagtttaacagacttgaagaaaactgttatcttttcctgctgtgagtttacacaaatgattccagagcagaatgaaagcagaaagctgttggttacaatattcttttaacctctctgcagcattttacacttactgggaaccttatgattcaccgtaagagtggaaatatacctgagttcgtgtcctaatggtctctaattcacattggatcgtgggcaaatcacctcacctctctgagcctgttccctcctcttagaccatctctaagaccacttcatctatttacacatcatttgcttgaacattgctgaacatctgcgtgaacttggcctctccagcccttgcaggtggaaacagctgtgtcaaggctcaaggctcacgctgaggggacttggagggagggggcttctgcattaagctttcctggtgaagacccttgatcttgtccaaagccctgtgtctttgactggcttctcttcagagtccccgttgtcatcgtaagacccttgctgtttggagggtggtcttgtgactgtggcagctgctggccgctggaatgaggagcctatctccatcctccagtgtgactcaggcagagcattgagaattcccagggcagaaatccttcctgctcaggctttcattctaaaactacagtcttcattaaagctgaactttctgggtagctgagcttatatgcccggcatctgaatgagagctctctttgtaactgtgtgacttgagatctagtttgccagctcctgggaaacaatacatgtgttcttgtttgtgtttgctcagcaagcagatgtctgagatgtaagaagcttttcttttcctgtggcattgattctgacttagagctgaagtaaagatcactgaaacatcacgtcaagttgaagtcactcataggtctttgtcctttaggcaggacaggagagtcattaagaagcatttcactgtagcattctatcacaatatcatctggaattgttttctttgcccagaaagccttaacttgcctctagagaatccctggtattacaacgatattgcggcattagaattccaactcttctgctgtggaagtttgaagcgaagctgcagcaaaaccagagaatttcctcaagtggcctgtaggctccttgttatcttatgcccccacccctccctcaacaatatgagtgatccagaactggcccaaacacctcagctctggtccctttttgcccttcttggccttactctgttgttcaaagccactttggattgcttggatgcttcgaacagccatgaaaagtagcctgcctgtggcatttagaggccaagcaattgacagaaagggtttcttctacctctgttatctaagcagagggaagtaaacttctcaccgccccccacccctcactgcccccgattacactagaattgctttcgccaaattgtagttgaagctaaggaaggggaatctggcccctgctgggagagggaactggaatgccacacaaggcaaggcctgcttccttccttcccctctgctgctgctgcctcggaacgctgcagcccaggcttcctcccacagtggcccttggaagcaggccgcagagtagacagctgctccttttggaagagtcagtcccctgtgttttctgaactgtttttcctagcatgtatgtgggtagagctttcatgcatctctagtaataataagctgaaattagttttttttttaattctccaatttaaaacttttaattaaaaagtaaattttaatgtcgaaaatgcaaacttggggagggcagaaagatcacacacaaggctgtcacttcatacttgcaggattgcacagcagccgggcagaggcgctcctcacttcccagatggggcggcgggcagcagagacgcacctcacttcctagacagtgcggcagccaggcacaggcacacctcacttcccagacagttgggcggccaggcaagcgctcctcacttcccagatggggcggctcccgggaagcggggctcctcacttcccagacagggtggccaggcagaggtgctcctcacttcccagaacaattctttatgaatttgataaaggactgaagtgcaactgaaagctgctagtgatgatctggtaatatacaatttgtccagtagccagtttgtttttattgtgttttctaaccataagagatcattaaaggcaaagcctgtatgacgctgtacacacacaaaaaaatggtcaccgcaggccatactaccaatgaaatggtaggtaaacaaatcttctggtcaagagaaaaaaaaaagaaatagcactctgcatgctttgctctacaagatgaatttccctagaaagaatccaatgaaggccgggcatagtggctcactcctgtaatcccagcactttggaggccgaggcgggtagatcacctgaggttaggagttcaagaccagcctggccaacatggtgaaaccccttctctactaaaaatgcaaaaattagctgggtgtggtggcgggcgcctgtaatcccagctactcgggaggctgaggtgggagaattgcttgaacccaggagacggaggttgcagtgagccgagatcacgcctctgcactccagcctgggcaacaagagtgagactccgtctccaaaaaaagaaaaggaatccagtgaaaatggctgcaattacaacaagaagtgaaggaagaagactggtgacatctctgaaggatgcagttgaggttgatccaggtttatccgaatatgctacctttctgagccttaaaccttcatctctcaggtgttgattttcttctgatagcttcatcatttctccctgaagtcttttacactcttctgttagtttccttgtttcagtatcatgaagtgaagcactgtgtggttgtggcgtgggcccgtcttgcttagatgcattcagtgggacagctttgctgggttccatgtcattcaatttatcattttcattggggatctccatttggaatccattaattcatgaggttttgcctcattccacacagcttccatatctgaagtgtttagtggagcaaaaattgtaccataaacttgtgtttactcttttcattcggatcatagtcaaagggctgtagcattactgaaacagtcacagttgaccctgggtcaataattccactgttgggcctcacacagtaccggtgaggcacggtagtcttcactttgaaacacacttttctatccgatggatttcgcaatttaagatttgtagtgactacatctgtgaaggggcctttgaatttgaggtctatgggcgggtcgaggaccaggatctgctcgtgcttcgccgtggccccggaggcagacgccattggagagacagcgcagagcagggggcggcttgctcgctgggggcgggggacgatggcgagaggggagggggagcgagttcgcatctctccttttcctggttagactctgttcaaccacattcttatgttggcagatctgcttccagattgatttttagagcaccatcactttcacattcctgattctgattttgttttgttttgtttgggttttctgaaacttaaaatgctgccccgtggggggaaatacaggatccttcagcactgaggtgtttaagatttgcaactagcaatgcaattttttctaaatatggggatatttacctttattaagaaattatactaaacattgatgtccttgatcattttatgttctcatattacttttgattctactatgattgtgtggtggtgaacaaagatcattacaaacaaaaactgtaattttgttatatttgattcaatggaatttacctaaaaaataaagactaaaaatgtgg

SEQ ID NO: 324976 - DNA, 9556 bp, Homo sapiens
  misc_feature (66)..(66): n is a, c, g, or t
aagttataatttagtatgagaagtatttaaaggtaaataaattgtaaaaaacatagagataataanatagatatttttttattcaagagagccagcccactgttggcatttatcagagtttatttaatcttctcatcaactactattgttaccctcagttgccaagtgaagggagcatgcgggaaggttaagtgacttgcccaagcccacacaaccggtaggagccccaattccaggccctagttccaaggctacattcttccaggcggcctccaactgggttggttaagggttgaaaggacagtgggacaataactgaggcccgtattgcccagagcgtccccatcccccgtccggagctggaagaggccatagaccgctgcctccacatcttttcctctccttcgggttcggtgactcacgacccttcttcctctctcccgggatatgacctcaaatttcaccccttatccagtagcgtctgggtccctggactaaagccgtcaaatgtaaccaattgctgaggagctctcccctaagaatcccgcctccactctgaggaacagcttcgctgatcaatggatcccctcctagacgcaatgagcgcgcggggcaagtggagaagcggctgaactgcccaatgaacaagcggtttccgtggttaggggcgtggcagaagcggtcgtcaggggcgtggcggcagttacttgggcggggccggtagcggcgggagctgcactggccagggttccggctgtatatccatgagcgccgctggcagccggggagctgcaggaaccagactgggggcgagctgagcacctgtagtcaatcacacgcagaaataataatgatacttatgttagaagattgttttgagaagtgcatggagttactacatctgaagcatttagaacagtacctggcacagggttctgtcctcttcatttgcaagccactgctttatccacgagggtgctccctacttatgccagtgaattaatttttggcacagatgaatccttcatatttatctggatttagctggtagcatttgtctcctaagacttggtcacagaggaatccatgtgaccttcaggccttctgctctaaactggcaggagatcctgtttctactcacagcgtccgagggtctggtggccgagccctgaggggcgctgttgctcccaggtggcagaattcagcatcagagagccacacagctgaaagagatggatggcttttaggtttgtttgaataagagatctgacctgaccggcccaactgtacaactcttcaaggaaaattcgtatttgcagtgggaagaataagtaacattgatcaagatgaatgccatgctggagactcccgaactcccagccgtgtttgatggagtgaagctggctgcagtggctgctgtgctgtacgtgatcgtccggtgtttgaacctgaagagccccacagccccacctgacctctacttccaggactcggggctctcacgctttctgctcaagtcctgtcctcttctgaccaaagaatacattccaccgttgatctgggggaaaagtggacacatccagacagccttgtatgggaagatgggaagggtgaggtcgccacatccttatgggcaccggaagttcatcactatgtctgatggagccacttctacattcgacctcttcgagcccttggctgagcactgtgttggagatgatatcaccatggtcatctgccctggaattgccaatcacagcgagaagcaatacatccgcactttcgttgactacgcccagaaaaatggctatcggtgcgccgtgctgaaccacctgggtgccctgcccaacattgaattgacctcgccacgcatgttcacctatggctgcacgtgggaatttggagccatggtgaactacatcaagaagacatatcccctgacccagctggtcgtcgtgggcttcagcctgggtggtaacattgtgtgcaaatacttgggggagactcaggcaaaccaagagaaggtcctgtgctgcgtcagcgtgtgccaggggtacagtgcactgagggcccaggaaaccttcatgcaatgggatcagtgccggcggttctacaacttcctcatggctgacaacatgaagaagatcatcctctcgcacaggcaagctctttttggagaccatgttaagaaaccccagagcctggaagacacggacttgagccggctctacacagcaacatccctgatgcagattgatgacaatgtgatgaggaagtttcacggctataactccctgaaggaatactatgaggaagaaagttgcatgcggtacctgcacaggatttatgttcctctcatgctggttaatgcagctgacgatccgttggtgcatgaaagtcttctaaccattccaaaatctctttcagagaaacgagagaacgtcatgtttgtgctgcctctgcatgggggccacttgggcttctttgagggctctgtgctgttccccgagcccctgacatggatggataagctggtggtggagtacgccaacgccatttgccaatgggagcgtaacaagttgcagtgctctgacacggagcaggtggaggccgacctggagtgaggcctccggactctggcacgctccagcagccctcctctggaagctgcgtcccctcaccccctgtttcaggtctcccatctccctcagtgacctggatctgacctcacaccatcagcagggggcacccaccatgcacacctgtctcggagtaggcagctcttcctgggagctccaggctatttttgtgcttagttactggttttctccattgcattgttaggcatggtgacaagtgacagagttcttgccctctgtccagtttcagcatctggttgcttttaagccaagtacatctagtttccctattaaaaatgtgtctgaatagcgattttgctttgccaccaaaaggcttttccctgagaacagtgaaggatgtatgtcattttgtggtggttgtatgtgtccttacatagaccttaaaaagagctcacccttccaggccaatgctgaagacacagctccgcttgggagcctgagaacccaggcttcccaggccagagtgtggcttcttaaacggcaaaggaaattcctttgagtcacaagccaagttttcgccctgtctcctgagaccatttccctacgctttgctgctgctgagagttacctgaggcacttgttaaaaattcagcctcccaggtccctcccctcggagaggctgattcactgggtctgggaaggagcctggggattttaatttttcacaagtgccccagatgattctcatcaccaagcaaattttggaaatgctgttcaacagcgcccttaaattggaaacatctttgcagctcgttttattgaaattcataatcaggggtgtcctctagctcccacggtctccagagcagcaaggccggctatggagctgccgtcgtgtgaccacagtgtgatgtctcagaagggctctgggtgggctgagcatctgggctgtgccctggctctgcttttcaccctggacaaagtcgctgtggacttcaatttcttcacctctaaaatgggggacttggaccaggtagattgctgagctcactaccaggttcaaagttcaatgacaaactcagtttactgaggtttgagagaacatccctccaggggagcctgggagctgctctcccagtctaagcatgtagatatcatcgtttgccttttgtgtgtgtgtgtcccttatttgataaaaagatgttttgagttgttttttttttaagcactcacttgtaattttagtttttaaacccaagtccctctaactttgcctttgataccaaacaattcaaaagttggatctgagtttggagaaagatatttccaacctaagtgggtattattttgaaaccagatttttaatttaatagcctatatttgtagtctgttggataggtgtttccaaagtgtgtcttctcaagtgaaaacgcaactctaggtttcaagtactccttttctccgatcctgtggtacttgaatatccaaaaaccctgcactttgaacaatcagctgttgctatctggaactaaacagaactatgagtaaaattgcctggatactttaaaaagatatttttcctccttcatctcctttgactccaggacagactggaatataagtagtgggtctgcatggatgtttcagggatcaaaggagccacctgggcgcctgagtgccaaccctcagggccacaggtgggtgtggtttgggcacgggtccaagtgactgtgacgggacccctgggcatggggccaggtctgtaacctgaagaagttgttttctgacaatcaccaaatcatccgaatgacatcaaaagcagcccttatctcagagaccgagatttctgtggtctcaacttcgctttggtataatttctggcactcaccagcctctatcattatgactttccccccagtgtattatttctctaataggtttccttttcacgttcttttagcacagactggcactttaccctctcaatttggaagttagcccctctcctctgttacttttcccttcacccaactacagctgtgatctagaacattcatagtcatatttctgctactactaccttcatttatcaagactttttatgagaataggtaaaccaagcaataacttcctaggactgaatcaccaccccagaagagcgagaggctcctttcatatgcctgaggccacaccccttaacctgttctgacaaaatagtggctggcccatgtaccagctccattcagaaattcaggaagagaaaagacagccctgttgtcacacaaaccggtgtgggggagggtggagcctggtctgcacggcagtcctggtggcccctgtggaggacaggcagggctggcagcatagcctttgttgccacacaaccggaatttgctcccccaggactgtgggagccagtgtcccagctgaaatctttttagtgtgtggctctgaatggcactcacattccattttggctcacatgaaactaactgaagccctttgttcaagcttcaggctcttaggcatggaaatgagaatgtgactgtggctgtcttacaggaaaattcttgtttgtccctgaatgagagcacagaggcattgaattcacagagctgcaaacttgcctgataaatgagggagtggcagtttatagataggtcatcttttttccttcctccaggtgtccttgcctttcttcccaaagtcattcatttctgatgagtatatgaatccccctcttgctagtaaggttctatttgggctaaaacaaggctgaatttttaaagagtatttgaatatattttagaatcaaattgaggctataaattgcatcaatctggacaattccattgcaggaataatatgttaaaaaccaatggggagaagcacccacatctctcctgtagcactccgtgtctcataagcaatttgaagacacttacaagtaactgattccagtcaaattaggattaactgactcaaaaaatggtgtcaagtttctttaatgtttttatgttagaagtgagtttaacagacttgaagaaaactgttatcttttcctgctgtgagtttacacaaatgattccagagcagaatgaaagcagaaagctgttggttacaatattcttttaacctctctgcagcattttacacttactgggaaccttatgattcaccgtaagagtggaaatatacctgagttcgtgtcctaatggtctctaattcacattggatcgtgggcaaatcacctcacctctctgagcctgttccctcctcttagaccatctctaagaccacttcatctatttacacatcatttgcttgaacattgctgaacatctgcgtgaacttggcctctccagcccttgcaggtggaaacagctgtgtcaaggctcaaggctcacgctgaggggacttggagggagggggcttctgcattaagctttcctggtgaagacccttgatcttgtccaaagccctgtgtctttgactggcttctcttcagagtccccgttgtcatcgtaagacccttgctgtttggagggtggtcttgtgactgtggcagctgctggccgctggaatgaggagcctatctccatcctccagtgtgactcaggcagagcattgagaattcccagggcagaaatccttcctgctcaggctttcattctaaaactacagtcttcattaaagctgaactttctgggtagctgagcttatatgcccggcatctgaatgagagctctctttgtaactgtgtgacttgagatctagtttgccagctcctgggaaacaatacatgtgttcttgtttgtgtttgctcagcaagcagatgtctgagatgtaagaagcttttcttttcctgtggcattgattctgacttagagctgaagtaaagatcactgaaacatcacgtcaagttgaagtcactcataggtctttgtcctttaggcaggacaggagagtcattaagaagcatttcactgtagcattctatcacaatatcatctggaattgttttctttgcccagaaagccttaacttgcctctagagaatccctggtattacaacgatattgcggcattagaattccaactcttctgctgtggaagtttgaagcgaagctgcagcaaaaccagagaatttcctcaagtggcctgtaggctccttgttatcttatgcccccacccctccctcaacaatatgagtgatccagaactggcccaaacacctcagctctggtccctttttgcccttcttggccttactctgttgttcaaagccactttggattgcttggatgcttcgaacagccatgaaaagtagcctgcctgtggcatttagaggccaagcaattgacagaaagggtttcttctacctctgttatctaagcagagggaagtaaacttctcaccgccccccacccctcactgcccccgattacactagaattgctttcgccaaattgtagttgaagctaaggaaggggaatctggcccctgctgggagagggaactggaatgccacacaaggcaaggcctgcttccttccttcccctctgctgctgctgcctcggaacgctgcagcccaggcttcctcccacagtggcccttggaagcaggccgcagagtagacagctgctccttttggaagagtcagtcccctgtgttttctgaactgtttttcctagcatgtatgtgggtagagctttcatgcatctctagtaataataagctgaaattagttttttttttaattctccaatttaaaacttttaattaaaaagtaaattttaatgtcgaaaatgcaaacttggggagggcagaaagatcacacacaaggctgtcacttcatacttgcaggattgcacagcagccgggcagaggcgctcctcacttcccagatggggcggcgggcagcagagacgcacctcacttcctagacagtgcggcagccaggcacaggcacacctcacttcccagacagttgggcggccaggcaagcgctcctcacttcccagatggggcggctcccgggaagcggggctcctcacttcccagacagggtggccaggcagaggtgctcctcacttcccagaacaattctttatgaatttgataaaggactgaagtgcaactgaaagctgctagtgatgatctggtaatatacaatttgtccagtagccagtttgtttttattgtgttttctaaccataagagatcattaaaggcaaagcctgtatgacgctgtacacacacaaaaaaatggtcaccgcaggccatactaccaatgaaatggtaggtaaacaaatcttctggtcaagagaaaaaaaaaagaaatagcactctgcatgctttgctctacaagatgaatttccctagaaagaatccaatgaaggccgggcatagtggctcactcctgtaatcccagcactttggaggccgaggcgggtagatcacctgaggttaggagttcaagaccagcctggccaacatggtgaaaccccttctctactaaaaatgcaaaaattagctgggtgtggtggcgggcgcctgtaatcccagctactcgggaggctgaggtgggagaattgcttgaacccaggagacggaggttgcagtgagccgagatcacgcctctgcactccagcctgggcaacaagagtgagactccgtctccaaaaaaagaaaaggaatccagtgaaaatggctgcaattacaacaagaagtgaaggaagaagactggtgacatctctgaaggatgcagttgaggttgatccaggtttatccgaatatgctacctttctgagccttaaaccttcatctctcaggtgttgattttcttctgatagcttcatcatttctccctgaagtcttttacactcttctgttagtttccttgtttcagtatcatgaagtgaagcactgtgtggttgtggcgtgggcccgtcttgcttagatgcattcagtgggacagctttgctgggttccatgtcattcaatttatcattttcattggggatctccatttggaatccattaattcatgaggttttgcctcattccacacagcttccatatctgaagtgtttagtggagcaaaaattgtaccataaacttgtgtttactcttttcattcggatcatagtcaaagggctgtagcattactgaaacagtcacagttgaccctgggtcaataattccactgttgggcctcacacagtaccggtgaggcacggtagtcttcactttgaaacacacttttctatccgatggatttcgcaatttaagatttgtagtgactacatctgtgaaggggcctttgaatttgaggtctatgggcgggtcgaggaccaggatctgctcgtgcttcgccgtggccccggaggcagacgccattggagagacagcgcagagcagggggcggcttgctcgctgggggcgggggacgatggcgagaggggagggggagcgagttcgcatctctccttttcctggttagactctgttcaaccacattcttatgttggcagatctgcttccagattgatttttagagcaccatcactttcacattcctgattctgattttgttttgttttgtttgggttttctgaaacttaaaatgctgccccgaaaatactatatttttgagtttgtgttctgaaagcctccgtgctgctggatctttggggggaaatacaggatccttcagcactgaggtgtttaagatttgcaactagcaatgcaattttttctaaatatggggatatttacctttattaagaaattatactaaacattgatgtccttgatcattttatgttctcatattacttttgattctactatgattgtgtggtggtgaacaaagatcattacaaacaaaaactgtaattttgttatatttgattcaatggaatttacctaaaaaataaagactaaaaatgtgg

SEQ ID NO: 324977 - DNA, 9389 bp, Homo sapiens
  misc_feature (66)..(66): n is a, c, g, or t
aagttataatttagtatgagaagtatttaaaggtaaataaattgtaaaaaacatagagataataanatagatatttttttattcaagagagccagcccactgttggcatttatcagagtttatttaatcttctcatcaactactattgttaccctcagttgccaagtgaagggagcatgcgggaaggttaagtgacttgcccaagcccacacaaccggtaggagccccaattccaggccctagttccaaggctacattcttccaggcggcctccaactgggttggttaagggttgaaaggacagtgggacaataactgaggcccgtattgcccagagcgtccccatcccccgtccggagctggaagaggccatagaccgctgcctccacatcttttcctctccttcgggttcggtgactcacgacccttcttcctctctcccgggatatgacctcaaatttcaccccttatccagtagcgtctgggtccctggactaaagccgtcaaatgtaaccaattgctgaggagctctcccctaagaatcccgcctccactctgaggaacagcttcgctgatcaatggatcccctcctagacgcaatgagcgcgcggggcaagtggagaagcggctgaactgcccaatgaacaagcggtttccgtggttaggggcgtggcagaagcggtcgtcaggggcgtggcggcagttacttgggcggggccggtagcggcgggagctgcactggccagggttccggctgtatatccatgagcgccgctggcagccggggagctgcaggaaccagactgggggcgagctgagcacctgtagtcaatcacacgcaggcacagatgaatccttcatatttatctggatttagctggtagcatttgtctcctaagacttggtcacagaggaatccatgtgaccttcaggccttctgctctaaactggcaggagatcctgtttctactcacagcgtccgagggtctggtggccgagccctgaggggcgctgttgctcccaggtggcagaattcagcatcagagagccacacagctgaaagagatggatggcttttaggtttgtttgaataagagatctgacctgaccggcccaactgtacaactcttcaaggaaaattcgtatttgcagtgggaagaataagtaacattgatcaagatgaatgccatgctggagactcccgaactcccagccgtgtttgatggagtgaagctggctgcagtggctgctgtgctgtacgtgatcgtccggtgtttgaacctgaagagccccacagccccacctgacctctacttccaggactcggggctctcacgctttctgctcaagtcctgtcctcttctgaccaaagaatacattccaccgttgatctgggggaaaagtggacacatccagacagccttgtatgggaagatgggaagggtgaggtcgccacatccttatgggcaccggaagttcatcactatgtctgatggagccacttctacattcgacctcttcgagcccttggctgagcactgtgttggagatgatatcaccatggtcatctgccctggaattgccaatcacagcgagaagcaatacatccgcactttcgttgactacgcccagaaaaatggctatcggtgcgccgtgctgaaccacctgggtgccctgcccaacattgaattgacctcgccacgcatgttcacctatggctgcacgtgggaatttggagccatggtgaactacatcaagaagacatatcccctgacccagctggtcgtcgtgggcttcagcctgggtggtaacattgtgtgcaaatacttgggggagactcaggcaaaccaagagaaggtcctgtgctgcgtcagcgtgtgccaggggtacagtgcactgagggcccaggaaaccttcatgcaatgggatcagtgccggcggttctacaacttcctcatggctgacaacatgaagaagatcatcctctcgcacaggcaagctctttttggagaccatgttaagaaaccccagagcctggaagacacggacttgagccggctctacacagcaacatccctgatgcagattgatgacaatgtgatgaggaagtttcacggctataactccctgaaggaatactatgaggaagaaagttgcatgcggtacctgcacaggatttatgttcctctcatgctggttaatgcagctgacgatccgttggtgcatgaaagtcttctaaccattccaaaatctctttcagagaaacgagagaacgtcatgtttgtgctgcctctgcatgggggccacttgggcttctttgagggctctgtgctgttccccgagcccctgacatggatggataagctggtggtggagtacgccaacgccatttgccaatgggagcgtaacaagttgcagtgctctgacacggagcaggtggaggccgacctggagtgaggcctccggactctggcacgctccagcagccctcctctggaagctgcgtcccctcaccccctgtttcaggtctcccatctccctcagtgacctggatctgacctcacaccatcagcagggggcacccaccatgcacacctgtctcggagtaggcagctcttcctgggagctccaggctatttttgtgcttagttactggttttctccattgcattgttaggcatggtgacaagtgacagagttcttgccctctgtccagtttcagcatctggttgcttttaagccaagtacatctagtttccctattaaaaatgtgtctgaatagcgattttgctttgccaccaaaaggcttttccctgagaacagtgaaggatgtatgtcattttgtggtggttgtatgtgtccttacatagaccttaaaaagagctcacccttccaggccaatgctgaagacacagctccgcttgggagcctgagaacccaggcttcccaggccagagtgtggcttcttaaacggcaaaggaaattcctttgagtcacaagccaagttttcgccctgtctcctgagaccatttccctacgctttgctgctgctgagagttacctgaggcacttgttaaaaattcagcctcccaggtccctcccctcggagaggctgattcactgggtctgggaaggagcctggggattttaatttttcacaagtgccccagatgattctcatcaccaagcaaattttggaaatgctgttcaacagcgcccttaaattggaaacatctttgcagctcgttttattgaaattcataatcaggggtgtcctctagctcccacggtctccagagcagcaaggccggctatggagctgccgtcgtgtgaccacagtgtgatgtctcagaagggctctgggtgggctgagcatctgggctgtgccctggctctgcttttcaccctggacaaagtcgctgtggacttcaatttcttcacctctaaaatgggggacttggaccaggtagattgctgagctcactaccaggttcaaagttcaatgacaaactcagtttactgaggtttgagagaacatccctccaggggagcctgggagctgctctcccagtctaagcatgtagatatcatcgtttgccttttgtgtgtgtgtgtcccttatttgataaaaagatgttttgagttgttttttttttaagcactcacttgtaattttagtttttaaacccaagtccctctaactttgcctttgataccaaacaattcaaaagttggatctgagtttggagaaagatatttccaacctaagtgggtattattttgaaaccagatttttaatttaatagcctatatttgtagtctgttggataggtgtttccaaagtgtgtcttctcaagtgaaaacgcaactctaggtttcaagtactccttttctccgatcctgtggtacttgaatatccaaaaaccctgcactttgaacaatcagctgttgctatctggaactaaacagaactatgagtaaaattgcctggatactttaaaaagatatttttcctccttcatctcctttgactccaggacagactggaatataagtagtgggtctgcatggatgtttcagggatcaaaggagccacctgggcgcctgagtgccaaccctcagggccacaggtgggtgtggtttgggcacgggtccaagtgactgtgacgggacccctgggcatggggccaggtctgtaacctgaagaagttgttttctgacaatcaccaaatcatccgaatgacatcaaaagcagcccttatctcagagaccgagatttctgtggtctcaacttcgctttggtataatttctggcactcaccagcctctatcattatgactttccccccagtgtattatttctctaataggtttccttttcacgttcttttagcacagactggcactttaccctctcaatttggaagttagcccctctcctctgttacttttcccttcacccaactacagctgtgatctagaacattcatagtcatatttctgctactactaccttcatttatcaagactttttatgagaataggtaaaccaagcaataacttcctaggactgaatcaccaccccagaagagcgagaggctcctttcatatgcctgaggccacaccccttaacctgttctgacaaaatagtggctggcccatgtaccagctccattcagaaattcaggaagagaaaagacagccctgttgtcacacaaaccggtgtgggggagggtggagcctggtctgcacggcagtcctggtggcccctgtggaggacaggcagggctggcagcatagcctttgttgccacacaaccggaatttgctcccccaggactgtgggagccagtgtcccagctgaaatctttttagtgtgtggctctgaatggcactcacattccattttggctcacatgaaactaactgaagccctttgttcaagcttcaggctcttaggcatggaaatgagaatgtgactgtggctgtcttacaggaaaattcttgtttgtccctgaatgagagcacagaggcattgaattcacagagctgcaaacttgcctgataaatgagggagtggcagtttatagataggtcatcttttttccttcctccaggtgtccttgcctttcttcccaaagtcattcatttctgatgagtatatgaatccccctcttgctagtaaggttctatttgggctaaaacaaggctgaatttttaaagagtatttgaatatattttagaatcaaattgaggctataaattgcatcaatctggacaattccattgcaggaataatatgttaaaaaccaatggggagaagcacccacatctctcctgtagcactccgtgtctcataagcaatttgaagacacttacaagtaactgattccagtcaaattaggattaactgactcaaaaaatggtgtcaagtttctttaatgtttttatgttagaagtgagtttaacagacttgaagaaaactgttatcttttcctgctgtgagtttacacaaatgattccagagcagaatgaaagcagaaagctgttggttacaatattcttttaacctctctgcagcattttacacttactgggaaccttatgattcaccgtaagagtggaaatatacctgagttcgtgtcctaatggtctctaattcacattggatcgtgggcaaatcacctcacctctctgagcctgttccctcctcttagaccatctctaagaccacttcatctatttacacatcatttgcttgaacattgctgaacatctgcgtgaacttggcctctccagcccttgcaggtggaaacagctgtgtcaaggctcaaggctcacgctgaggggacttggagggagggggcttctgcattaagctttcctggtgaagacccttgatcttgtccaaagccctgtgtctttgactggcttctcttcagagtccccgttgtcatcgtaagacccttgctgtttggagggtggtcttgtgactgtggcagctgctggccgctggaatgaggagcctatctccatcctccagtgtgactcaggcagagcattgagaattcccagggcagaaatccttcctgctcaggctttcattctaaaactacagtcttcattaaagctgaactttctgggtagctgagcttatatgcccggcatctgaatgagagctctctttgtaactgtgtgacttgagatctagtttgccagctcctgggaaacaatacatgtgttcttgtttgtgtttgctcagcaagcagatgtctgagatgtaagaagcttttcttttcctgtggcattgattctgacttagagctgaagtaaagatcactgaaacatcacgtcaagttgaagtcactcataggtctttgtcctttaggcaggacaggagagtcattaagaagcatttcactgtagcattctatcacaatatcatctggaattgttttctttgcccagaaagccttaacttgcctctagagaatccctggtattacaacgatattgcggcattagaattccaactcttctgctgtggaagtttgaagcgaagctgcagcaaaaccagagaatttcctcaagtggcctgtaggctccttgttatcttatgcccccacccctccctcaacaatatgagtgatccagaactggcccaaacacctcagctctggtccctttttgcccttcttggccttactctgttgttcaaagccactttggattgcttggatgcttcgaacagccatgaaaagtagcctgcctgtggcatttagaggccaagcaattgacagaaagggtttcttctacctctgttatctaagcagagggaagtaaacttctcaccgccccccacccctcactgcccccgattacactagaattgctttcgccaaattgtagttgaagctaaggaaggggaatctggcccctgctgggagagggaactggaatgccacacaaggcaaggcctgcttccttccttcccctctgctgctgctgcctcggaacgctgcagcccaggcttcctcccacagtggcccttggaagcaggccgcagagtagacagctgctccttttggaagagtcagtcccctgtgttttctgaactgtttttcctagcatgtatgtgggtagagctttcatgcatctctagtaataataagctgaaattagttttttttttaattctccaatttaaaacttttaattaaaaagtaaattttaatgtcgaaaatgcaaacttggggagggcagaaagatcacacacaaggctgtcacttcatacttgcaggattgcacagcagccgggcagaggcgctcctcacttcccagatggggcggcgggcagcagagacgcacctcacttcctagacagtgcggcagccaggcacaggcacacctcacttcccagacagttgggcggccaggcaagcgctcctcacttcccagatggggcggctcccgggaagcggggctcctcacttcccagacagggtggccaggcagaggtgctcctcacttcccagaacaattctttatgaatttgataaaggactgaagtgcaactgaaagctgctagtgatgatctggtaatatacaatttgtccagtagccagtttgtttttattgtgttttctaaccataagagatcattaaaggcaaagcctgtatgacgctgtacacacacaaaaaaatggtcaccgcaggccatactaccaatgaaatggtaggtaaacaaatcttctggtcaagagaaaaaaaaaagaaatagcactctgcatgctttgctctacaagatgaatttccctagaaagaatccaatgaaggccgggcatagtggctcactcctgtaatcccagcactttggaggccgaggcgggtagatcacctgaggttaggagttcaagaccagcctggccaacatggtgaaaccccttctctactaaaaatgcaaaaattagctgggtgtggtggcgggcgcctgtaatcccagctactcgggaggctgaggtgggagaattgcttgaacccaggagacggaggttgcagtgagccgagatcacgcctctgcactccagcctgggcaacaagagtgagactccgtctccaaaaaaagaaaaggaatccagtgaaaatggctgcaattacaacaagaagtgaaggaagaagactggtgacatctctgaaggatgcagttgaggttgatccaggtttatccgaatatgctacctttctgagccttaaaccttcatctctcaggtgttgattttcttctgatagcttcatcatttctccctgaagtcttttacactcttctgttagtttccttgtttcagtatcatgaagtgaagcactgtgtggttgtggcgtgggcccgtcttgcttagatgcattcagtgggacagctttgctgggttccatgtcattcaatttatcattttcattggggatctccatttggaatccattaattcatgaggttttgcctcattccacacagcttccatatctgaagtgtttagtggagcaaaaattgtaccataaacttgtgtttactcttttcattcggatcatagtcaaagggctgtagcattactgaaacagtcacagttgaccctgggtcaataattccactgttgggcctcacacagtaccggtgaggcacggtagtcttcactttgaaacacacttttctatccgatggatttcgcaatttaagatttgtagtgactacatctgtgaaggggcctttgaatttgaggtctatgggcgggtcgaggaccaggatctgctcgtgcttcgccgtggccccggaggcagacgccattggagagacagcgcagagcagggggcggcttgctcgctgggggcgggggacgatggcgagaggggagggggagcgagttcgcatctctccttttcctggttagactctgttcaaccacattcttatgttggcagatctgcttccagattgatttttagagcaccatcactttcacattcctgattctgattttgttttgttttgtttgggttttctgaaacttaaaatgctgccccgaaaatactatatttttgagtttgtgttctgaaagcctccgtgctgctggatctttggggggaaatacaggatccttcagcactgaggtgtttaagatttgcaactagcaatgcaattttttctaaatatggggatatttacctttattaagaaattatactaaacattgatgtccttgatcattttatgttctcatattacttttgattctactatgattgtgtggtggtgaacaaagatcattacaaacaaaaactgtaattttgttatatttgattcaatggaatttacctaaaaaataaagactaaaaatgtgg

SEQ ID NO: 324978 - DNA, 9390 bp, Homo sapiens
  misc_feature (66)..(66): n is a, c, g, or t
aagttataatttagtatgagaagtatttaaaggtaaataaattgtaaaaaacatagagataataanatagatatttttttattcaagagagccagcccactgttggcatttatcagagtttatttaatcttctcatcaactactattgttaccctcagttgccaagtgaagggagcatgcgggaaggttaagtgacttgcccaagcccacacaaccggtaggagccccaattccaggccctagttccaaggctacattcttccaggcggcctccaactgggttggttaagggttgaaaggacagtgggacaataactgaggcccgtattgcccagagcgtccccatcccccgtccggagctggaagaggccatagaccgctgcctccacatcttttcctctccttcgggttcggtgactcacgacccttcttcctctctcccgggatatgacctcaaatttcaccccttatccagtagcgtctgggtccctggactaaagccgtcaaatgtaaccaattgctgaggagctctcccctaagaatcccgcctccactctgaggaacagcttcgctgatcaatggatcccctcctagacgcaatgagcgcgcggggcaagtggagaagcggctgaactgcccaatgaacaagcggtttccgtggttaggggcgtggcagaagcggtcgtcaggggcgtggcggcagttacttgggcggggccggtagcggcgggagctgcactggccagggttccggctgtatatccatgagcgccgctggcagccggggagctgcaggaaccagactgggggcgagctgagcacctgtagtcaatcacacgcagaaataataatgatacttatgttagaagattgttttgagaagtgcatggagttactacatctgaagcatttagaacagtacctggcacagggcacagatgaatccttcatatttatctggatttagctggtagcatttgtctcctaagacttggtcacagaggaatccatgtgaccttcaggccttctgctctaaactggcaggagatcctgtttctactcacagcgtccgagcttttaggtttgtttgaataagagatctgacctgaccggcccaactgtacaactcttcaaggaaaattcgtatttgcagtgggaagaataagtaacattgatcaagatgaatgccatgctggagactcccgaactcccagccgtgtttgatggagtgaagctggctgcagtggctgctgtgctgtacgtgatcgtccggtgtttgaacctgaagagccccacagccccacctgacctctacttccaggactcggggctctcacgctttctgctcaagtcctgtcctcttctgaccaaagaatacattccaccgttgatctgggggaaaagtggacacatccagacagccttgtatgggaagatgggaagggtgaggtcgccacatccttatgggcaccggaagttcatcactatgtctgatggagccacttctacattcgacctcttcgagcccttggctgagcactgtgttggagatgatatcaccatggtcatctgccctggaattgccaatcacagcgagaagcaatacatccgcactttcgttgactacgcccagaaaaatggctatcggtgcgccgtgctgaaccacctgggtgccctgcccaacattgaattgacctcgccacgcatgttcacctatggctgcacgtgggaatttggagccatggtgaactacatcaagaagacatatcccctgacccagctggtcgtcgtgggcttcagcctgggtggtaacattgtgtgcaaatacttgggggagactcaggcaaaccaagagaaggtcctgtgctgcgtcagcgtgtgccaggggtacagtgcactgagggcccaggaaaccttcatgcaatgggatcagtgccggcggttctacaacttcctcatggctgacaacatgaagaagatcatcctctcgcacaggcaagctctttttggagaccatgttaagaaaccccagagcctggaagacacggacttgagccggctctacacagcaacatccctgatgcagattgatgacaatgtgatgaggaagtttcacggctataactccctgaaggaatactatgaggaagaaagttgcatgcggtacctgcacaggatttatgttcctctcatgctggttaatgcagctgacgatccgttggtgcatgaaagtcttctaaccattccaaaatctctttcagagaaacgagagaacgtcatgtttgtgctgcctctgcatgggggccacttgggcttctttgagggctctgtgctgttccccgagcccctgacatggatggataagctggtggtggagtacgccaacgccatttgccaatgggagcgtaacaagttgcagtgctctgacacggagcaggtggaggccgacctggagtgaggcctccggactctggcacgctccagcagccctcctctggaagctgcgtcccctcaccccctgtttcaggtctcccatctccctcagtgacctggatctgacctcacaccatcagcagggggcacccaccatgcacacctgtctcggagtaggcagctcttcctgggagctccaggctatttttgtgcttagttactggttttctccattgcattgttaggcatggtgacaagtgacagagttcttgccctctgtccagtttcagcatctggttgcttttaagccaagtacatctagtttccctattaaaaatgtgtctgaatagcgattttgctttgccaccaaaaggcttttccctgagaacagtgaaggatgtatgtcattttgtggtggttgtatgtgtccttacatagaccttaaaaagagctcacccttccaggccaatgctgaagacacagctccgcttgggagcctgagaacccaggcttcccaggccagagtgtggcttcttaaacggcaaaggaaattcctttgagtcacaagccaagttttcgccctgtctcctgagaccatttccctacgctttgctgctgctgagagttacctgaggcacttgttaaaaattcagcctcccaggtccctcccctcggagaggctgattcactgggtctgggaaggagcctggggattttaatttttcacaagtgccccagatgattctcatcaccaagcaaattttggaaatgctgttcaacagcgcccttaaattggaaacatctttgcagctcgttttattgaaattcataatcaggggtgtcctctagctcccacggtctccagagcagcaaggccggctatggagctgccgtcgtgtgaccacagtgtgatgtctcagaagggctctgggtgggctgagcatctgggctgtgccctggctctgcttttcaccctggacaaagtcgctgtggacttcaatttcttcacctctaaaatgggggacttggaccaggtagattgctgagctcactaccaggttcaaagttcaatgacaaactcagtttactgaggtttgagagaacatccctccaggggagcctgggagctgctctcccagtctaagcatgtagatatcatcgtttgccttttgtgtgtgtgtgtcccttatttgataaaaagatgttttgagttgttttttttttaagcactcacttgtaattttagtttttaaacccaagtccctctaactttgcctttgataccaaacaattcaaaagttggatctgagtttggagaaagatatttccaacctaagtgggtattattttgaaaccagatttttaatttaatagcctatatttgtagtctgttggataggtgtttccaaagtgtgtcttctcaagtgaaaacgcaactctaggtttcaagtactccttttctccgatcctgtggtacttgaatatccaaaaaccctgcactttgaacaatcagctgttgctatctggaactaaacagaactatgagtaaaattgcctggatactttaaaaagatatttttcctccttcatctcctttgactccaggacagactggaatataagtagtgggtctgcatggatgtttcagggatcaaaggagccacctgggcgcctgagtgccaaccctcagggccacaggtgggtgtggtttgggcacgggtccaagtgactgtgacgggacccctgggcatggggccaggtctgtaacctgaagaagttgttttctgacaatcaccaaatcatccgaatgacatcaaaagcagcccttatctcagagaccgagatttctgtggtctcaacttcgctttggtataatttctggcactcaccagcctctatcattatgactttccccccagtgtattatttctctaataggtttccttttcacgttcttttagcacagactggcactttaccctctcaatttggaagttagcccctctcctctgttacttttcccttcacccaactacagctgtgatctagaacattcatagtcatatttctgctactactaccttcatttatcaagactttttatgagaataggtaaaccaagcaataacttcctaggactgaatcaccaccccagaagagcgagaggctcctttcatatgcctgaggccacaccccttaacctgttctgacaaaatagtggctggcccatgtaccagctccattcagaaattcaggaagagaaaagacagccctgttgtcacacaaaccggtgtgggggagggtggagcctggtctgcacggcagtcctggtggcccctgtggaggacaggcagggctggcagcatagcctttgttgccacacaaccggaatttgctcccccaggactgtgggagccagtgtcccagctgaaatctttttagtgtgtggctctgaatggcactcacattccattttggctcacatgaaactaactgaagccctttgttcaagcttcaggctcttaggcatggaaatgagaatgtgactgtggctgtcttacaggaaaattcttgtttgtccctgaatgagagcacagaggcattgaattcacagagctgcaaacttgcctgataaatgagggagtggcagtttatagataggtcatcttttttccttcctccaggtgtccttgcctttcttcccaaagtcattcatttctgatgagtatatgaatccccctcttgctagtaaggttctatttgggctaaaacaaggctgaatttttaaagagtatttgaatatattttagaatcaaattgaggctataaattgcatcaatctggacaattccattgcaggaataatatgttaaaaaccaatggggagaagcacccacatctctcctgtagcactccgtgtctcataagcaatttgaagacacttacaagtaactgattccagtcaaattaggattaactgactcaaaaaatggtgtcaagtttctttaatgtttttatgttagaagtgagtttaacagacttgaagaaaactgttatcttttcctgctgtgagtttacacaaatgattccagagcagaatgaaagcagaaagctgttggttacaatattcttttaacctctctgcagcattttacacttactgggaaccttatgattcaccgtaagagtggaaatatacctgagttcgtgtcctaatggtctctaattcacattggatcgtgggcaaatcacctcacctctctgagcctgttccctcctcttagaccatctctaagaccacttcatctatttacacatcatttgcttgaacattgctgaacatctgcgtgaacttggcctctccagcccttgcaggtggaaacagctgtgtcaaggctcaaggctcacgctgaggggacttggagggagggggcttctgcattaagctttcctggtgaagacccttgatcttgtccaaagccctgtgtctttgactggcttctcttcagagtccccgttgtcatcgtaagacccttgctgtttggagggtggtcttgtgactgtggcagctgctggccgctggaatgaggagcctatctccatcctccagtgtgactcaggcagagcattgagaattcccagggcagaaatccttcctgctcaggctttcattctaaaactacagtcttcattaaagctgaactttctgggtagctgagcttatatgcccggcatctgaatgagagctctctttgtaactgtgtgacttgagatctagtttgccagctcctgggaaacaatacatgtgttcttgtttgtgtttgctcagcaagcagatgtctgagatgtaagaagcttttcttttcctgtggcattgattctgacttagagctgaagtaaagatcactgaaacatcacgtcaagttgaagtcactcataggtctttgtcctttaggcaggacaggagagtcattaagaagcatttcactgtagcattctatcacaatatcatctggaattgttttctttgcccagaaagccttaacttgcctctagagaatccctggtattacaacgatattgcggcattagaattccaactcttctgctgtggaagtttgaagcgaagctgcagcaaaaccagagaatttcctcaagtggcctgtaggctccttgttatcttatgcccccacccctccctcaacaatatgagtgatccagaactggcccaaacacctcagctctggtccctttttgcccttcttggccttactctgttgttcaaagccactttggattgcttggatgcttcgaacagccatgaaaagtagcctgcctgtggcatttagaggccaagcaattgacagaaagggtttcttctacctctgttatctaagcagagggaagtaaacttctcaccgccccccacccctcactgcccccgattacactagaattgctttcgccaaattgtagttgaagctaaggaaggggaatctggcccctgctgggagagggaactggaatgccacacaaggcaaggcctgcttccttccttcccctctgctgctgctgcctcggaacgctgcagcccaggcttcctcccacagtggcccttggaagcaggccgcagagtagacagctgctccttttggaagagtcagtcccctgtgttttctgaactgtttttcctagcatgtatgtgggtagagctttcatgcatctctagtaataataagctgaaattagttttttttttaattctccaatttaaaacttttaattaaaaagtaaattttaatgtcgaaaatgcaaacttggggagggcagaaagatcacacacaaggctgtcacttcatacttgcaggattgcacagcagccgggcagaggcgctcctcacttcccagatggggcggcgggcagcagagacgcacctcacttcctagacagtgcggcagccaggcacaggcacacctcacttcccagacagttgggcggccaggcaagcgctcctcacttcccagatggggcggctcccgggaagcggggctcctcacttcccagacagggtggccaggcagaggtgctcctcacttcccagaacaattctttatgaatttgataaaggactgaagtgcaactgaaagctgctagtgatgatctggtaatatacaatttgtccagtagccagtttgtttttattgtgttttctaaccataagagatcattaaaggcaaagcctgtatgacgctgtacacacacaaaaaaatggtcaccgcaggccatactaccaatgaaatggtaggtaaacaaatcttctggtcaagagaaaaaaaaaagaaatagcactctgcatgctttgctctacaagatgaatttccctagaaagaatccaatgaaggccgggcatagtggctcactcctgtaatcccagcactttggaggccgaggcgggtagatcacctgaggttaggagttcaagaccagcctggccaacatggtgaaaccccttctctactaaaaatgcaaaaattagctgggtgtggtggcgggcgcctgtaatcccagctactcgggaggctgaggtgggagaattgcttgaacccaggagacggaggttgcagtgagccgagatcacgcctctgcactccagcctgggcaacaagagtgagactccgtctccaaaaaaagaaaaggaatccagtgaaaatggctgcaattacaacaagaagtgaaggaagaagactggtgacatctctgaaggatgcagttgaggttgatccaggtttatccgaatatgctacctttctgagccttaaaccttcatctctcaggtgttgattttcttctgatagcttcatcatttctccctgaagtcttttacactcttctgttagtttccttgtttcagtatcatgaagtgaagcactgtgtggttgtggcgtgggcccgtcttgcttagatgcattcagtgggacagctttgctgggttccatgtcattcaatttatcattttcattggggatctccatttggaatccattaattcatgaggttttgcctcattccacacagcttccatatctgaagtgtttagtggagcaaaaattgtaccataaacttgtgtttactcttttcattcggatcatagtcaaagggctgtagcattactgaaacagtcacagttgaccctgggtcaataattccactgttgggcctcacacagtaccggtgaggcacggtagtcttcactttgaaacacacttttctatccgatggatttcgcaatttaagatttgtagtgactacatctgtgaaggggcctttgaatttgaggtctatgggcgggtcgaggaccaggatctgctcgtgcttcgccgtggccccggaggcagacgccattggagagacagcgcagagcagggggcggcttgctcgctgggggcgggggacgatggcgagaggggagggggagcgagttcgcatctctccttttcctggttagactctgttcaaccacattcttatgttggcagatctgcttccagattgatttttagagcaccatcactttcacattcctgattctgattttgttttgttttgtttgggttttctgaaacttaaaatgctgccccgaaaatactatatttttgagtttgtgttctgaaagcctccgtgctgctggatctttggggggaaatacaggatccttcagcactgaggtgtttaagatttgcaactagcaatgcaattttttctaaatatggggatatttacctttattaagaaattatactaaacattgatgtccttgatcattttatgttctcatattacttttgattctactatgattgtgtggtggtgaacaaagatcattacaaacaaaaactgtaattttgttatatttgattcaatggaatttacctaaaaaataaagactaaaaatgtgg

SEQ ID NO: 324979 - DNA, 9436 bp, Homo sapiens
  misc_feature (66)..(66): n is a, c, g, or t
aagttataatttagtatgagaagtatttaaaggtaaataaattgtaaaaaacatagagataataanatagatatttttttattcaagagagccagcccactgttggcatttatcagagtttatttaatcttctcatcaactactattgttaccctcagttgccaagtgaagggagcatgcgggaaggttaagtgacttgcccaagcccacacaaccggtaggagccccaattccaggccctagttccaaggctacattcttccaggcggcctccaactgggttggttaagggttgaaaggacagtgggacaataactgaggcccgtattgcccagagcgtccccatcccccgtccggagctggaagaggccatagaccgctgcctccacatcttttcctctccttcgggttcggtgactcacgacccttcttcctctctcccgggatatgacctcaaatttcaccccttatccagtagcgtctgggtccctggactaaagccgtcaaatgtaaccaattgctgaggagctctcccctaagaatcccgcctccactctgaggaacagcttcgctgatcaatggatcccctcctagacgcaatgagcgcgcggggcaagtggagaagcggctgaactgcccaatgaacaagcggtttccgtggttaggggcgtggcagaagcggtcgtcaggggcgtggcggcagttacttgggcggggccggtagcggcgggagctgcactggccagggttccggctgtatatccatgagcgccgctggcagccggggagctgcaggaaccagactgggggcgagctgagcacctgtagtcaatcacacgcagaaataataatgatacttatgttagaagattgttttgagaagtgcatggagttactacatctgaagcatttagaacagtacctggcacagggaaaaaccagctctcacacctgctcctctgtaaagcgtcttccccaagcccacacgtaatttggtggctgtccttgaaagtatttcccaagatctccaaaccgctttaaacttccaaggtctgagcctgacctggcctcgctaacaaagggttccactgatgccgactctaagaagaaagttttcaagcttttaggtttgtttgaataagagatctgacctgaccggcccaactgtacaactcttcaaggaaaattcgtatttgcagtgggaagaataagtaacattgatcaagatgaatgccatgctggagactcccgaactcccagccgtgtttgatggagtgaagctggctgcagtggctgctgtgctgtacgtgatcgtccggtgtttgaacctgaagagccccacagccccacctgacctctacttccaggactcggggctctcacgctttctgctcaagtcctgtcctcttctgaccaaagaatacattccaccgttgatctgggggaaaagtggacacatccagacagccttgtatgggaagatgggaagggtgaggtcgccacatccttatgggcaccggaagttcatcactatgtctgatggagccacttctacattcgacctcttcgagcccttggctgagcactgtgttggagatgatatcaccatggtcatctgccctggaattgccaatcacagcgagaagcaatacatccgcactttcgttgactacgcccagaaaaatggctatcggtgcgccgtgctgaaccacctgggtgccctgcccaacattgaattgacctcgccacgcatgttcacctatggctgcacgtgggaatttggagccatggtgaactacatcaagaagacatatcccctgacccagctggtcgtcgtgggcttcagcctgggtggtaacattgtgtgcaaatacttgggggagactcaggcaaaccaagagaaggtcctgtgctgcgtcagcgtgtgccaggggtacagtgcactgagggcccaggaaaccttcatgcaatgggatcagtgccggcggttctacaacttcctcatggctgacaacatgaagaagatcatcctctcgcacaggcaagctctttttggagaccatgttaagaaaccccagagcctggaagacacggacttgagccggctctacacagcaacatccctgatgcagattgatgacaatgtgatgaggaagtttcacggctataactccctgaaggaatactatgaggaagaaagttgcatgcggtacctgcacaggatttatgttcctctcatgctggttaatgcagctgacgatccgttggtgcatgaaagtcttctaaccattccaaaatctctttcagagaaacgagagaacgtcatgtttgtgctgcctctgcatgggggccacttgggcttctttgagggctctgtgctgttccccgagcccctgacatggatggataagctggtggtggagtacgccaacgccatttgccaatgggagcgtaacaagttgcagtgctctgacacggagcaggtggaggccgacctggagtgaggcctccggactctggcacgctccagcagccctcctctggaagctgcgtcccctcaccccctgtttcaggtctcccatctccctcagtgacctggatctgacctcacaccatcagcagggggcacccaccatgcacacctgtctcggagtaggcagctcttcctgggagctccaggctatttttgtgcttagttactggttttctccattgcattgttaggcatggtgacaagtgacagagttcttgccctctgtccagtttcagcatctggttgcttttaagccaagtacatctagtttccctattaaaaatgtgtctgaatagcgattttgctttgccaccaaaaggcttttccctgagaacagtgaaggatgtatgtcattttgtggtggttgtatgtgtccttacatagaccttaaaaagagctcacccttccaggccaatgctgaagacacagctccgcttgggagcctgagaacccaggcttcccaggccagagtgtggcttcttaaacggcaaaggaaattcctttgagtcacaagccaagttttcgccctgtctcctgagaccatttccctacgctttgctgctgctgagagttacctgaggcacttgttaaaaattcagcctcccaggtccctcccctcggagaggctgattcactgggtctgggaaggagcctggggattttaatttttcacaagtgccccagatgattctcatcaccaagcaaattttggaaatgctgttcaacagcgcccttaaattggaaacatctttgcagctcgttttattgaaattcataatcaggggtgtcctctagctcccacggtctccagagcagcaaggccggctatggagctgccgtcgtgtgaccacagtgtgatgtctcagaagggctctgggtgggctgagcatctgggctgtgccctggctctgcttttcaccctggacaaagtcgctgtggacttcaatttcttcacctctaaaatgggggacttggaccaggtagattgctgagctcactaccaggttcaaagttcaatgacaaactcagtttactgaggtttgagagaacatccctccaggggagcctgggagctgctctcccagtctaagcatgtagatatcatcgtttgccttttgtgtgtgtgtgtcccttatttgataaaaagatgttttgagttgttttttttttaagcactcacttgtaattttagtttttaaacccaagtccctctaactttgcctttgataccaaacaattcaaaagttggatctgagtttggagaaagatatttccaacctaagtgggtattattttgaaaccagatttttaatttaatagcctatatttgtagtctgttggataggtgtttccaaagtgtgtcttctcaagtgaaaacgcaactctaggtttcaagtactccttttctccgatcctgtggtacttgaatatccaaaaaccctgcactttgaacaatcagctgttgctatctggaactaaacagaactatgagtaaaattgcctggatactttaaaaagatatttttcctccttcatctcctttgactccaggacagactggaatataagtagtgggtctgcatggatgtttcagggatcaaaggagccacctgggcgcctgagtgccaaccctcagggccacaggtgggtgtggtttgggcacgggtccaagtgactgtgacgggacccctgggcatggggccaggtctgtaacctgaagaagttgttttctgacaatcaccaaatcatccgaatgacatcaaaagcagcccttatctcagagaccgagatttctgtggtctcaacttcgctttggtataatttctggcactcaccagcctctatcattatgactttccccccagtgtattatttctctaataggtttccttttcacgttcttttagcacagactggcactttaccctctcaatttggaagttagcccctctcctctgttacttttcccttcacccaactacagctgtgatctagaacattcatagtcatatttctgctactactaccttcatttatcaagactttttatgagaataggtaaaccaagcaataacttcctaggactgaatcaccaccccagaagagcgagaggctcctttcatatgcctgaggccacaccccttaacctgttctgacaaaatagtggctggcccatgtaccagctccattcagaaattcaggaagagaaaagacagccctgttgtcacacaaaccggtgtgggggagggtggagcctggtctgcacggcagtcctggtggcccctgtggaggacaggcagggctggcagcatagcctttgttgccacacaaccggaatttgctcccccaggactgtgggagccagtgtcccagctgaaatctttttagtgtgtggctctgaatggcactcacattccattttggctcacatgaaactaactgaagccctttgttcaagcttcaggctcttaggcatggaaatgagaatgtgactgtggctgtcttacaggaaaattcttgtttgtccctgaatgagagcacagaggcattgaattcacagagctgcaaacttgcctgataaatgagggagtggcagtttatagataggtcatcttttttccttcctccaggtgtccttgcctttcttcccaaagtcattcatttctgatgagtatatgaatccccctcttgctagtaaggttctatttgggctaaaacaaggctgaatttttaaagagtatttgaatatattttagaatcaaattgaggctataaattgcatcaatctggacaattccattgcaggaataatatgttaaaaaccaatggggagaagcacccacatctctcctgtagcactccgtgtctcataagcaatttgaagacacttacaagtaactgattccagtcaaattaggattaactgactcaaaaaatggtgtcaagtttctttaatgtttttatgttagaagtgagtttaacagacttgaagaaaactgttatcttttcctgctgtgagtttacacaaatgattccagagcagaatgaaagcagaaagctgttggttacaatattcttttaacctctctgcagcattttacacttactgggaaccttatgattcaccgtaagagtggaaatatacctgagttcgtgtcctaatggtctctaattcacattggatcgtgggcaaatcacctcacctctctgagcctgttccctcctcttagaccatctctaagaccacttcatctatttacacatcatttgcttgaacattgctgaacatctgcgtgaacttggcctctccagcccttgcaggtggaaacagctgtgtcaaggctcaaggctcacgctgaggggacttggagggagggggcttctgcattaagctttcctggtgaagacccttgatcttgtccaaagccctgtgtctttgactggcttctcttcagagtccccgttgtcatcgtaagacccttgctgtttggagggtggtcttgtgactgtggcagctgctggccgctggaatgaggagcctatctccatcctccagtgtgactcaggcagagcattgagaattcccagggcagaaatccttcctgctcaggctttcattctaaaactacagtcttcattaaagctgaactttctgggtagctgagcttatatgcccggcatctgaatgagagctctctttgtaactgtgtgacttgagatctagtttgccagctcctgggaaacaatacatgtgttcttgtttgtgtttgctcagcaagcagatgtctgagatgtaagaagcttttcttttcctgtggcattgattctgacttagagctgaagtaaagatcactgaaacatcacgtcaagttgaagtcactcataggtctttgtcctttaggcaggacaggagagtcattaagaagcatttcactgtagcattctatcacaatatcatctggaattgttttctttgcccagaaagccttaacttgcctctagagaatccctggtattacaacgatattgcggcattagaattccaactcttctgctgtggaagtttgaagcgaagctgcagcaaaaccagagaatttcctcaagtggcctgtaggctccttgttatcttatgcccccacccctccctcaacaatatgagtgatccagaactggcccaaacacctcagctctggtccctttttgcccttcttggccttactctgttgttcaaagccactttggattgcttggatgcttcgaacagccatgaaaagtagcctgcctgtggcatttagaggccaagcaattgacagaaagggtttcttctacctctgttatctaagcagagggaagtaaacttctcaccgccccccacccctcactgcccccgattacactagaattgctttcgccaaattgtagttgaagctaaggaaggggaatctggcccctgctgggagagggaactggaatgccacacaaggcaaggcctgcttccttccttcccctctgctgctgctgcctcggaacgctgcagcccaggcttcctcccacagtggcccttggaagcaggccgcagagtagacagctgctccttttggaagagtcagtcccctgtgttttctgaactgtttttcctagcatgtatgtgggtagagctttcatgcatctctagtaataataagctgaaattagttttttttttaattctccaatttaaaacttttaattaaaaagtaaattttaatgtcgaaaatgcaaacttggggagggcagaaagatcacacacaaggctgtcacttcatacttgcaggattgcacagcagccgggcagaggcgctcctcacttcccagatggggcggcgggcagcagagacgcacctcacttcctagacagtgcggcagccaggcacaggcacacctcacttcccagacagttgggcggccaggcaagcgctcctcacttcccagatggggcggctcccgggaagcggggctcctcacttcccagacagggtggccaggcagaggtgctcctcacttcccagaacaattctttatgaatttgataaaggactgaagtgcaactgaaagctgctagtgatgatctggtaatatacaatttgtccagtagccagtttgtttttattgtgttttctaaccataagagatcattaaaggcaaagcctgtatgacgctgtacacacacaaaaaaatggtcaccgcaggccatactaccaatgaaatggtaggtaaacaaatcttctggtcaagagaaaaaaaaaagaaatagcactctgcatgctttgctctacaagatgaatttccctagaaagaatccaatgaaggccgggcatagtggctcactcctgtaatcccagcactttggaggccgaggcgggtagatcacctgaggttaggagttcaagaccagcctggccaacatggtgaaaccccttctctactaaaaatgcaaaaattagctgggtgtggtggcgggcgcctgtaatcccagctactcgggaggctgaggtgggagaattgcttgaacccaggagacggaggttgcagtgagccgagatcacgcctctgcactccagcctgggcaacaagagtgagactccgtctccaaaaaaagaaaaggaatccagtgaaaatggctgcaattacaacaagaagtgaaggaagaagactggtgacatctctgaaggatgcagttgaggttgatccaggtttatccgaatatgctacctttctgagccttaaaccttcatctctcaggtgttgattttcttctgatagcttcatcatttctccctgaagtcttttacactcttctgttagtttccttgtttcagtatcatgaagtgaagcactgtgtggttgtggcgtgggcccgtcttgcttagatgcattcagtgggacagctttgctgggttccatgtcattcaatttatcattttcattggggatctccatttggaatccattaattcatgaggttttgcctcattccacacagcttccatatctgaagtgtttagtggagcaaaaattgtaccataaacttgtgtttactcttttcattcggatcatagtcaaagggctgtagcattactgaaacagtcacagttgaccctgggtcaataattccactgttgggcctcacacagtaccggtgaggcacggtagtcttcactttgaaacacacttttctatccgatggatttcgcaatttaagatttgtagtgactacatctgtgaaggggcctttgaatttgaggtctatgggcgggtcgaggaccaggatctgctcgtgcttcgccgtggccccggaggcagacgccattggagagacagcgcagagcagggggcggcttgctcgctgggggcgggggacgatggcgagaggggagggggagcgagttcgcatctctccttttcctggttagactctgttcaaccacattcttatgttggcagatctgcttccagattgatttttagagcaccatcactttcacattcctgattctgattttgttttgttttgtttgggttttctgaaacttaaaatgctgccccgaaaatactatatttttgagtttgtgttctgaaagcctccgtgctgctggatctttggggggaaatacaggatccttcagcactgaggtgtttaagatttgcaactagcaatgcaattttttctaaatatggggatatttacctttattaagaaattatactaaacattgatgtccttgatcattttatgttctcatattacttttgattctactatgattgtgtggtggtgaacaaagatcattacaaacaaaaactgtaattttgttatatttgattcaatggaatttacctaaaaaataaagactaaaaatgtgg

SEQ ID NO: 324980 - DNA, 8718 bp, Homo sapiens
  misc_feature (66)..(66): n is a, c, g, or t
aagttataatttagtatgagaagtatttaaaggtaaataaattgtaaaaaacatagagataataanatagatatttttttattcaagagagccagcccactgttggcatttatcagagtttatttaatcttctcatcaactactattgttaccctcagttgccaagtgaagggagcatgcgggaaggttaagtgacttgcccaagcccacacaaccggtaggagccccaattccaggccctagttccaaggctacattcttccaggcggcctccaactgggttggttaagggttgaaaggacagtgggacaataactgaggcccgtattgcccagagcgtccccatcccccgtccggagctggaagaggccatagaccgctgcctccacatcttttcctctccttcgggttcggtgactcacgacccttcttcctctctcccgggatatgacctcaaatttcaccccttatccagtagcgtctgggtccctggactaaagccgtcaaatgtaaccaattgctgaggagctctcccctaagaatcccgcctccactctgaggaacagcttcgctgatcaatggatcccctcctagacgcaatgagcgcgcggggcaagtggagaagcggctgaactgcccaatgaacaagcggtttccgtggttaggggcgtggcagaagcggtcgtcaggggcgtggcggcagttacttgggcggggccggtagcggcgggagctgcactggccagggttccggctgtatatccatgagcgccgctggcagccggggagctgcaggaaccagactgggggcgagctgagcacctgtagtcaatcacacgcagcttttaggtttgtttgaataagagatctgacctgaccggcccaactgtacaactcttcaaggaaaattcgtatttgcagtgggaagaataagtaacattgatcaagatgaatgccatgctggagactcccgaactcccagccgtgtttgatggagtgaagctggctgcagtggctgctgtgctgtacgtgatcgtccggtgtttgaacctgaagagccccacagccccacctgacctctacttccaggactcggggctctcacgctttctgctcaagtcctgtcctcttctgaccaaagaatacattccaccgttgatctgggggaaaagtggacacatccagacagccttgtatgggaagatgggaagggtgaggtcgccacatccttatgggcaccggaagttcatcactatgtctgatggagccacttctacattcgacctcttcgagcccttggctgagcactgtgttggagatgatatcaccatggtcatctgccctggaattgccaatcacagcgagaagcaatacatccgcactttcgttgactacgcccagaaaaatggctatcggtgcgccgtgctgaaccacctgggtgccctgcccaacattgaattgacctcgccacgcatgttcacctatggctgcacgtgggaatttggagccatggtgaactacatcaagaagacatatcccctgacccagctggtcgtcgtgggcttcagcctgggtggtaacattgtgtgcaaatacttgggggagactcaggcaaaccaagagaaggtcctgtgctgcgtcagcgtgtgccaggggtacagtgcactgagggcccaggaaaccttcatgcaatgggatcagtgccggcggttctacaacttcctcatggctgacaacatgaagaagatcatcctctcgcacaggcaagctctttttggagaccatgttaagaaaccccagagcctggaagacacggacttgagccggctctacacagcaacatccctgatgcagattgatgacaatgtgatgaggaagtttcacggctataactccctgaaggaatactatgaggaagaaagttgcatgcggtacctgcacaggatttatgttcctctcatgctggttaatgcagctgacgatccgttggtgcatgaaagtcttctaaccattccaaaatctctttcagagaaacgagagaacgtcatgtttgtgctgcctctgcatgggggccacttgggcttctttgagggctctgtgctgttccccgagcccctgacatggatggataagctggtggtggagtacgccaacgccatttgccaatgggagcgtaacaagttgcagtgctctgacacggagcaggtggaggccgacctggagtgaggcctccggactctggcacgctccagcagccctcctctggaagctgcgtcccctcaccccctgtttcaggtctcccatctccctcagtgacctggatctgacctcacaccatcagcagggggcacccaccatgcacacctgtctcggagtaggcagctcttcctgggagctccaggctatttttgtgcttagttactggttttctccattgcattgttaggcatggtgacaagtgacagagttcttgccctctgtccagtttcagcatctggttgcttttaagccaagtacatctagtttccctattaaaaatgtgtctgaatagcgattttgctttgccaccaaaaggcttttccctgagaacagtgaaggatgtatgtcattttgtggtggttgtatgtgtccttacatagaccttaaaaagagctcacccttccaggccaatgctgaagacacagctccgcttgggagcctgagaacccaggcttcccaggccagagtgtggcttcttaaacggcaaaggaaattcctttgagtcacaagccaagttttcgccctgtctcctgagaccatttccctacgctttgctgctgctgagagttacctgaggcacttgttaaaaattcagcctcccaggtccctcccctcggagaggctgattcactgggtctgggaaggagcctggggattttaatttttcacaagtgccccagatgattctcatcaccaagcaaattttggaaatgctgttcaacagcgcccttaaattggaaacatctttgcagctcgttttattgaaattcataatcaggggtgtcctctagctcccacggtctccagagcagcaaggccggctatggagctgccgtcgtgtgaccacagtgtgatgtctcagaagggctctgggtgggctgagcatctgggctgtgccctggctctgcttttcaccctggacaaagtcgctgtggacttcaatttcttcacctctaaaatgggggacttggaccaggtagattgctgagctcactaccaggttcaaagttcaatgacaaactcagtttactgaggtttgagagaacatccctccaggggagcctgggagctgctctcccagtctaagcatgtagatatcatcgtttgccttttgtgtgtgtgtgtcccttatttgataaaaagatgttttgagttgttttttttttaagcactcacttgtaattttagtttttaaacccaagtccctctaactttgcctttgataccaaacaattcaaaagttggatctgagtttggagaaagatatttccaacctaagtgggtattattttgaaaccagatttttaatttaatagcctatatttgtagtctgttggataggtgtttccaaagtgtgtcttctcaagtgaaaacgcaactctaggtttcaagtactccttttctccgatcctgtggtacttgaatatccaaaaaccctgcactttgaacaatcagctgttgctatctggaactaaacagaactatgagtaaaattgcctggatactttaaaaagatatttttcctccttcatctcctttgactccaggacagactggaatataagtagtgggtctgcatggatgtttcagggatcaaaggagccacctgggcgcctgagtgccaaccctcagggccacaggtgggtgtggtttgggcacgggtccaagtgactgtgacgggacccctgggcatggggccaggtctgtaacctgaagaagttgttttctgacaatcaccaaatcatccgaatgacatcaaaagcagcccttatctcagagaccgagatttctgtggtctcaacttcgctttggtataatttctggcactcaccagcctctatcattatgactttccccccagtgtattatttctctaataggtttccttttcacgttcttttagcacagactggcactttaccctctcaatttggaagttagcccctctcctctgttacttttcccttcacccaactacagctgtgatctagaacattcatagtcatatttctgctactactaccttcatttatcaagactttttatgagaataggtaaaccaagcaataacttcctaggactgaatcaccaccccagaagagcgagaggctcctttcatatgcctgaggccacaccccttaacctgttctgacaaaatagtggctggcccatgtaccagctccattcagaaattcaggaagagaaaagacagccctgttgtcacacaaaccggtgtgggggagggtggagcctggtctgcacggcagtcctggtggcccctgtggaggacaggcagggctggcagcatagcctttgttgccacacaaccggaatttgctcccccaggactgtgggagccagtgtcccagctgaaatctttttagtgtgtggctctgaatggcactcacattccattttggctcacatgaaactaactgaagccctttgttcaagcttcaggctcttaggcatggaaatgagaatgtgactgtggctgtcttacaggaaaattcttgtttgtccctgaatgagagcacagaggcattgaattcacagagctgcaaacttgcctgataaatgagggagtggcagtttatagataggtcatcttttttccttcctccaggtgtccttgcctttcttcccaaagtcattcatttctgatgagtatatgaatccccctcttgctagtaaggttctatttgggctaaaacaaggctgaatttttaaagagtatttgaatatattttagaatcaaattgaggctataaattgcatcaatctggacaattccattgcaggaataatatgttaaaaaccaatggggagaagcacccacatctctcctgtagcactccgtgtctcataagcaatttgaagacacttacaagtaactgattccagtcaaattaggattaactgactcaaaaaatggtgtcaagtttctttaatgtttttatgttagaagtgagtttaacagacttgaagaaaactgttatcttttcctgctgtgagtttacacaaatgattccagagcagaatgaaagcagaaagctgttggttacaatattcttttaacctctctgcagcattttacacttactgggaaccttatgattcaccgtaagagtggaaatatacctgagttcgtgtcctaatggtctctaattcacattggatcgtgggcaaatcacctcacctctctgagcctgttccctcctcttagaccatctctaagaccacttcatctatttacacatcatttgcttgaacattgctgaacatctgcgtgaacttggcctctccagcccttgcaggtggaaacagctgtgtcaaggctcaaggctcacgctgaggggacttggagggagggggcttctgcattaagctttcctggtgaagacccttgatcttgtccaaagccctgtgtctttgactggcttctcttcagagtccccgttgtcatcgtaagacccttgctgtttggagggtggtcttgtgactgtggcagctgctggccgctggaatgaggagcctatctccatcctccagtgtgactcaggcagagcattgagaattcccagggcagaaatccttcctgctcaggctttcattctaaaactacagtcttcattaaagctgaactttctgggtagctgagcttatatgcccggcatctgaatgagagctctctttgtaactgtgtgacttgagatctagtttgccagctcctgggaaacaatacatgtgttcttgtttgtgtttgctcagcaagcagatgtctgagatgtaagaagcttttcttttcctgtggcattgattctgacttagagctgaagtaaagatcactgaaacatcacgtcaagttgaagtcactcataggtctttgtcctttaggcaggacaggagagtcattaagaagcatttcactgtagcattctatcacaatatcatctggaattgttttctttgcccagaaagccttaacttgcctctagagaatccctggtattacaacgatattgcggcattagaattccaactcttctgctgtggaagtttgaagcgaagctgcagcaaaaccagagaatttcctcaagtggcctgtaggctccttgttatcttatgcccccacccctccctcaacaatatgagtgatccagaactggcccaaacacctcagctctggtccctttttgcccttcttggccttactctgttgttcaaagccactttggattgcttggatgcttcgaacagccatgaaaagtagcctgcctgtggcatttagaggccaagcaattgacagaaagggtttcttctacctctgttatctaagcagagggaagtaaacttctcaccgccccccacccctcactgcccccgattacactagaattgctttcgccaaattgtagttgaagctaaggaaggggaatctggcccctgctgggagagggaactggaatgccacacaaggcaaggcctgcttccttccttcccctctgctgctgctgcctcggaacgctgcagcccaggcttcctcccacagtggcccttggaagcaggccgcagagtagacagctgctccttttggaagagtcagtcccctgtgttttctgaactgtttttcctagcatgtatgtgggtagagctttcatgcatctctagtaataataagctgaaattagttttttttttaattctccaatttaaaacttttaattaaaaagtaaattttaatgtcgaaaatgcaaacttggggagggcagaaagatcacacacaaggctgtcacttcatacttgcaggattgcacagcagccgggcagaggcgctcctcacttcccagatggggcggcgggcagcagagacgcacctcacttcctagacagtgcggcagccaggcacaggcacacctcacttcccagacagttgggcggccaggcaagcgctcctcacttcccagatggggcggctcccgggaagcggggctcctcacttcccagacagggtggccaggcagaggtgctcctcacttcccagaacaattctttatgaatttgataaaggactgaagtgcaactgaaagctgctagtgatgatctggtaatatacaatttgtccagtagccagtttgtttttattgtgttttctaaccataagagatcattaaaggcaaagcctgtatgacgctgtacacacacaaaaaaatggtcaccgcaggccatactaccaatgaaatggtaggtaaacaaatcttctggtcaagagaaaaaaaaaagaaatagcactctgcatgctttgctctacaagatgaatttccctagaaagaatccaatgaaggccgggcatagtggctcactcctgtaatcccagcactttggaggccgaggcgggtagatcacctgaggttaggagttcaagaccagcctggccaacatggtgaaaccccttctctactaaaaatgcaaaaattagctgggtgtggtggcgggcgcctgtaatcccagctactcgggaggctgaggtgggagaattgcttgaacccaggagacggaggttgcagtgagccgagatcacgcctctgcactccagcctgggcaacaagagtgagactccgtctccaaaaaaagaaaaggaatccagtgaaaatggctgcaattacaacaagaagtgaaggaagaagactggtgacatctctgaaggatgcagttgaggttgatccaggtttatccgaatatgctacctttctgagccttaaaccttcatctctcaggtgttgattttcttctgatagcttcatcatttctccctgaagtcttttacactcttctgttagtttccttgtttcagtatcatgaagtgaagcactgtgtggttgtggcgtgggcccgtcttgcttagatgcattcagtgggacagctttgctgggttccatgtcattcaatttatcattttcattggggatctccatttggaatccattaattcatgaggttttgcctcattccacacagcttccatatctgaagtgtttagtggagcaaaaattgtaccataaacttgtgtttactcttttcattcggatcatagtcaaagggctgtagcattactgaaacagtcacagttgaccctgggtcaataattccactgttgggcctcacacagtaccggtgaggcacggtagtcttcactttgaaacacacttttctatccgatggatttcgcaatttaagatttgcaactagcaatgcaattttttctaaatatggggatatttacctttattaagaaattatactaaacattgatgtccttgatcattttatgttctcatattacttttgattctactatgattgtgtggtggtgaacaaagatcattacaaacaaaaactgtaattttgttatatttgattcaatggaatttacctaaaaaataaagactaaaaatgtgg

SEQ ID NO: 324981 - DNA, 7243 bp, Homo sapiens
  misc_feature (27)..(27): n is a, c, g, or t
tgcgcccaatgccgacatacaccatgntcacctatggctgcacgtgggaatttggagccatggtgaactacatcaagaagacatatcccctgacccagctggtcgtcgtgggcttcagcctgggtggtaacattgtgtgcaaatacttgggggagactcaggcaaaccaagagaagggctctgtgctgttccccgagcccctgacatggatggataagctggtggtggagtacgccaacgccatttgccaatgggagcgtaacaagttgcagtgctctgacacggagcaggtggaggccgacctggagtgaggcctccggactctggcacgctccagcagccctcctctggaagctgcgtcccctcaccccctgtttcaggtctcccatctccctcagtgacctggatctgacctcacaccatcagcagggggcacccaccatgcacacctgtctcggagtaggcagctcttcctgggagctccaggctatttttgtgcttagttactggttttctccattgcattgttaggcatggtgacaagtgacagagttcttgccctctgtccagtttcagcatctggttgcttttaagccaagtacatctagtttccctattaaaaatgtgtctgaatagcgattttgctttgccaccaaaaggcttttccctgagaacagtgaaggatgtatgtcattttgtggtggttgtatgtgtccttacatagaccttaaaaagagctcacccttccaggccaatgctgaagacacagctccgcttgggagcctgagaacccaggcttcccaggccagagtgtggcttcttaaacggcaaaggaaattcctttgagtcacaagccaagttttcgccctgtctcctgagaccatttccctacgctttgctgctgctgagagttacctgaggcacttgttaaaaattcagcctcccaggtccctcccctcggagaggctgattcactgggtctgggaaggagcctggggattttaatttttcacaagtgccccagatgattctcatcaccaagcaaattttggaaatgctgttcaacagcgcccttaaattggaaacatctttgcagctcgttttattgaaattcataatcaggggtgtcctctagctcccacggtctccagagcagcaaggccggctatggagctgccgtcgtgtgaccacagtgtgatgtctcagaagggctctgggtgggctgagcatctgggctgtgccctggctctgcttttcaccctggacaaagtcgctgtggacttcaatttcttcacctctaaaatgggggacttggaccaggtagattgctgagctcactaccaggttcaaagttcaatgacaaactcagtttactgaggtttgagagaacatccctccaggggagcctgggagctgctctcccagtctaagcatgtagatatcatcgtttgccttttgtgtgtgtgtgtcccttatttgataaaaagatgttttgagttgttttttttttaagcactcacttgtaattttagtttttaaacccaagtccctctaactttgcctttgataccaaacaattcaaaagttggatctgagtttggagaaagatatttccaacctaagtgggtattattttgaaaccagatttttaatttaatagcctatatttgtagtctgttggataggtgtttccaaagtgtgtcttctcaagtgaaaacgcaactctaggtttcaagtactccttttctccgatcctgtggtacttgaatatccaaaaaccctgcactttgaacaatcagctgttgctatctggaactaaacagaactatgagtaaaattgcctggatactttaaaaagatatttttcctccttcatctcctttgactccaggacagactggaatataagtagtgggtctgcatggatgtttcagggatcaaaggagccacctgggcgcctgagtgccaaccctcagggccacaggtgggtgtggtttgggcacgggtccaagtgactgtgacgggacccctgggcatggggccaggtctgtaacctgaagaagttgttttctgacaatcaccaaatcatccgaatgacatcaaaagcagcccttatctcagagaccgagatttctgtggtctcaacttcgctttggtataatttctggcactcaccagcctctatcattatgactttccccccagtgtattatttctctaataggtttccttttcacgttcttttagcacagactggcactttaccctctcaatttggaagttagcccctctcctctgttacttttcccttcacccaactacagctgtgatctagaacattcatagtcatatttctgctactactaccttcatttatcaagactttttatgagaataggtaaaccaagcaataacttcctaggactgaatcaccaccccagaagagcgagaggctcctttcatatgcctgaggccacaccccttaacctgttctgacaaaatagtggctggcccatgtaccagctccattcagaaattcaggaagagaaaagacagccctgttgtcacacaaaccggtgtgggggagggtggagcctggtctgcacggcagtcctggtggcccctgtggaggacaggcagggctggcagcatagcctttgttgccacacaaccggaatttgctcccccaggactgtgggagccagtgtcccagctgaaatctttttagtgtgtggctctgaatggcactcacattccattttggctcacatgaaactaactgaagccctttgttcaagcttcaggctcttaggcatggaaatgagaatgtgactgtggctgtcttacaggaaaattcttgtttgtccctgaatgagagcacagaggcattgaattcacagagctgcaaacttgcctgataaatgagggagtggcagtttatagataggtcatcttttttccttcctccaggtgtccttgcctttcttcccaaagtcattcatttctgatgagtatatgaatccccctcttgctagtaaggttctatttgggctaaaacaaggctgaatttttaaagagtatttgaatatattttagaatcaaattgaggctataaattgcatcaatctggacaattccattgcaggaataatatgttaaaaaccaatggggagaagcacccacatctctcctgtagcactccgtgtctcataagcaatttgaagacacttacaagtaactgattccagtcaaattaggattaactgactcaaaaaatggtgtcaagtttctttaatgtttttatgttagaagtgagtttaacagacttgaagaaaactgttatcttttcctgctgtgagtttacacaaatgattccagagcagaatgaaagcagaaagctgttggttacaatattcttttaacctctctgcagcattttacacttactgggaaccttatgattcaccgtaagagtggaaatatacctgagttcgtgtcctaatggtctctaattcacattggatcgtgggcaaatcacctcacctctctgagcctgttccctcctcttagaccatctctaagaccacttcatctatttacacatcatttgcttgaacattgctgaacatctgcgtgaacttggcctctccagcccttgcaggtggaaacagctgtgtcaaggctcaaggctcacgctgaggggacttggagggagggggcttctgcattaagctttcctggtgaagacccttgatcttgtccaaagccctgtgtctttgactggcttctcttcagagtccccgttgtcatcgtaagacccttgctgtttggagggtggtcttgtgactgtggcagctgctggccgctggaatgaggagcctatctccatcctccagtgtgactcaggcagagcattgagaattcccagggcagaaatccttcctgctcaggctttcattctaaaactacagtcttcattaaagctgaactttctgggtagctgagcttatatgcccggcatctgaatgagagctctctttgtaactgtgtgacttgagatctagtttgccagctcctgggaaacaatacatgtgttcttgtttgtgtttgctcagcaagcagatgtctgagatgtaagaagcttttcttttcctgtggcattgattctgacttagagctgaagtaaagatcactgaaacatcacgtcaagttgaagtcactcataggtctttgtcctttaggcaggacaggagagtcattaagaagcatttcactgtagcattctatcacaatatcatctggaattgttttctttgcccagaaagccttaacttgcctctagagaatccctggtattacaacgatattgcggcattagaattccaactcttctgctgtggaagtttgaagcgaagctgcagcaaaaccagagaatttcctcaagtggcctgtaggctccttgttatcttatgcccccacccctccctcaacaatatgagtgatccagaactggcccaaacacctcagctctggtccctttttgcccttcttggccttactctgttgttcaaagccactttggattgcttggatgcttcgaacagccatgaaaagtagcctgcctgtggcatttagaggccaagcaattgacagaaagggtttcttctacctctgttatctaagcagagggaagtaaacttctcaccgccccccacccctcactgcccccgattacactagaattgctttcgccaaattgtagttgaagctaaggaaggggaatctggcccctgctgggagagggaactggaatgccacacaaggcaaggcctgcttccttccttcccctctgctgctgctgcctcggaacgctgcagcccaggcttcctcccacagtggcccttggaagcaggccgcagagtagacagctgctccttttggaagagtcagtcccctgtgttttctgaactgtttttcctagcatgtatgtgggtagagctttcatgcatctctagtaataataagctgaaattagttttttttttaattctccaatttaaaacttttaattaaaaagtaaattttaatgtcgaaaatgcaaacttggggagggcagaaagatcacacacaaggctgtcacttcatacttgcaggattgcacagcagccgggcagaggcgctcctcacttcccagatggggcggcgggcagcagagacgcacctcacttcctagacagtgcggcagccaggcacaggcacacctcacttcccagacagttgggcggccaggcaagcgctcctcacttcccagatggggcggctcccgggaagcggggctcctcacttcccagacagggtggccaggcagaggtgctcctcacttcccagaacaattctttatgaatttgataaaggactgaagtgcaactgaaagctgctagtgatgatctggtaatatacaatttgtccagtagccagtttgtttttattgtgttttctaaccataagagatcattaaaggcaaagcctgtatgacgctgtacacacacaaaaaaatggtcaccgcaggccatactaccaatgaaatggtaggtaaacaaatcttctggtcaagagaaaaaaaaaagaaatagcactctgcatgctttgctctacaagatgaatttccctagaaagaatccaatgaaggccgggcatagtggctcactcctgtaatcccagcactttggaggccgaggcgggtagatcacctgaggttaggagttcaagaccagcctggccaacatggtgaaaccccttctctactaaaaatgcaaaaattagctgggtgtggtggcgggcgcctgtaatcccagctactcgggaggctgaggtgggagaattgcttgaacccaggagacggaggttgcagtgagccgagatcacgcctctgcactccagcctgggcaacaagagtgagactccgtctccaaaaaaagaaaaggaatccagtgaaaatggctgcaattacaacaagaagtgaaggaagaagactggtgacatctctgaaggatgcagttgaggttgatccaggtttatccgaatatgctacctttctgagccttaaaccttcatctctcaggtgttgattttcttctgatagcttcatcatttctccctgaagtcttttacactcttctgttagtttccttgtttcagtatcatgaagtgaagcactgtgtggttgtggcgtgggcccgtcttgcttagatgcattcagtgggacagctttgctgggttccatgtcattcaatttatcattttcattggggatctccatttggaatccattaattcatgaggttttgcctcattccacacagcttccatatctgaagtgtttagtggagcaaaaattgtaccataaacttgtgtttactcttttcattcggatcatagtcaaagggctgtagcattactgaaacagtcacagttgaccctgggtcaataattccactgttgggcctcacacagtaccggtgaggcacggtagtcttcactttgaaacacacttttctatccgatggatttcgcaatttaagatttgtagtgactacatctgtgaaggggcctttgaatttgaggtctatgggcgggtcgaggaccaggatctgctcgtgcttcgccgtggccccggaggcagacgccattggagagacagcgcagagcagggggcggcttgctcgctgggggcgggggacgatggcgagaggggagggggagcgagttcgcatctctccttttcctggttagactctgttcaaccacattcttatgttggcagatctgcttccagattgatttttagagcaccatcactttcacattcctgattctgattttgttttgttttgtttgggttttctgaaacttaaaatgctgccccgaaaatactatatttttgagtttgtgttctgaaagcctccgtgctgctggatctttggggggaaatacaggatccttcagcactgaggtgtttaagatttgcaactagcaatgcaattttttctaaatatggggatatttacctttattaagaaattatactaaacattgatgtccttgatcattttatgttctcatattacttttgattctactatgattgtgtggtggtgaacaaagatcattacaaacaaaaactgtaattttgttatatttgattcaatggaatttacctaaaaaataaagactaaaaatgtgg

SEQ ID NO: 324982 - DNA, 3007 bp, Homo sapiens
  misc_feature (66)..(66): n is a, c, g, or t
aagttataatttagtatgagaagtatttaaaggtaaataaattgtaaaaaacatagagataataanatagatatttttttattcaagagagccagcccactgttggcatttatcagagtttatttaatcttctcatcaactactattgttaccctcagttgccaagtgaagggagcatgcgggaaggttaagtgacttgcccaagcccacacaaccggtaggagccccaattccaggccctagttccaaggctacattcttccaggcggcctccaactgggttggttaagggttgaaaggacagtgggacaataactgaggcccgtattgcccagagcgtccccatcccccgtccggagctggaagaggccatagaccgctgcctccacatcttttcctctccttcgggttcggtgactcacgacccttcttcctctctcccgggatatgacctcaaatttcaccccttatccagtagcgtctgggtccctggactaaagccgtcaaatgtaaccaattgctgaggagctctcccctaagaatcccgcctccactctgaggaacagcttcgctgatcaatggatcccctcctagacgcaatgagcgcgcggggcaagtggagaagcggctgaactgcccaatgaacaagcggtttccgtggttaggggcgtggcagaagcggtcgtcaggggcgtggcggcagttacttgggcggggccggtagcggcgggagctgcactggccagggttccggctgtatatccatgagcgccgctggcagccggggagctgcaggaaccagactgggggcgagctgagcacctgtagtcaatcacacgcagcttttaggtttgtttgaataagagatctgacctgaccggcccaactgtacaactcttcaaggaaaattcgtatttgcagtgggaagaataagtaacattgatcaagatgaatgccatgctggagactcccgaactcccagccgtgtttgatggagtgaatgcggcagccaggcacaggcacacctcacttcccagacagttgggcggccaggcaagcgctcctcacttcccagatggggcggctcccgggaagcggggctcctcacttcccagacagggtggccaggcagaggtgctcctcacttcccagaacaattctttatgaatttgataaaggactgaagtgcaactgaaagctgctagtgatgatctggtaatatacaatttgtccagtagccagtttgtttttattgtgttttctaaccataagagatcattaaaggcaaagcctgtatgacgctgtacacacacaaaaaaatggtcaccgcaggccatactaccaatgaaatggtaggtaaacaaatcttctggtcaagagaaaaaaaaaagaaatagcactctgcatgctttgctctacaagatgaatttccctagaaagaatccaatgaaggccgggcatagtggctcactcctgtaatcccagcactttggaggccgaggcgggtagatcacctgaggttaggagttcaagaccagcctggccaacatggtgaaaccccttctctactaaaaatgcaaaaattagctgggtgtggtggcgggcgcctgtaatcccagctactcgggaggctgaggtgggagaattgcttgaacccaggagacggaggttgcagtgagccgagatcacgcctctgcactccagcctgggcaacaagagtgagactccgtctccaaaaaaagaaaaggaatccagtgaaaatggctgcaattacaacaagaagtgaaggaagaagactggtgacatctctgaaggatgcagttgaggttgatccaggtttatccgaatatgctacctttctgagccttaaaccttcatctctcaggtgttgattttcttctgatagcttcatcatttctccctgaagtcttttacactcttctgttagtttccttgtttcagtatcatgaagtgaagcactgtgtggttgtggcgtgggcccgtcttgcttagatgcattcagtgggacagctttgctgggttccatgtcattcaatttatcattttcattggggatctccatttggaatccattaattcatgaggttttgcctcattccacacagcttccatatctgaagtgtttagtggagcaaaaattgtaccataaacttgtgtttactcttttcattcggatcatagtcaaagggctgtagcattactgaaacagtcacagttgaccctgggtcaataattccactgttgggcctcacacagtaccggtgaggcacggtagtcttcactttgaaacacacttttctatccgatggatttcgcaatttaagatttgtagtgactacatctgtgaaggggcctttgaatttgaggtctatgggcgggtcgaggaccaggatctgctcgtgcttcgccgtggccccggaggcagacgccattggagagacagcgcagagcagggggcggcttgctcgctgggggcgggggacgatggcgagaggggagggggagcgagttcgcatctctccttttcctggttagactctgttcaaccacattcttatgttggcagatctgcttccagattgatttttagagcaccatcactttcacattcctgattctgattttgttttgttttgtttgggttttctgaaacttaaaatgctgccccgaaaatactatatttttgagtttgtgttctgaaagcctccgtgctgctggatctttggggggaaatacaggatccttcagcactgaggtgtttaagatttgcaactagcaatgcaattttttctaaatatggggatatttacctttattaagaaattatactaaacattgatgtccttgatcattttatgttctcatattacttttgattctactatgattgtgtggtggtgaacaaagatcattacaaacaaaaactgtaattttgttatatttgattcaatggaatttacctaaaaaataaagactaaaaatgtgg

SEQ ID NO: 324983 - DNA, 3840 bp, Homo sapiens
  misc_feature (66)..(66): n is a, c, g, or t
aagttataatttagtatgagaagtatttaaaggtaaataaattgtaaaaaacatagagataataanatagatatttttttattcaagagagccagcccactgttggcatttatcagagtttatttaatcttctcatcaactactattgttaccctcagttgccaagtgaagggagcatgcgggaaggttaagtgacttgcccaagcccacacaaccggtaggagccccaattccaggccctagttccaaggctacattcttccaggcggcctccaactgggttggttaagggttgaaaggacagtgggacaataactgaggcccgtattgcccagagcgtccccatcccccgtccggagctggaagaggccatagaccgctgcctccacatcttttcctctccttcgggttcggtgactcacgacccttcttcctctctcccgggatatgacctcaaatttcaccccttatccagtagcgtctgggtccctggactaaagccgtcaaatgtaaccaattgctgaggagctctcccctaagaatcccgcctccactctgaggaacagcttcgctgatcaatggatcccctcctagacgcaatgagcgcgcggggcaagtggagaagcggctgaactgcccaatgaacaagcggtttccgtggttaggggcgtggcagaagcggtcgtcaggggcgtggcggcagttacttgggcggggccggtagcggcgggagctgcactggccagggttccggctgtatatccatgagcgccgctggcagccggggagctgcaggaaccagactgggggcgagctgagcacctgtagtcaatcacacgcagcttttaggtttgtttgaataagagatctgacctgaccggcccaactgtacaactcttcaaggaaaattcgtatttgcagtgggaagaataagtaacattgatcaagatgaatgccatgctggagactcccgaactcccagccgtgtttgatggagtgaagctggctgcagtggctgctgtgctgtacgtgatcgtccggtgtttgaacctgaagagccccacagccccacctgacctctacttccaggactcggggctctcacgctttctgctcaagtcctgtcctcttctgaccaaagaatacattccaccgttgatctgggggaaaagtggacacatccagacagccttgtatgggaagatgggaagggtgaggtcgccacatccttatgggcaccggaagttcatcactatgtctgatggagccacttctacattcgacctcttcgagcccttggctgagcactgtgttggagatgatatcaccatggtcatctgccctggaattgccaatcacagcgagaagcaatacatccgcactttcgttgactacgcccagaaaaatggctatcggtgcgccgtgctgaaccacctgggtgccctgcccaacattgaattgacctcgccacgcatgttcacctatggctgcacgtgggaatttggagccatggtgaactacatcaagaagacatatcccctgacccagctggtcgtcgtgggcttcagcctgggtggtaacattgtgtgcaaatacttgggggagactcaggcaaaccaagagaaggtcctgtgctgcgtcagcgtgtgccaggggtacagtgcactgagggcccaggaaaccttcatgcaatgggatcagtgccggcggttctacaacttcctcatggctgacaacatgaagaagatcatcctctcgcacaggcaagctctttttggagaccatgttaagaaaccccagagcctggaagacacggacttgagccggctctacacagcaacatccctgatgcagattgatgacaatgtgatgaggaagtttcacggctataactccctgaaggaatactatgaggaagaaagttgcatgcggtacctgcacaggatttatgttcctctcatgctggttaatgcagctgacgatccgttggtgcatgaaagtcttctaaccattccaaaatctctttcagagaaacgagagaacgtcatgtttgtgctgcctctgcatgggggccacttgggcttctttgagggctctgtgctgttccccgagcccctgacatggatggataagctggtggtggagtacgccaacgccatttgccaatgggagcgtaacaagttgcagtgctctgacacggagcaggtggaggccgacctggagtgaggcctccggactctggcacgctccagcagccctcctctggaagctgcgtcccctcaccccctgtttcaggtctcccatctccctcagtgacctggatctgacctcacaccatcagcagggggcacccaccatgcacacctgtctcggagtaggcagctcttcctgggagctccaggctatttttgtgcttagttactggttttctccattgcattgttaggcatggtgacaagtgacagagttcttgccctctgtccagtttcagcatctggttgcttttaagccaagtacatctagtttccctattaaaaatgtgtctgaatagcgattttgctttgccaccaaaaggcttttccctgagaacagtgaaggatgtatgtcattttgtggtggttgtatgtgtccttacatagaccttaaaaagagctcacccttccaggccaatgctgaagacacagctccgcttgggagcctgagaacccaggcttcccaggccagagtgtggcttcttaaacggcaaaggaaattcctttgagtcacaagccaagttttcgccctgtctcctgagaccatttccctacgctttgctgctgctgagagttacctgaggcacttgttaaaaattcagcctcccaggtccctcccctcggagaggctgattcactgggtctgggaaggagcctggggattttaatttttcacaagtgccccagatgattctcatcaccaagcaaattttggaaatgctgttcaacagcgcccttaaattggaaacatctttgcagctcgttttattgaaattcataatcaggggtgtcctctagctcccacggtctccagagcagcaaggccggctatggagctgccgtcgtgtgaccacagtgtgatgtctcagaagggctctgggtgggctgagcatctgggctgtgccctggctctgcttttcaccctggacaaagtcgctgtggacttcaatttcttcacctctaaaatgggggacttggaccaggtagattgctgagctcactaccaggttcaaagttcaatgacaaactcagtttactgaggtttgagagaacatccctccaggggagcctgggagctgctctcccagtctaagcatgtagatatcatcgtttgccttttgtgtgtgtgtgtcccttatttgataaaaagatgttttgagttgttttttttttaagcactcacttgtaattttagtttttaaacccaagtccctctaactttgcctttgataccaaacaattcaaaagttggatctgagtttggagaaagatatttccaacctaagtgggtattattttgaaaccagatttttaatttaatagcctatatttgtagtctgttggataggtgtttccaaagtgtgtcttctcaagtgaaaacgcaactctaggtttcaagtactccttttctccgatcctgtggtacttgaatatccaaaaaccctgcactttgaacaatcagctgttgctatctggaactaaacagaactatgagtaaaattgcctggatactttaaaaggagaaattgtaaaccgaaccatacttatctttttttgaagggggggcccggtccccaattcgccctat

SEQ ID NO: 324984 - DNA, 1715 bp, Homo sapiens
  misc_feature (66)..(66): n is a, c, g, or t
aagttataatttagtatgagaagtatttaaaggtaaataaattgtaaaaaacatagagataataanatagatatttttttattcaagagagccagcccactgttggcatttatcagagtttatttaatcttctcatcaactactattgttaccctcagttgccaagtgaagggagcatgcgggaaggttaagtgacttgcccaagcccacacaaccggtaggagccccaattccaggccctagttccaaggctacattcttccaggcggcctccaactgggttggttaagggttgaaaggacagtgggacaataactgaggcccgtattgcccagagcgtccccatcccccgtccggagctggaagaggccatagaccgctgcctccacatcttttcctctccttcgggttcggtgactcacgacccttcttcctctctcccgggatatgacctcaaatttcaccccttatccagtagcgtctgggtccctggactaaagccgtcaaatgtaaccaattgctgaggagctctcccctaagaatcccgcctccactctgaggaacagcttcgctgatcaatggatcccctcctagacgcaatgagcgcgcggggcaagtggagaagcggctgaactgcccaatgaacaagcggtttccgtggttaggggcgtggcagaagcggtcgtcaggggcgtggcggcagttacttgggcggggccggtagcggcgggagctgcactggccagggttccggctgtatatccatgagcgccgctggcagccggggagctgcaggaaccagactgggggcgagctgagcacctgtagtcaatcacacgcagcttttaggtttgtttgaataagagatctgacctgaccggcccaactgtacaactcttcaaggaaaattcgtatttgcagtgggaagaataagtaacattgatcaagatgaatgccatgctggagactcccgaactcccagccgtgtttgatggagtgaagctggctgcagtggctgctgtgctgtacgtgatcgtccggtgtttgaacctgaagagccccacagccccacctgacctctacttccaggactcggggctctcacgctttctgctcaagtcctgtcctcttctgaccaaagaatacattccaccgttgatctgggggaaaagtggacacatccagacagccttgtatgggaagatgggaagggtgaggtcgccacatccttatgggcaccggaagttcatcactatgtctgatggagccacttctacattcgacctcttcgagcccttggctgagcactgtgttggagatgatatcaccatggtcatctgccctggaattgccaatcacagcgagaagcaatacatccgcactttcgttgactacgcccagaaaaatggctatcggtgcgccgtgctgaaccacctgggtgccctgcccaacattgaattgacctcgccacgcatgttcacctatggctgcacgtgggaatttggagccatggtgaactacatcaagaagacatatcccctgacccagctggtcgtcgtgggcttcagcctgggtggtaacattgtgtgcaaatacttgggggagactcaggcaaaccaagagaaggtcctgtgctgcgtcagcgtgtgccaggggtacagtgcactgagtttgctgttgttggtattgaagacatcagtccttttcaaaaaaaa

SEQ ID NO: 324985 - DNA, 1638 bp, Homo sapiens
  misc_feature (66)..(66): n is a, c, g, or t
aagttataatttagtatgagaagtatttaaaggtaaataaattgtaaaaaacatagagataataanatagatatttttttattcaagagagccagcccactgttggcatttatcagagtttatttaatcttctcatcaactactattgttaccctcagttgccaagtgaagggagcatgcgggaaggttaagtgacttgcccaagcccacacaaccggtaggagccccaattccaggccctagttccaaggctacattcttccaggcggcctccaactgggttggttaagggttgaaaggacagtgggacaataactgaggcccgtattgcccagagcgtccccatcccccgtccggagctggaagaggccatagaccgctgcctccacatcttttcctctccttcgggttcggtgactcacgacccttcttcctctctcccgggatatgacctcaaatttcaccccttatccagtagcgtctgggtccctggactaaagccgtcaaatgtaaccaattgctgaggagctctcccctaagaatcccgcctccactctgaggaacagcttcgctgatcaatggatcccctcctagacgcaatgagcgcgcggggcaagtggagaagcggctgaactgcccaatgaacaagcggtttccgtggttaggggcgtggcagaagcggtcgtcaggggcgtggcggcagttacttgggcggggccggtagcggcgggagctgcactggccagggttccggctgtatatccatgagcgccgctggcagccggggagctgcaggaaccagactgggggcgagctgagcacctgtagtcaatcacacgcagcttttaggtttgtttgaataagagatctgacctgaccggcccaactgtacaactcttcaaggaaaattcgtatttgcagtgggaagaataagtaacattgatcaagatgaatgccatgctggagactcccgaactcccagccgtgtttgatggagtgaagctggctgcagtggctgctgtgctgtacgtgatcgtccggtgtttgaacctgaagagccccacagccccacctgacctctacttccaggactcggggctctcacgctttctgctcaagtcctgtcctcttctgaccaaagaatacattccaccgttgatctgggggaaaagtggacacatccagacagccttgtatgggaagatgggaagggtgaggtcgccacatccttatgggcaccggaagttcatcactatgtctgatggagccacttctacattcgacctcttcgagcccttggctgagcactgtgttggagatgatatcaccatggtcatctgccctggaattgccaaacaattcaaaagttggatctgagtttggagaaagatatttccaacctaagtgggtattattttgaaaccagatttttaatttaatagcctatatttgtagtctgttggataggtgtttccaaagtgtgtcttctcaagtgaaaacgcaactctaggtttcaagtactccttttctccgatcctgtggtacttgaatatccaaaaaccctgcactttgaacaatcagctgttgctatctggaactaaacagaactatgagtaaaattgcctggatactttaaaa

SEQ ID NO: 324986 - DNA, 1496 bp, Homo sapiens
  misc_feature (66)..(66): n is a, c, g, or t
aagttataatttagtatgagaagtatttaaaggtaaataaattgtaaaaaacatagagataataanatagatatttttttattcaagagagccagcccactgttggcatttatcagagtttatttaatcttctcatcaactactattgttaccctcagttgccaagtgaagggagcatgcgggaaggttaagtgacttgcccaagcccacacaaccggtaggagccccaattccaggccctagttccaaggctacattcttccaggcggcctccaactgggttggttaagggttgaaaggacagtgggacaataactgaggcccgtattgcccagagcgtccccatcccccgtccggagctggaagaggccatagaccgctgcctccacatcttttcctctccttcgggttcggtgactcacgacccttcttcctctctcccgggatatgacctcaaatttcaccccttatccagtagcgtctgggtccctggactaaagccgtcaaatgtaaccaattgctgaggagctctcccctaagaatcccgcctccactctgaggaacagcttcgctgatcaatggatcccctcctagacgcaatgagcgcgcggggcaagtggagaagcggctgaactgcccaatgaacaagcggtttccgtggttaggggcgtggcagaagcggtcgtcaggggcgtggcggcagttacttgggcggggccggtagcggcgggagctgcactggccagggttccggctgtatatccatgagcgccgctggcagccggggagctgcaggaaccagactgggggcgagctgagcacctgtagtcaatcacacgcagaaataataatgatacttatgttagaagattgttttgagaagtgcatggagttactacatctgaagcatttagaacagtacctggcacagggaaaaaccagctctcacacctgctcctctgtaaagcgtcttccccaagcccacacgtaatttggtggctgtccttgaaagtatttcccaagatctccaaaccgctttaaacttccaaggtctgagcctgacctggcctcgctaacaaagggttccactgatgccgactctaagaagaaagttttcaagcttttaggtttgtttgaataagagatctgacctgaccggcccaactgtacaactcttcaaggaaaattcgtatttgcagtgggaagaataagtaacattgccgagatcacgccactgcactccagcctgggtgacagagtgagactccgtctcaaaaaaaaaaaaaaaaagaattagctgggcatggtggcacatacctgtagtcctagctactcaggaggctgaggcaggaagatcacttgagtccagaagttcgaggctgcagcaagctatgattgtgccactgcactccagcctgggcaacagagcaagattctgtctctaaaaataaataaatagtaaaaaataaaataaaatttgacttgaaaagcaaaac

SEQ ID NO: 324987 - DNA, 1585 bp, Homo sapiens
  misc_feature (66)..(66): n is a, c, g, or t
aagttataatttagtatgagaagtatttaaaggtaaataaattgtaaaaaacatagagataataanatagatatttttttattcaagagagccagcccactgttggcatttatcagagtttatttaatcttctcatcaactactattgttaccctcagttgccaagtgaagggagcatgcgggaaggttaagtgacttgcccaagcccacacaaccggtaggagccccaattccaggccctagttccaaggctacattcttccaggcggcctccaactgggttggttaagggttgaaaggacagtgggacaataactgaggcccgtattgcccagagcgtccccatcccccgtccggagctggaagaggccatagaccgctgcctccacatcttttcctctccttcgggttcggtgactcacgacccttcttcctctctcccgggatatgacctcaaatttcaccccttatccagtagcgtctgggtccctggactaaagccgtcaaatgtaaccaattgctgaggagctctcccctaagaatcccgcctccactctgaggaacagcttcgctgatcaatggatcccctcctagacgcaatgagcgcgcggggcaagtggagaagcggctgaactgcccaatgaacaagcggtttccgtggttaggggcgtggcagaagcggtcgtcaggggcgtggcggcagttacttgggcggggccggtagcggcgggagctgcactggccagggttccggctgtatatccatgagcgccgctggcagccggggagctgcaggaaccagactgggggcgagctgagcacctgtagtcaatcacacgcaggaaaaaccagctctcacacctgctcctctgtaaagcgtcttccccaagcccacacgtaatttggtggctgtccttgaaagtatttcccaagatctccaaaccgctttaaacttccaaggtctgagcctgacctggcctcgctaacaaagggttccactgatgccgactctaagaagaaagttttcaaggttcttcgtatttgaactttctatggctaggcttatgtttaaaataaccacactgatttaaacatggtcttatagtcttcagtggctcccaggtcttgcctctcgggttttttttcctctttcctttgaatgtgccttaaccttcgtcttgcttttatttacctctgagtctggtttagagccacctggaaattgaatggaatctttagtctattagtctaatctagagtccttaccttctggcctttgctcattgcagagcccccacattattagtcagttgtaccacagatactgtgttacataaggtgaggagagggaggtggtgttatcagttccactttttccaggctagagtgcagtggcccgatctcggtgcactgcaacctctgcttcccgggttcaagcgattttcctgcctcagcctctcattttatcttggataaaagagaagctttgaaagattgcctccctatgtgtacagtcactgtaggcatgtatttgtgtactgtttacttagtcatgtcaatgagggcaataaaaaacaaaaatcag

SEQ ID NO: 324988 - DNA, 330 bp, Homo sapiens
acagaatgttcaggggggtaagggttggaataactccagatggcactggagacaagtagtgtagagacacaaatgggatcctctccctcctctgacatccagaatccagaatctctgggtctttccacttgggttgtgacctacaagttgggggcaaagctctttagctctcataatcagcaggactgatggcggaagctgggcagggctccctggaggcccagtgttgggctggcatgttcagcaccagataggtgcctatctcacaatatccctttttcatttcaggcacagatgaatccttcatatttatctggatttagctggtag

SEQ ID NO: 324989 - DNA, 237 bp, Homo sapiens
acacagcaacatccctgatgcagattgatgacaatgtgatgaggtgtgtccgcgcaggcgggagagggacgctctggggcagggtgccaggcaggaggctgcaggtcagctgtgcccagcactagtgtttgctctgcctacttgagtgttaagggtgtttttttccctttaagtaagtgtctagtgcttaaaaacagaagatttcacaggaacatttaaatttctagtttctcctgg

SEQ ID NO: 324990 - DNA, 3771 bp, Homo sapiens
  misc_feature (66)..(66): n is a, c, g, or t
aagttataatttagtatgagaagtatttaaaggtaaataaattgtaaaaaacatagagataataanatagatatttttttattcaagagagccagcccactgttggcatttatcagagtttatttaatcttctcatcaactactattgttaccctcagttgccaagtgaagggagcatgcgggaaggttaagtgacttgcccaagcccacacaaccggtaggagccccaattccaggccctagttccaaggctacattcttccaggcggcctccaactgggttggttaagggttgaaaggacagtgggacaataactgaggcccgtattgcccagagcgtccccatcccccgtccggagctggaagaggccatagaccgctgcctccacatcttttcctctccttcgggttcggtgactcacgacccttcttcctctctcccgggatatgacctcaaatttcaccccttatccagtagcgtctgggtccctggactaaagccgtcaaatgtaaccaattgctgaggagctctcccctaagaatcccgcctccactctgaggaacagcttcgctgatcaatggatcccctcctagacgcaatgagcgcgcggggcaagtggagaagcggctgaactgcccaatgaacaagcggtttccgtggttaggggcgtggcagaagcggtcgtcaggggcgtggcggcagttacttgggcggggccggtagcggcgggagctgcactggccagggttccggctgtatatccatgagcgccgctggcagccggggagctgcaggaaccagactgggggcgagctgagcacctgtagtcaatcacacgcagcttttaggtttgtttgaataagagatctgacctgaccggcccaactgtacaactcttcaaggaaaattcgtatttgcagtgggaagaataagtaacattgatcaagatgaatgccatgctggagactcccgaactcccagccgtgtttgatggagtgaagctggctgcagtggctgctgtgctgtacgtgatcgtccggtgtttgaacctgaagagccccacagccccacctgacctctacttccaggactcggggctctcacgctttctgctcaagtcctgtcctcttctgaccaaagaatacattccaccgttgatctgggggaaaagtggacacatccagacagccttgtatgggaagatgggaagggtgaggtcgccacatccttatgggcaccggaagttcatcactatgtctgatggagccacttctacattcgacctcttcgagcccttggctgagcactgtgttggagatgatatcaccatggtcatctgccctggaattgccaatcacagcgagaagcaatacatccgcactttcgttgactacgcccagaaaaatggctatcggtgcgccgtgctgaaccacctgggtgccctgcccaacattgaattgacctcgccacgcatgttcacctatggctgcacgtgggaatttggagccatggtgaactacatcaagaagacatatcccctgacccagctggtcgtcgtgggcttcagcctgggtggtaacattgtgtgcaaatacttgggggagactcaggcaaaccaagagaaggtcctgtgctgcgtcagcgtgtgccaggggtacagtgcactgagggcccaggaaaccttcatgcaatgggatcagtgccggcggttctacaacttcctcatggctgacaacatgaagaagatcatcctctcgcacaggcaagctctttttggagaccatgttaagaaaccccagagcctggaagacacggacttgagccggctctacacagcaacatccctgatgcagattgatgacaatgtgatgaggaagtttcacggctataactccctgaaggaatactatgaggaagaaagttgcatgcggtacctgcacaggatttatgttcctctcatgctggttaatgcagctgacgatccgttggtgcatgaaagtcttctaaccattccaaaatctctttcagagaaacgagagaacgtcatgtttgtgctgcctctgcatgggggccacttgggcttctttgagggctctgtgctgttccccgagcccctgacatggatggataagctggtggtggagtacgccaacgccatttgccaatgggagcgtaacaagttgcagtgctctgacacggagcaggtggaggccgacctggagtgaggcctccggactctggcacgctccagcagccctcctctggaagctgcgtcccctcaccccctgtttcaggtctcccatctccctcagtgacctggatctgacctcacaccatcagcagggggcacccaccatgcacacctgtctcggagtaggcagctcttcctgggagctccaggctatttttgtgcttagttactggttttctccattgcattgttaggcatggtgacaagtgacagagttcttgccctctgtccagtttcagcatctggttgcttttaagccaagtacatctagtttccctattaaaaatgtgtctgaatagcgattttgctttgccaccaaaaggcttttccctgagaacagtgaaggatgtatgtcattttgtggtggttgtatgtgtccttacatagaccttaaaaagagctcacccttccaggccaatgctgaagacacagctccgcttgggagcctgagaacccaggcttcccaggccagagtgtggcttcttaaacggcaaaggaaattcctttgagtcacaagccaagttttcgccctgtctcctgagaccatttccctacgctttgctgctgctgagagttacctgaggcacttgttaaaaattcagcctcccaggtccctcccctcggagaggctgattcactgggtctgggaaggagcctggggattttaatttttcacaagtgccccagatgattctcatcaccaagcaaattttggaaatgctgttcaacagcgcccttaaattggaaacatctttgcagctcgttttattgaaattcataatcaggggtgtcctctagctcccacggtctccagagcagcaaggccggctatggagctgccgtcgtgtgaccacagtgtgatgtctcagaagggctctgggtgggctgagcatctgggctgtgccctggctctgcttttcaccctggacaaagtcgctgtggacttcaatttcttcacctctaaaatgggggacttggaccaggtagattgctgagctcactaccaggttcaaagttcaatgacaaactcagtttactgaggtttgagagaacatccctccaggggagcctgggagctgctctcccagtctaagcatgtagatatcatcgtttgccttttgtgtgtgtgtgtcccttatttgataaaaagatgttttgagttgttttttttttaagcactcacttgtaattttagtttttaaacccaagtccctctaactttgcctttgataccaaacaattcaaaagttggatctgagtttggagaaagatatttccaacctaagtgggtattattttgaaaccagatttttaatttaatagcctatatttgtagtctgttggataggtgtttccaaagtgtgtcttctcaagtgaaaacgcaactctaggtttcaagtactccttttctccgatcctgtggtacttgaatatccaaaaaccctgcactttgaacaatcagctgttgctatctggaactaaacagaactatgagtaaaattgcctggatactttaaaa

SEQ ID NO: 324991 - DNA, 3592 bp, Homo sapiens
  misc_feature (66)..(66): n is a, c, g, or t
aagttataatttagtatgagaagtatttaaaggtaaataaattgtaaaaaacatagagataataanatagatatttttttattcaagagagccagcccactgttggcatttatcagagtttatttaatcttctcatcaactactattgttaccctcagttgccaagtgaagggagcatgcgggaaggttaagtgacttgcccaagcccacacaaccggtaggagccccaattccaggccctagttccaaggctacattcttccaggcggcctccaactgggttggttaagggttgaaaggacagtgggacaataactgaggcccgtattgcccagagcgtccccatcccccgtccggagctggaagaggccatagaccgctgcctccacatcttttcctctccttcgggttcggtgactcacgacccttcttcctctctcccgggatatgacctcaaatttcaccccttatccagtagcgtctgggtccctggactaaagccgtcaaatgtaaccaattgctgaggagctctcccctaagaatcccgcctccactctgaggaacagcttcgctgatcaatggatcccctcctagacgcaatgagcgcgcggggcaagtggagaagcggctgaactgcccaatgaacaagcggtttccgtggttaggggcgtggcagaagcggtcgtcaggggcgtggcggcagttacttgggcggggccggtagcggcgggagctgcactggccagggttccggctgtatatccatgagcgccgctggcagccggggagctgcaggaaccagactgggggcgagctgagcacctgtagtcaatcacacgcagcttttaggtttgtttgaataagagatctgacctgaccggcccaactgtacaactcttcaaggaaaattcgtatttgcagtgggaagaataagtaacattgatcaagatgaatgccatgctggagactcccgaactcccagccgtgtttgatggagtgaagctggctgcagtggctgctgtgctgtacgtgatcgtccggtgtttgaacctgaagagccccacagccccacctgacctctacttccaggactcggggctctcacgctttctgctcaagtcctgtcctcttctgaccaaagaatacattccaccgttgatctgggggaaaagtggacacatccagacagccttgtatgggaagatgggaagggtgaggtcgccacatccttatgggcaccggaagttcatcactatgtctgatggagccacttctacattcgacctcttcgagcccttggctgagcactgtgttggagatgatatcaccatggtcatctgccctggaattgccaatcacagcgagaagcaatacatccgcactttcgttgactacgcccagaaaaatggctatcggtgcgccgtgctgaaccacctgggtgccctgcccaacattgaattgacctcgccacgcatgttcacctatggctgcacgtgggaatttggagccatggtgaactacatcaagaagacatatcccctgacccagctggtcgtcgtgggcttcagcctgggtggtaacattgtgtgcaaatacttgggggagactcaggcaaaccaagagaaggtcctgtgctgcgtcagcgtgtgccaggggtacagtgcactgagggcccaggaaaccttcatgcaatgggatcagtgccggcggttctacaacttcctcatggctgacaacatgaagaagatcatcctctcgcacaggcaagctctttttggagaccatgttaagaaaccccagagcctggaagacacggacttgagccggctctacacagcaacatccctgatgcagattgatgacaatgtgatgaggaagtttcacggctataactccctgaaggaatactatgaggaagaaagttgcatgcggtacctgcacaggatttatgttcctctcatgctggttaatgcagctgacgatccgttggtgcatgaaagtcttctaaccattccaaaatctctttcagagaaacgagagaacgtcatgtttgtgctgcctctgcatgggggccacttgggcttctttgagggctctgtgctgttccccgagcccctgacatggatggataagctggtggtggagtacgccaacgccatttgccaatgggagcgtaacaagttgcagtgctctgacacggagcaggtggaggccgacctggagtgaggcctccggactctggcacgctccagcagccctcctctggaagctgcgtcccctcaccccctgtttcaggtctcccatctccctcagtgacctggatctgacctcacaccatcagcagggggcacccaccatgcacacctgtctcggagtaggcagctcttcctgggagctccaggctatttttgtgcttagttactggttttctccattgcattgttaggcatggtgacaagtgacagagttcttgccctctgtccagtttcagcatctggttgcttttaagccaagtacatctagtttccctattaaaaatgtgtctgaatagcgattttgctttgccaccaaaaggcttttccctgagaacagtgaaggatgtatgtcattttgtggtggttgtatgtgtccttacatagaccttaaaaagagctcacccttccaggccaatgctgaagacacagctccgcttgggagcctgagaacccaggcttcccaggccagagtgtggcttcttaaacggcaaaggaaattcctttgagtcacaagccaagttttcgccctgtctcctgagaccatttccctacgctttgctgctgctgagagttacctgaggcacttgttaaaaattcagcctcccaggtccctcccctcggagaggctgattcactgggtctgggaaggagcctggggattttaatttttcacaagtgccccagatgattctcatcaccaagcaaattttggaaatgctgttcaacagcgcccttaaattggaaacatctttgcagctcgttttattgaaattcataatcaggggtgtcctctagctcccacggtctccagagcagcaaggccggctatggagctgccgtcgtgtgaccacagtgtgatgtctcagaagggctctgggtgggctgagcatctgggctgtgccctggctctgcttttcaccctggacaaagtcgctgtggacttcaatttcttcacctctaaaatgggggacttggaccaggtagattgctgagctcactaccaggttcaaagttcaatgacaaactcagtttactgaggtttgagagaacatccctccaggggagcctgggagctgctctcccagtctaagcatgtagatatcatcgtttgccttttgtgtgtgtgtgtcccttatttgataaaaagatgttttgagttgttttttttttaagcactcacttgtaattttagtttttaaacccaagtccctctaactttgcctttgataccaaacaattcaaaagttggatctgagtttggagaaagatatttccaacctaagatccaacttttgaattgtttggtatcaaagttaaagttagaggtacttggtttt

SEQ ID NO: 324992 - DNA, 4785 bp, Homo sapiens
  misc_feature (1954)..(1954): n is a, c, g, or t
  misc_feature (3196)..(3196): n is a, c, g, or t
  misc_feature (3217)..(3217): n is a, c, g, or t
  misc_feature (3370)..(3370): n is a, c, g, or t
  misc_feature (3396)..(3396): n is a, c, g, or t
tggcgatacattcacacaggaacagctatgccatgtttacgaattccggttttgaaaaaactttcgttgacagttacacaaagggtcacttcctccccagcgacacatgggcctctcaaaggagaggagggagtaagtcccacggtagggccagtggttgctccctgggttttggaatcatttctgcggagctttcaaggccagaccctgggcttagggtcgagactttatagcagtgacagccagacccagcaagatggctgcgaccgtgaaaccctgggcggcgatccgggtgcgcatcatgagctgagagcgctggctgttgccccggtggaaggagtagaggccgtaggtgagggcggccgccgtggccaggcaacctatgggtaccaccgggttcaggcaagtcaagctgggaggaccaaggccgggcagccgggagcacccaaggcaggaaaatgaggtggctgcttctctattatgctctgtgcttctccctgtcaaaggcttcagcccacaccgtggagctaaacaatatgtttggccagatccagtcgcctggttatccagactcctatcccagtgattcagaggtgacttggaatatcactgtcccagatgggtttcggatcaagctttacttcatgcacttcaacttggaatcctcctacctttgtgaatatgactatgtgaaggtagaaactgaggaccaggtgctggcaaccttctgtggcagggagaccacagacacagagcagactcccggccaggaggtggtcctctcccctggctccttcatgtccatcactttccggtcagatttctccaatgaggagcgtttcacaggctttgatgcccactacatggctgtggatgtggacgagtgcaaggagagggaggacgaggagctgtcctgtgaccactactgccacaactacattggcggctactactgctcctgccgcttcggctacatcctccacacagacaacaggacctgccgagtggagtgcagtgacaacctcttcactcaaaggactggggtgatcaccagccctgacttcccaaacccttaccccaagagctctgaatgcctgtataccatcgagctggaggagggtttcatggtcaacctgcagtttgaggacatatttgacattgaggaccatcctgaggtgccctgcccctatgactacatcaagatcaaagttggtccaaaagttttggggcctttctgtggagagaaagccccagaacccatcagcacccagagccacagtgtcctgatcctgttccatagtgacaactcgggagagaaccggggctggaggctctcatacagggctgcaggaaatgagtgcccagagctacagcctcctgtccatgggaaaatcgagccctcccaagccaagtatttcttcaaagaccaagtgctcgtcagctgtgacacaggctacaaagtgctgaaggataatgtggagatggacacattccagattgagtgtctgaaggatgggacgtggagtaacaagattcccacctgtaaaattgtagactgtagagccccaggagagctggaacacgggctgatcaccttctctacaaggaacaacctcaccacatacaagtctgagatcaaatactcctgtcaggagccctattacaagatgctcaacaataacacaggtatatatacctgttctgcccaaggagtctggatgaataaagtattggggagaagcctacccacctgccttccagtgtgtgggctccccaagttctcccggaagctgatggccaggatcttcaatggacgcccagcccagaaaggcaccactccctggattgccatgctgtcacacctgaatgggcagcccttctgcggaggctcccttctaggctccagctggatcgtgaccgccgcacactgcctccaccagtcactcgatccggnagatccgaccctacgtgattcagacttgctcagcccttctgacttcaaaatcatcctgggcaagcattggaggctccggtcagatgaaaatgaacagcatctcggcgtcaaacacaccactctccacccccagtatgatcccaacacattcgagaatgacgtggctctggtggagctgttggagagcccagtgctgaatgccttcgtgatgcccatctgtctgcctgagggaccccagcaggaaggagccatggtcatcgtcagcggctgggggaagcagttcttgcaaaggttcccagagaccctgatggagattgaaatcccgattgttgaccacagcacctgccagaaggcttatgccccgctgaagaagaaagtgaccagggacatgatctgtgctggggagaaggaagggggaaaggacgcctgtgcgggtgactctggaggccccatggtgaccctgaatagagaaagaggccagtggtacctggtgggcactgtgtcctggggtgatgactgtgggaagaaggaccgctacggagtatactcttacatccaccacaacaaggactggatccagagggtcaccggagtgaggaactgaatttggctcctcagccccagcaccaccagctgtgggcagtcagtagcagaggacgatcctccgatgaaagcagccatttctcctttccttcctcccatcccccctccttcggcctatccattactgggcaatagagcaggtatcttcacccccttttcactctctttaaagagatggagcaagagagtggtcagaacacaggccgaatccaggctctatcacttactagtttgcagtgctgggcaggtgacttcatctcttcgaacttcagtttcttcataagatggaaatgctataccttacctacctcgtaaaagtctgatgaggaaaagattaactaatagatgcatagcacttaacagagtgcatagcatacactgttttcaataaatgcaccttagcagaaggtcgatgtgtctaccaggcagacgaagctctcttacaaacccctgcctgggtcttagcattgatcagtgacacacctctcccctcaaccttgaccatctccatctgcccttaaatgctgtatgcttttttgccaccgtgcaacttgcccaacatcaatcttcaccctcatccctaaaaaagtaaaacagacaaggttctgagtcctgtggtatgtcccctagcaaatgtanctaggaacatgcactagatgncagattgcgggagggcctgagagaagcagggacaggagggagcctggggattgtggtttgggaaggcagacacctggttctagaactagctctgcccttagccccctgtatgaccctatgcaagtcctcctccctcatctcaaagggtcctcnaagctctgacgatctaagatacaatnaagccattttccccctgataagatgaggtaaagccaatgtaaccaaaaggcaaaaattacaatcggttcaaaggaactttgatgcagacaaaatgctgctgctgctgctcctgaaatacccacccctttccactacgggtgggttcccaaggacatgggacaggcaaagtgtgagccaaaggatccttccttattcctaagcagagcatctgctctgggccctggcctccttcccttcttgggaaactgggctgcatgaggtgggccctggtagtttgtaccccaggcccctatactcttccttcctatgtccacagctgaccccaagcagccgttccccgactcctcacccctgagcctcaccctgaactccctcatcttgcaaggccataagtgttttccaagcaaaatgcctctcccatcctctctcaggaagcttctagagactttatgccctccagagctccaagatataagccctccaagggatcagaagctccaagttcctgtcttctgttttatagaaattgatcttccctgggggactttaactcttgacctgtatgcagctgttggagtaattccaggtctcttgaaaaaaaagaggaagataatggagaatgagaacatatatatatatatattaagccccaggctgaatactcagggacagcaattcacagcctgcctctggttctataaacaagtcattctacctctttgtgccctgctgtttattctgtaaggggaaggtggcaatgggacccagctccatcagacacttgtcaagctagcagaaactccattttcaatgccaaagaagaactgtaatgctgttttggaatcatcccaaggcatcccaagacaccatatcttcccatttcaagcactgcctgggcacaccccaacatcccaggctgtggtggctcctgtgggaactacctagatgaagagagtatcatttataccttctaggagctcctattgggagacatgaaacatatgtaattgactaccatgtaatagaacaaaccctgccaagtgctgctttggaaagtcatggaggtaaaagaaagaccattctggtatgaaggttttgggggaggagatatcaatcaagaaggcttcccagaagaggtgactggaccagagccttgtccacaggtaagacggaggaggccttccacatggagggagaacaatagtaaatgtccactcaagatgtcctttattataccagctcctcccacaaaaacacatgtccagtggactctttttctgggatcagaaccaacaccaaaaagagcttttctccttaaagttagaattctaaacaggacttgaaatggcctcaaggtttgtgcacaaatactgacttctggctggacc

SEQ ID NO: 324993 - DNA, 2458 bp, Homo sapiens
gctgaagtcagccacacaggataaaggagggaagggaaggagcagatcttttcggtaggaagacagattttgttgtcaggttcctgggagtgcaagagcaagtcaaaggagagagagaggagagaggaaaagccagagggagagagggggagaggggatctgttgcaggcaggggaaggcgtgacctgaatggagaatgccagccaattccagagacacacagggacctcagaacaaagataaggcatcacggacaccacaccgggcacgagctcacaggcaagtcaagctgggaggaccaaggccgggcagccgggagcacccaaggcaggaaaatgaggtggctgcttctctattatgctctgtgcttctccctgtcaaaggcttcagcccacaccgtggagctaaacaatatgtttggccagatccagtcgcctggttatccagactcctatcccagtgattcagaggtgacttggaatatcactgtcccagatgggtttcggatcaagctttacttcatgcacttcaacttggaatcctcctacctttgtgaatatgactatgtgaaggtagaaactgaggaccaggtgctggcaaccttctgtggcagggagaccacagacacagagcagactcccggccaggaggtggtcctctcccctggctccttcatgtccatcactttccggtcagatttctccaatgaggagcgtttcacaggctttgatgcccactacatggctgtggatgtggacgagtgcaaggagagggaggacgaggagctgtcctgtgaccactactgccacaactacattggcggctactactgctcctgccgcttcggctacatcctccacacagacaacaggacctgccgagtggagtgcagtgacaacctcttcactcaaaggactggggtgatcaccagccctgacttcccaaacccttaccccaagagctctgaatgcctgtataccatcgagctggaggagggtttcatggtcaacctgcagtttgaggacatatttgacattgaggaccatcctgaggtgccctgcccctatgactacatcaagatcaaagttggtccaaaagttttggggcctttctgtggagagaaagccccagaacccatcagcacccagagccacagtgtcctgatcctgttccatagtgacaactcgggagagaaccggggctggaggctctcatacagggctgcaggaaatgagtgcccagagctacagcctcctgtccatgggaaaatcgagccctcccaagccaagtatttcttcaaagaccaagtgctcgtcagctgtgacacaggctacaaagtgctgaaggataatgtggagatggacacattccagattgagtgtctgaaggatgggacgtggagtaacaagattcccacctgtaaaaaaaatgaaatcgatctggagagcgaactcaagtcagagcaagtgacagagtgaatgacgggaccccacacaatgcagacatccagaaatggatcactcccaagacccctggggcccagagctgcaccacccctccccacccacaacacccccgtgcccctttccatgtggattagaatgggtgctgaacaacatgatctcagcagttgaagctgctacgtgtgtgaaagcaaattctccacttgagggtttgcccatcattcaaacactattccagaaaataatgaaaaaaaaatgtgggatttattttagcacctctgagtggactgtacttttctcaacggaaaaaaaaaatgcccttggtccttgagacaaaagatttaatatacaaccatgtggcctcaggctgaccagatcaaagtggtttctaatccattctacatgtcaagtttaaatgaaccagactgcctgtgactttatgaatctgaaggtattacctgttgctgctttcttaaccaccatgagtaggtaaagcaaataataactcacagagtgtggatgagaatctgaatgttttctcattcacaaaagtatcccttctacccctatctggcgcagggctgaaatgtcatcattagaggttctgtcttctggggcttacaagttctatgtttcttaaaattcgctgattaaaaattttaaaaagataggatcacacctgaaagcagtggtcccagctctgtgctgtgggacatcacaggtcctaaacagtgatagagaaagggctggggagtggcagctggaatctctgcttccgtctgaacatctggacacacatgtcagagaatctttgcattaaatggactgcccgatctatttggtgattaaatggctgtgcggtgaggggagaaccctgggcagtctggagactgaggtgccattctcggctagagacaccacccaaagaagagatgggctggctactaaagacaagtgtcagttgaataaatgtctttaaacctaaaaaatattaa

SEQ ID NO: 324994 - DNA, 3703 bp, Homo sapiens
gctgaagtcagccacacaggataaaggagggaagggaaggagcagatcttttcggtaggaagacagattttgttgtcaggttcctgggagtgcaagagcaagtcaaaggagagagagaggagagaggaaaagccagagggagagagggggagaggggatctgttgcaggcaggggaaggcgtgacctgaatggagaatgccagccaattccagagacacacagggacctcagaacaaagataaggcatcacggacaccacaccgggcacgagctcacaggcaagtcaagctgggaggaccaaggccgggcagccgggagcacccaaggcaggaaaatgaggtggctgcttctctattatgctctgtgcttctccctgtcaaaggcttcagcccacaccgtggagctaaacaatatgtttggccagatccagtcgcctggttatccagactcctatcccagtgattcagaggtgacttggaatatcactgtcccagatgggtttcggatcaagctttacttcatgcacttcaacttggaatcctcctacctttgtgaatatgactatgtgaaggtagaaactgaggaccaggtgctggcaaccttctgtggcagggagaccacagacacagagcagactcccggccaggaggtggtcctctcccctggctccttcatgtccatcactttccggtcagatttctccaatgaggagcgtttcacaggctttgatgcccactacatggctgtggatgtggacgagtgcaaggagagggaggacgaggagctgtcctgtgaccactactgccacaactacattggcggctactactgctcctgccgcttcggctacatcctccacacagacaacaggacctgccgagtggagtgcagtgacaacctcttcactcaaaggactggggtgatcaccagccctgacttcccaaacccttaccccaagagctctgaatgcctgtataccatcgagctggaggagggtttcatggtcaacctgcagtttgaggacatatttgacattgaggaccatcctgaggtgccctgcccctatgactacatcaagatcaaagttggtccaaaagttttggggcctttctgtggagagaaagccccagaacccatcagcacccagagccacagtgtcctgatcctgttccatagtgacaactcgggagagaaccggggctggaggctctcatacagggctgcaggaaatgagtgcccagagctacagcctcctgtccatgggaaaatcgagccctcccaagccaagtatttcttcaaagaccaagtgctcgtcagctgtgacacaggctacaaagtgctgaaggtgcagagccttgccctgggaaaggggagtgcccaggccacagaaactctccgaaacctgcccctccccagggcagatgggctgccagaacttgtcatagttccagcacagaatttcctagctgcccatcaacttctcaaatgctccagaaattccaaagcatgcgtcccaggcggtctcacactctgaaagtggcacaaaagtttgttttttttttttttttaatcagagcatgagctggtttgaatttttaaaatatggatccatacagctctataatcaaggctgagaactgtaacaaagttcatcgggcttatagaggggagtggagtgggataccaggaaaggaagtaaacagtttaaaagtagcaaatggggctgagcatggtggctcatgcctgtaatcccagcactttgggaggcccaggcgggtggatcacctgatctcaggagtttgagaccagcctggcaaatatggcaaaaccctatctctactaaataatacaaaaaatagccaggtgtggtggcgggcgcctgtaatcccagctacttgggaggctgaggcaggagaatcacttgaatccaggaggcagaggttgcagtgagctgagatcacgcctttgcactccagcctgggtgacaagagcaaaactccatctcaaaaaataaaaaaaggaacagatgggttcccctcactctcccacccccagaagcagtagttctaggaatcacatggttcgctttaaaaaaatcacctcccagctctcacttgagatcagttaaagcagactttttggggctgggaccagtgattggtgcagccaagctagaggaccatcgctttcaaggaatggttctcaaagaggggtgttcagtttcagcatcaccgggaacttgttagaaatgcaaatgcttgggtaggccagcctcactgaatcagaaactctgggggagaagcccagcagcctatgttttaacaagctctctaggagatgctgaccgcttgccctggtttgagaagcactgctctgaaaaaggagtcaatgcttaccgttttcccttcagagatagttgcccaaaccccttcttgcacacagcccttgcccctctccagagtatgaaaaggaggtatgaattcagcatgtatctttcccctaccttcaagctcacccttggaagcccatgggtggaaaatctcagtcgagatcaagacacgtgtggagcttgagttggttttgctaggaagataatgtggagatggacacattccagattgagtgtctgaaggatgggacgtggagtaacaagattcccacctgtaaaaaaaatgaaatcgatctggagagcgaactcaagtcagagcaagtgacagagtgaatgacgggaccccacacaatgcagacatccagaaatggatcactcccaagacccctggggcccagagctgcaccacccctccccacccacaacacccccgtgcccctttccatgtggattagaatgggtgctgaacaacatgatctcagcagttgaagctgctacgtgtgtgaaagcaaattctccacttgagggtttgcccatcattcaaacactattccagaaaataatgaaaaaaaaatgtgggatttattttagcacctctgagtggactgtacttttctcaacggaaaaaaaaaatgcccttggtccttgagacaaaagatttaatatacaaccatgtggcctcaggctgaccagatcaaagtggtttctaatccattctacatgtcaagtttaaatgaaccagactgcctgtgactttatgaatctgaaggtattacctgttgctgctttcttaaccaccatgagtaggtaaagcaaataataactcacagagtgtggatgagaatctgaatgttttctcattcacaaaagtatcccttctacccctatctggcgcagggctgaaatgtcatcattagaggttctgtcttctggggcttacaagttctatgtttcttaaaattcgctgattaaaaattttaaaaagataggatcacacctgaaagcagtggtcccagctctgtgctgtgggacatcacaggtcctaaacagtgatagagaaagggctggggagtggcagctggaatctctgcttccgtctgaacatctggacacacatgtcagagaatctttgcattaaatggactgcccgatctatttggtgattaaatggctgtgcggtgaggggagaaccctgggcagtctggagactgaggtgccattctcggctagagacaccacccaaagaagagatgggctggctactaaagacaagtgtcagttgaataaatgtctttaaacctaaaaaatattaa

SEQ ID NO: 324995 - DNA, 2226 bp, Homo sapiens
gctgaagtcagccacacaggataaaggagggaagggaaggagcagatcttttcggtaggaagacagattttgttgtcaggttcctgggagtgcaagagcaagtcaaaggagagagagaggagagaggaaaagccagagggagagagggggagaggggatctgttgcaggcaggggaaggcgtgacctgaatggagaatgccagccaattccagagacacacagggacctcagaacaaagataaggcatcacggacaccacaccgggcacgagctcacaggcaagtcaagctgggaggaccaaggccgggcagccgggagcacccaaggcaggaaaatgaggtagaaactgaggaccaggtgctggcaaccttctgtggcagggagaccacagacacagagcagactcccggccaggaggtggtcctctcccctggctccttcatgtccatcactttccggtcagatttctccaatgaggagcgtttcacaggctttgatgcccactacatggctgtggatgtggacgagtgcaaggagagggaggacgaggagctgtcctgtgaccactactgccacaactacattggcggctactactgctcctgccgcttcggctacatcctccacacagacaacaggacctgccgagtggagtgcagtgacaacctcttcactcaaaggactggggtgatcaccagccctgacttcccaaacccttaccccaagagctctgaatgcctgtataccatcgagctggaggagggtttcatggtcaacctgcagtttgaggacatatttgacattgaggaccatcctgaggtgccctgcccctatgactacatcaagatcaaagttggtccaaaagttttggggcctttctgtggagagaaagccccagaacccatcagcacccagagccacagtgtcctgatcctgttccatagtgacaactcgggagagaaccggggctggaggctctcatacagggctgcaggaaatgagtgcccagagctacagcctcctgtccatgggaaaatcgagccctcccaagccaagtatttcttcaaagaccaagtgctcgtcagctgtgacacaggctacaaagtgctgaaggataatgtggagatggacacattccagattgagtgtctgaaggatgggacgtggagtaacaagattcccacctgtaaaaaaaatgaaatcgatctggagagcgaactcaagtcagagcaagtgacagagtgaatgacgggaccccacacaatgcagacatccagaaatggatcactcccaagacccctggggcccagagctgcaccacccctccccacccacaacacccccgtgcccctttccatgtggattagaatgggtgctgaacaacatgatctcagcagttgaagctgctacgtgtgtgaaagcaaattctccacttgagggtttgcccatcattcaaacactattccagaaaataatgaaaaaaaaatgtgggatttattttagcacctctgagtggactgtacttttctcaacggaaaaaaaaaatgcccttggtccttgagacaaaagatttaatatacaaccatgtggcctcaggctgaccagatcaaagtggtttctaatccattctacatgtcaagtttaaatgaaccagactgcctgtgactttatgaatctgaaggtattacctgttgctgctttcttaaccaccatgagtaggtaaagcaaataataactcacagagtgtggatgagaatctgaatgttttctcattcacaaaagtatcccttctacccctatctggcgcagggctgaaatgtcatcattagaggttctgtcttctggggcttacaagttctatgtttcttaaaattcgctgattaaaaattttaaaaagataggatcacacctgaaagcagtggtcccagctctgtgctgtgggacatcacaggtcctaaacagtgatagagaaagggctggggagtggcagctggaatctctgcttccgtctgaacatctggacacacatgtcagagaatctttgcattaaatggactgcccgatctatttggtgattaaatggctgtgcggtgaggggagaaccctgggcagtctggagactgaggtgccattctcggctagagacaccacccaaagaagagatgggctggctactaaagacaagtgtcagttgaataaatgtctttaaacctaaaaaatattaa

SEQ ID NO: 324996 - DNA, 2404 bp, Homo sapiens
gctgaagtcagccacacaggataaaggagggaagggaaggagcagatcttttcggtaggaagacagattttgttgtcaggttcctgggagtgcaagagcaagtcaaaggagagagagaggagagaggaaaagccagagggagagagggggagaggggatctgttgcaggcaggggaaggcgtgacctgaatggagaatgccagccaattccagagacacacagggacctcagaacaaagataaggcatcacggacaccacaccgggcacgagctcacaggcaagtcaagctgggaggaccaaggccgggcagccgggagcacccaaggcaggaaaatgaggtggctgcttctctattatgctctgtgcttctccctgtcaaaggcttcagcccacaccgtggagctaaacaatatgtttggccagatccagtcgcctggttatccagactcctatcccagtgattcagaggtgacttggaatatcactgtcccagatgggtttcggatcaagctttacttcatgcacttcaacttggaatcctcctacctttgtgaatatgactatgtgaaggtagaaactgaggaccaggtgctggcaaccttctgtggcagggagaccacagacacagagcagactcccggccaggaggtggtcctctcccctggctccttcatgtccatcactttccggtcagatttctccaatgaggagcgtttcacaggctttgatgcccactacatggctgtggatgtggacgagtgcaaggagagggaggacgaggagctgtcctgtgaccactactgccacaactacattggcggctactactgctcctgccgcttcggctacatcctccacacagacaacaggacctgccgagtggagtgcagtgacaacctcttcactcaaaggactggggtgatcaccagccctgacttcccaaacccttaccccaagagctctgaatgcctgtataccatcgagctggaggagggtttcatggtcaacctgcagtttgaggacatatttgacattgaggaccatcctgaggtgccctgcccctatgactacatcaagatcaaagttggtccaaaagttttggggcctttctgtggagagaaagccccagaacccatcagcacccagagccacagtgtcctgatcctgttccatagtgacaactcgggagagaaccggggctggaggctctcatacagggctgcaggaaatgagtgcccagagctacagcctcctgtccatgggaaaatcgagccctcccaagccaagtatttcttcaaagaccaagtgctcgtcagctgtgacacaggctacaaagtgctgaaggataatgtggagatggacacattccagattgagtgtctgaaggatgggacgtggagtaacaagattcccacctgtaaaaaaaatgaaatcgatctggagagcgaactcaagtcagagcaagtgacagagtgaatgacgggaccccacacaatgcagacatccagaaatggatcactcccaagacccctggggcccagagctgcaccacccctccccacccacaacacccccgtgcccctttccatgtggattagaatgggtgctgaacaacatgatctcagcagttgaagctgctacgtgtgtgaaagcaaattctccacttgagggtttgcccatcattcaaacactattccagaaaataatgaaaaaaaaatgtgggatttattttagcacctctgagtggactgtacttttctcaacggaaaaaaaaaatgcccttggtccttgagacaaaagatttaatatacaaccatgtggcctcaggctgaccagatcaaagtggtttctaatccattctacatgtcaagtttaaatgaaccagactgcctgtgactttatgaatctgaaggtattacctgttgctgctttcttaaccaccatgagtaggtaaagcaaataataactcacagagtgtggatgagaatctgaatgttttctcattcacaaaagtatcccttctacccctatctggcgcagggctgaaatgtcatcattagaggttctgaaaaagataggatcacacctgaaagcagtggtcccagctctgtgctgtgggacatcacaggtcctaaacagtgatagagaaagggctggggagtggcagctggaatctctgcttccgtctgaacatctggacacacatgtcagagaatctttgcattaaatggactgcccgatctatttggtgattaaatggctgtgcggtgaggggagaaccctgggcagtctggagactgaggtgccattctcggctagagacaccacccaaagaagagatgggctggctactaaagacaagtgtcagttgaataaatgtctttaaacctaaaaaatattaa

SEQ ID NO: 324997 - DNA, 5941 bp, Homo sapiens
gctgaagtcagccacacaggataaaggagggaagggaaggagcagatcttttcggtaggaagacagattttgttgtcaggttcctgggagtgcaagagcaagtcaaaggagagagagaggagagaggaaaagccagagggagagagggggagaggggatctgttgcaggcaggggaaggcgtgacctgaatggagaatgccagccaattccagagacacacagggacctcagaacaaagataaggcatcacggacaccacaccgggcacgagctcacaggcaagtcaagctgggaggaccaaggccgggcagccgggagcacccaaggcaggaaaatgaggtggctgcttctctattatgctctgtgcttctccctgtcaaaggcttcagcccacaccgtggagctaaacaatatgtttggccagatccagtcgcctggttatccagactcctatcccagtgattcagaggtgacttggaatatcactgtcccagatgggtttcggatcaagctttacttcatgcacttcaacttggaatcctcctacctttgtgaatatgactatgtgaaggtagaaactgaggaccaggtgctggcaaccttctgtggcagggagaccacagacacagagcagactcccggccaggaggtggtcctctcccctggctccttcatgtccatcactttccggtcagatttctccaatgaggagcgtttcacaggctttgatgcccactacatggctgtggatgtggacgagtgcaaggagagggaggacgaggagctgtcctgtgaccactactgccacaactacattggcggctactactgctcctgccgcttcggctacatcctccacacagacaacaggacctgccgagtggagtgcagtgacaacctcttcactcaaaggactggggtgatcaccagccctgacttcccaaacccttaccccaagagctctgaatgcctgtataccatcgagctggaggagggtttcatggtcaacctgcagtttgaggacatatttgacattgaggaccatcctgaggtgccctgcccctatgactacatcaagatcaaagttggtccaaaagttttggggcctttctgtggagagaaagccccagaacccatcagcacccagagccacagtgtcctgatcctgttccatagtgacaactcgggagagaaccggggctggaggctctcatacagggctgcaggaaatgagtgcccagagctacagcctcctgtccatgggaaaatcgagccctcccaagccaagtatttcttcaaagaccaagtgctcgtcagctgtgacacaggctacaaagtgctgaaggtgcagagccttgccctgggaaaggggagtgcccaggccacagaaactctccgaaacctgcccctccccagggcagatgggctgccagaacttgtcatagttccagcacagaatttcctagctgcccatcaacttctcaaatgctccagaaattccaaagcatgcgtcccaggcggtctcacactctgaaagtggcacaaaagtttgttttttttttttttttaatcagagcatgagctggtttgaatttttaaaatatggatccatacagctctataatcaaggctgagaactgtaacaaagttcatcgggcttatagaggggagtggagtgggataccaggaaaggaagtaaacagtttaaaagtagcaaatggggctgagcatggtggctcatgcctgtaatcccagcactttgggaggcccaggcgggtggatcacctgatctcaggagtttgagaccagcctggcaaatatggcaaaaccctatctctactaaataatacaaaaaatagccaggtgtggtggcgggcgcctgtaatcccagctacttgggaggctgaggcaggagaatcacttgaatccaggaggcagaggttgcagtgagctgagatcacgcctttgcactccagcctgggtgacaagagcaaaactccatctcaaaaaataaaaaaaggaacagatgggttcccctcactctcccacccccagaagcagtagttctaggaatcacatggttcgctttaaaaaaatcacctcccagctctcacttgagatcagttaaagcagactttttggggctgggaccagtgattggtgcagccaagctagaggaccatcgctttcaaggaatggttctcaaagaggggtgttcagtttcagcatcaccgggaacttgttagaaatgcaaatgcttgggtaggccagcctcactgaatcagaaactctgggggagaagcccagcagcctatgttttaacaagctctctaggagatgctgaccgcttgccctggtttgagaagcactgctctgaaaaaggagtcaatgcttaccgttttcccttcagagatagttgcccaaaccccttcttgcacacagcccttgcccctctccagagtatgaaaaggaggtatgaattcagcatgtatctttcccctaccttcaagctcacccttggaagcccatgggtggaaaatctcagtcgagatcaagacacgtgtggagcttgagttggttttgctaggaagataatgtggagatggacacattccagattgagtgtctgaaggatgggacgtggagtaacaagattcccacctgtaaaattgtagactgtagagccccaggagagctggaacacgggctgatcaccttctctacaaggaacaacctcaccacatacaagtctgagatcaaatactcctgtcaggagccctattacaagatgctcaacaataacacaggtatatatacctgttctgcccaaggagtctggatgaataaagtattggggagaagcctacccacctgccttccagagtgtggtcagccctcccgctccctgccaagcctggtcaagaggatcattgggggccgaaatgctgagcctggcctcttcccgtggcaggccctgatagtggtggaggacacttcgagagtgccaaatgacaagtggtttgggagtggggccctgctctctgcgtcctggatcctcacagcagctcatgtgctgcgctcccagcgtagagacaccacggtgataccagtctccaaggagcatgtcaccgtctacctgggcttgcatgatgtgcgagacaaatcgggggcagtcaacagctcagctgcccgagtggtgctccacccagacttcaacatccaaaactacaaccacgatatagctctggtgcagctgcaggagcctgtgcccctgggaccccacgttatgcctgtctgcctgccaaggcttgagcctgaaggcccggccccccacatgctgggcctggtggccggctggggcatctccaatcccaatgtgacagtggatgagatcatcagcagtggcacacggaccttgtcagatgtcctgcagtatgtcaagttacccgtggtgcctcacgctgagtgcaaaactagctatgagtcccgctcgggcaattacagcgtcacggagaacatgttctgtgctggctactacgagggcggcaaagacacgtgccttggagatagcggtggggcctttgtcatctttgatgacttgagccagcgctgggtggtgcaaggcctggtgtcctgggggggacctgaagaatgcggcagcaagcaggtctatggagtctacacaaaggtctccaattacgtggactgggtgtgggagcagatgggcttaccacaaagtgttgtggagccccaggtggaacggtgagctgacttacttcctcggggcctgcctcccctgagcgaagctacaccgcacttccgacagcacactccacattacttatcagaccatatggaatggaacacactgacctagcggtggcttctcctaccgagacagcccccaggaccctgagaggcagagtgtggtatagggaaaaggctccaggcaggagacctgtgttcctgagcttgtccaagtctctttccctgtctgggcctcactctaccgagtaatacaatgcaggagctcaaccaaggcctctgtgccaatcccagcactcctttccaggccatgcttcttaccccagtggcctttattcactcctgaccacttatcaaacccatcggtcctactgttggtataactgagcttggacctgactattagaaaatggtttctaacattgaactgaatgccgcatctgtatattttcctgctctgccttctgggactagccttggcctaatccttcctctaggagaagagcattcaggttttgggagatggctcatagccaagcccctctctcttagtgtgatcccttggagcaccttcatgcctggggtttctctcccaaaagcttcttgcagtctaagccttatcccttatgttccccattaaaggaatttcaaaagacatggagaaagttgggaaggtttgtgctgactgctgggagcagaatagccgtgggaggcccaccaagcccttaaattcccattgtcaactcagaacacatttgggcccatatgccaccctggaacaccagctgacaccatgggcgtccacacctgctgctccagacaagcacaaagcaatctttcagccttgaaatgtattatctgaaaggctacctgaagcccaggcccgaatatggggacttagtcgattacctggaaaaagaaaagacccacactgtgtcctgctgtgcttttgggcaggaaaatggaagaaagagtggggtgggcacattagaagtcacccaaatcctgccaggctgcctggcatccctggggcatgagctgggcggagaatccaccccgcaggatgttcagagggacccactccttcatttttcagagtcaaaggaatcagaggctcacccatggcaggcagtgaaaagagccaggagtcctgggttctagtccctgctctgcccccaactggctgtataacctttgaaaaatcattttctttgtctgagtctctggttctccgtcagcaacaggctggcataaggtcccctgcaggttccttctagctggagcactcagagcttccctgactgctagcagcctctctggccctcacagggctgattgttctccttctccctggagctctctctcctgaaaatctccatcagagcaaggcagccagagaagcccctgagagggaatgattgggaagtgtccacttctccaaccggctcatcaaacacactcctttgtctatgaatggcacatgtaaatgatgttatattttgtatcttttatatcatatgcttcaccattctgtaaagggcctctgcattgttgctcccatcaggggtctcaagtggaaataaaccctcgtggataaccaacaaaaaaaaaaaacacaacatctataaaatcaaaacacaaacaaacaacaacaataaaaataatatatcacacaccactactatcaccacaacaatactaccacacataaaacaacttcaaaacaacacgaaataaaaaaaatgttcttgcgcccccactccttccgctcggagcgtttctctcacaccacactcaccatctgtctgccgcagccgcacgcacaacacctatcaaatatataaatatacaccaacatcttcataaatttgtcctagtttcatgataccaaatcaactcatgaatccctctacatttaactacaaaccatgtcgtgatgtcatgtatttctatctttcacaccccataaaactcaaatccaactctcagcgcaccttcgctataccaaccacaaacttctttgttctttctttaacatcaatcacacaacatctccaaagtgaagcttctcatcgtatccgttctatcactatcgatcttagactttctatactcatacaccaatgccgccgtatcatcgcacgagcaatctactatattaataatatttcaccg

SEQ ID NO: 324998 - DNA, 5215 bp, Homo sapiens
  misc_feature (3626)..(3626): n is a, c, g, or t
  misc_feature (3647)..(3647): n is a, c, g, or t
  misc_feature (3800)..(3800): n is a, c, g, or t
  misc_feature (3826)..(3826): n is a, c, g, or t
gctgaagtcagccacacaggataaaggagggaagggaaggagcagatcttttcggtaggaagacagattttgttgtcaggttcctgggagtgcaagagcaagtcaaaggagagagagaggagagaggaaaagccagagggagagagggggagaggggatctgttgcaggcaggggaaggcgtgacctgaatggagaatgccagccaattccagagacacacagggacctcagaacaaagataaggcatcacggacaccacaccgggcacgagctcacaggcaagtcaagctgggaggaccaaggccgggcagccgggagcacccaaggcaggaaaatgaggtggctgcttctctattatgctctgtgcttctccctgtcaaaggcttcagcccacaccgtggagctaaacaatatgtttggccagatccagtcgcctggttatccagactcctatcccagtgattcagaggtgacttggaatatcactgtcccagatgggtttcggatcaagctttacttcatgcacttcaacttggaatcctcctacctttgtgaatatgactatgtgaaggtagaaactgaggaccaggtgctggcaaccttctgtggcagggagaccacagacacagagcagactcccggccaggaggtggtcctctcccctggctccttcatgtccatcactttccggtcagatttctccaatgaggagcgtttcacaggctttgatgcccactacatggctgtggatgtggacgagtgcaaggagagggaggacgaggagctgtcctgtgaccactactgccacaactacattggcggctactactgctcctgccgcttcggctacatcctccacacagacaacaggacctgccgagtggagtgcagtgacaacctcttcactcaaaggactggggtgatcaccagccctgacttcccaaacccttaccccaagagctctgaatgcctgtataccatcgagctggaggagggtttcatggtcaacctgcagtttgaggacatatttgacattgaggaccatcctgaggtgccctgcccctatgactacatcaagatcaaagttggtccaaaagttttggggcctttctgtggagagaaagccccagaacccatcagcacccagagccacagtgtcctgatcctgttccatagtgacaactcgggagagaaccggggctggaggctctcatacagggctgcaggaaatgagtgcccagagctacagcctcctgtccatgggaaaatcgagccctcccaagccaagtatttcttcaaagaccaagtgctcgtcagctgtgacacaggctacaaagtgctgaaggtgcagagccttgccctgggaaaggggagtgcccaggccacagaaactctccgaaacctgcccctccccagggcagatgggctgccagaacttgtcatagttccagcacagaatttcctagctgcccatcaacttctcaaatgctccagaaattccaaagcatgcgtcccaggcggtctcacactctgaaagtggcacaaaagtttgttttttttttttttttaatcagagcatgagctggtttgaatttttaaaatatggatccatacagctctataatcaaggctgagaactgtaacaaagttcatcgggcttatagaggggagtggagtgggataccaggaaaggaagtaaacagtttaaaagtagcaaatggggctgagcatggtggctcatgcctgtaatcccagcactttgggaggcccaggcgggtggatcacctgatctcaggagtttgagaccagcctggcaaatatggcaaaaccctatctctactaaataatacaaaaaatagccaggtgtggtggcgggcgcctgtaatcccagctacttgggaggctgaggcaggagaatcacttgaatccaggaggcagaggttgcagtgagctgagatcacgcctttgcactccagcctgggtgacaagagcaaaactccatctcaaaaaataaaaaaaggaacagatgggttcccctcactctcccacccccagaagcagtagttctaggaatcacatggttcgctttaaaaaaatcacctcccagctctcacttgagatcagttaaagcagactttttggggctgggaccagtgattggtgcagccaagctagaggaccatcgctttcaaggaatggttctcaaagaggggtgttcagtttcagcatcaccgggaacttgttagaaatgcaaatgcttgggtaggccagcctcactgaatcagaaactctgggggagaagcccagcagcctatgttttaacaagctctctaggagatgctgaccgcttgccctggtttgagaagcactgctctgaaaaaggagtcaatgcttaccgttttcccttcagagatagttgcccaaaccccttcttgcacacagcccttgcccctctccagagtatgaaaaggaggtatgaattcagcatgtatctttcccctaccttcaagctcacccttggaagcccatgggtggaaaatctcagtcgagatcaagacacgtgtggagcttgagttggttttgctaggaagataatgtggagatggacacattccagattgagtgtctgaaggatgggacgtggagtaacaagattcccacctgtaaaattgtagactgtagagccccaggagagctggaacacgggctgatcaccttctctacaaggaacaacctcaccacatacaagtctgagatcaaatactcctgtcaggagccctattacaagatgctcaacaataacacaggtatatatacctgttctgcccaaggagtctggatgaataaagtattggggagaagcctacccacctgccttccagtgtgtgggctccccaagttctcccggaagctgatggccaggatcttcaatggacgcccagcccagaaaggcaccactccctggattgccatgctgtcacacctgaatgggcagcccttctgcggaggctcccttctaggggcagtcagtagcagaggacgatcctccgatgaaagcagccatttctcctttccttcctcccatcccccctccttcggcctatccattactgggcaatagagcaggtatcttcacccccttttcactctctttaaagagatggagcaagagagtggtcagaacacaggccgaatccaggctctatcacttactagtttgcagtgctgggcaggtgacttcatctcttcgaacttcagtttcttcataagatggaaatgctataccttacctacctcgtaaaagtctgatgaggaaaagattaactaatagatgcatagcacttaacagagtgcatagcatacactgttttcaataaatgcaccttagcagaaggtcgatgtgtctaccaggcagacgaagctctcttacaaacccctgcctgggtcttagcattgatcagtgacacacctctcccctcaaccttgaccatctccatctgcccttaaatgctgtatgcttttttgccaccgtgcaacttgcccaacatcaatcttcaccctcatccctaaaaaagtaaaacagacaaggttctgagtcctgtggtatgtcccctagcaaatgtanctaggaacatgcactagatgncagattgcgggagggcctgagagaagcagggacaggagggagcctggggattgtggtttgggaaggcagacacctggttctagaactagctctgcccttagccccctgtatgaccctatgcaagtcctcctccctcatctcaaagggtcctcnaagctctgacgatctaagatacaatnaagccattttccccctgataagatgaggtaaagccaatgtaaccaaaaggcaaaaattacaatcggttcaaaggaactttgatgcagacaaaatgctgctgctgctgctcctgaaatacccacccctttccactacgggtgggttcccaaggacatgggacaggcaaagtgtgagccaaaggatccttccttattcctaagcagagcatctgctctgggccctggcctccttcccttcttgggaaactgggctgcatgaggtgggccctggtagtttgtaccccaggcccctatactcttccttcctatgtccacagctgaccccaagcagccgttccccgactcctcacccctgagcctcaccctgaactccctcatcttgcaaggccataagtgttttccaagcaaaatgcctctcccatcctctctcaggaagcttctagagactttatgccctccagagctccaagatataagccctccaagggatcagaagctccaagttcctgtcttctgttttatagaaattgatcttccctgggggactttaactcttgacctgtatgcagctgttggagtaattccaggtctcttgaaaaaaaagaggaagataatggagaatgagaacatatatatatatatattaagccccaggctgaatactcagggacagcaattcacagcctgcctctggttctataaacaagtcattctacctctttgtgccctgctgtttattctgtaaggggaaggtggcaatgggacccagctccatcagacacttgtcaagctagcagaaactccattttcaatgccaaagaagaactgtaatgctgttttggaatcatcccaaggcatcccaagacaccatatcttcccatttcaagcactgcctgggcacaccccaacatcccaggctgtggtggctcctgtgggaactacctagatgaagagagtatcatttataccttctaggagctcctattgggagacatgaaacatatgtaattgactaccatgtaatagaacaaaccctgccaagtgctgctttggaaagtcatggaggtaaaagaaagaccattctggtatgaaggttttgggggaggagatatcaatcaagaaggcttcccagaagaggtgactggaccagagccttgtccacaggtaagacggaggaggccttccacatggagggagaacaatagtaaatgtccactcaagatgtcctttattataccagctcctcccacaaaaacacatgtccagtggactctttttctgggatcagaaccaacaccaaaaagagcttttctccttaaagttagaattctaaacaggacttgaaatggcctcaaggtttgtgcacaaatactgacttctggctggacc

SEQ ID NO: 324999 - DNA, 1628 bp, Homo sapiens
gctgaagtcagccacacaggataaaggagggaagggaaggagcagatcttttcggtaggaagacagattttgttgtcaggttcctgggagtgcaagagcaagtcaaaggagagagagaggagagaggaaaagccagagggagagagggggagaggggatctgttgcaggcaggggaaggcgtgacctgaatggagaatgccagccaattccagagacacacagggacctcagaacaaagataaggcatcacggacaccacaccgggcacgagctcacaggcaagtcaagctgggaggaccaaggccgggcagccgggagcacccaaggcaggaaaatgaggtggctgcttctctattatgctctgtgcttctccctgtcaaaggcttcagcccacaccgtggagctaaacaatatgtttggccagatccagtcgcctggttatccagactcctatcccagtgattcagaggtgacttggaatatcactgtcccagatgggtttcggatcaagctttacttcatgcacttcaacttggaatcctcctacctttgtgaatatgactatgtgaaggtagaaactgaggaccaggtgctggcaaccttctgtggcagggagaccacagacacagagcagactcccggccaggaggtggtcctctcccctggctccttcatgtccatcactttccggtcagatttctccaatgaggagcgtttcacaggctttgatgcccactacatggctgtggatgtggacgagtgcaaggagagggaggacgaggagctgtcctgtgaccactactgccacaactacattggcggctactactgctcctgccgcttcggctacatcctccacacagacaacaggacctgccgagtggagtgcagtgacaacctcttcactcaaaggactggggtgatcaccagccctgacttcccaaacccttaccccaagagctctgaatgcctgtataccatcgagctggaggagggtttcatggtcaacctgcagtttgaggacatatttgacattgaggaccatcctgaggtgccctgcccctatgactacatcaaggtgagcctgcaatgaacacttgtcctggagatgctggaaaatcttggctgagttgggaaaattgatattgcggaaccttcaccttcttctcccaggatagagagcctagcagctagttcctcaaaaaggcattatttaaaataatatctaccatcttagttagatctattccaggaatctctgatccgaaatgaccccactggccactagggtggcttgaggaggagagtcgtgaatctgcattttagaaaggtctctggcgggcacgcccagcctcatgagcacgcctcccatgccgtcacacagggccctgtgcacagaagggcctcatgcttggtttaataaacatatgaaactatttttcttctgtttatttttttaacctactaccaaggcaaagaagaatgtatgaaaattttaatttgttttaaataagggtccccgtattttcattttgccccagacctcacaaattatgctgctgggcccacttgcgggaagaggctatgtcaaaggcaaataaagacggaacaaataccacaggcaaaa

SEQ ID NO: 325000 - DNA, 380 bp, Homo sapiens
ggggcttacaagttctatgtttcttaaaattcgctgattaaaaattttaaaaagataggatcacacctgaaagcagtggtcccagctctgtgctgtgggacatcacaggtcctaaacagtgatagagaaagggctggggagtggcagctggaatctctgcttccgtctgaacatctggacacacatgtcagagaatctttgcattaaatggactgcccgatctatttggtgattaaatggctgtgcggtgaggggagaaccctgggcagtctggagactgaggtgccattctcggctagagacaccacccaaagaagagatgggctggctactaaagacaagtgtcagttgaataaatgtctttaaacctaaaaaatatt

SEQ ID NO: 325001 - DNA, 396 bp, Homo sapiens
gtaatttctgtatttcctgcataaactgtttctgctttgcttgctaatctctctctctttctcttcctctctctgcttccttcctctgtatctcttgatccctctttgatcttcaccatggtggcagaaaatgaaatcgatctggagagcgaactcaagtcagagcaagtgacagagtgaatgacgggaccccacacaatgcagacatccagaaatggatcactcccaagacccctggggcccagagctgcaccacccctccccacccacaacacccccgtgcccctttccatgtggattagaatgggtgctgaacaacatgatctcagcagttgaagctgctacgtgtgtgaaagcaaattctccacttgagggtttgcccatcattcaaacact

SEQ ID NO: 325002 - DNA, 4124 bp, Homo sapiens
gctgaagtcagccacacaggataaaggagggaagggaaggagcagatcttttcggtaggaagacagattttgttgtcaggttcctgggagtgcaagagcaagtcaaaggagagagagaggagagaggaaaagccagagggagagagggggagaggggatctgttgcaggcaggggaaggcgtgacctgaatggagaatgccagccaattccagagacacacagggacctcagaacaaagataaggcatcacggacaccacaccgggcacgagctcacaggcaagtcaagctgggaggaccaaggccgggcagccgggagcacccaaggcaggaaaatgaggtggctgcttctctattatgctctgtgcttctccctgtcaaaggcttcagcccacaccgtggagctaaacaatatgtttggccagatccagtcgcctggttatccagactcctatcccagtgattcagaggtgacttggaatatcactgtcccagatgggtttcggatcaagctttacttcatgcacttcaacttggaatcctcctacctttgtgaatatgactatgtgaaggtagaaactgaggaccaggtgctggcaaccttctgtggcagggagaccacagacacagagcagactcccggccaggaggtggtcctctcccctggctccttcatgtccatcactttccggtcagatttctccaatgaggagcgtttcacaggctttgatgcccactacatggctgtggatgtggacgagtgcaaggagagggaggacgaggagctgtcctgtgaccactactgccacaactacattggcggctactactgctcctgccgcttcggctacatcctccacacagacaacaggacctgccgagtggagtgcagtgacaacctcttcactcaaaggactggggtgatcaccagccctgacttcccaaacccttaccccaagagctctgaatgcctgtataccatcgagctggaggagggtttcatggtcaacctgcagtttgaggacatatttgacattgaggaccatcctgaggtgccctgcccctatgactacatcaagatcaaagttggtccaaaagttttggggcctttctgtggagagaaagccccagaacccatcagcacccagagccacagtgtcctgatcctgttccatagtgacaactcgggagagaaccggggctggaggctctcatacagggctgcaggaaatgagtgcccagagctacagcctcctgtccatgggaaaatcgagccctcccaagccaagtatttcttcaaagaccaagtgctcgtcagctgtgacacaggctacaaagtgctgaaggataatgtggagatggacacattccagattgagtgtctgaaggatgggacgtggagtaacaagattcccacctgtaaaattgtagactgtagagccccaggagagctggaacacgggctgatcaccttctctacaaggaacaacctcaccacatacaagtctgagatcaaatactcctgtcaggagccctattacaagatgctcaacaataacacaggtatatatacctgttctgcccaaggagtctggatgaataaagtattggggagaagcctacccacctgccttccagagtgtggtcagccctcccgctccctgccaagcctggtcaagaggatcattgggggccgaaatgctgagcctggcctcttcccgtggcaggccctgatagtggtggaggacacttcgagagtgccaaatgacaagtggtttgggagtggggccctgctctctgcgtcctggatcctcacagcagctcatgtgctgcgctcccagcgtagagacaccacggtgataccagtctccaaggagcatgtcaccgtctacctgggcttgcatgatgtgcgagacaaatcgggggcagtcaacagctcagctgcccgagtggtgctccacccagacttcaacatccaaaactacaaccacgatatagctctggtgcagctgcaggagcctgtgcccctgggaccccacgttatgcctgtctgcctgccaaggcttgagcctgaaggcccggccccccacatgctgggcctggtggccggctggggcatctccaatcccaatgtgacagtggatgagatcatcagcagtggcacacggaccttgtcagatgtcctgcagtatgtcaagttacccgtggtgcctcacgctgagtgcaaaactagctatgagtcccgctcgggcaattacagcgtcacggagaacatgttctgtgctggctactacgagggcggcaaagacacgtgccttggagatagcggtggggcctttgtcatctttgatgacttgagccagcgctgggtggtgcaaggcctggtgtcctgggggggacctgaagaatgcggcagcaagcaggtctatggagtctacacaaaggtctccaattacgtggactgggtgtgggagcagatgggcttaccacaaagtgttgtggagccccaggtggaacggtgagctgacttacttcctcggggcctgcctcccctgagcgaagctacaccgcacttccgacagcacactccacattacttatcagaccatatggaatggaacacactgacctagcggtggcttctcctaccgagacagcccccaggaccctgagaggcagagtgtggtatagggaaaaggctccaggcaggagacctgtgttcctgagcttgtccaagtctctttccctgtctgggcctcactctaccgagtaatacaatgcaggagctcaaccaaggcctctgtgccaatcccagcactcctttccaggccatgcttcttaccccagtggcctttattcactcctgaccacttatcaaacccatcggtcctactgttggtataactgagcttggacctgactattagaaaatggtttctaacattgaactgaatgccgcatctgtatattttcctgctctgccttctgggactagccttggcctaatccttcctctaggagaagagcattcaggttttgggagatggctcatagccaagcccctctctcttagtgtgatcccttggagcaccttcatgcctggggtttctctcccaaaagcttcttgcagtctaagccttatcccttatgttccccattaaaggaatttcaaaagacatggagaaagttgggaaggtttgtgctgactgctgggagcagaatagccgtgggaggcccaccaagcccttaaattcccattgtcaactcagaacacatttgggcccatatgccaccctggaacaccagctgacaccatgggcgtccacacctgctgctccagacaagcacaaagcaatctttcagccttgaaatgtattatctgaaaggctacctgaagcccaggcccgaatatggggacttagtcgattacctggaaaaagaaaagacccacactgtgtcctgctgtgcttttgggcaggaaaatggaagaaagagtggggtgggcacattagaagtcacccaaatcctgccaggctgcctggcatccctggggcatgagctgggcggagaatccaccccgcaggatgttcagagggacccactccttcatttttcagagtcaaaggaatcagaggctcacccatggcaggcagtgaaaagagccaggagtcctgggttctagtccctgctctgcccccaactggctgtataacctttgaaaaatcattttctttgtctgagtctctggttctccgtcagcaacaggctggcataaggtcccctgcaggttccttctagctggagcactcagagcttccctgactgctagcagcctctctggccctcacagggctgattgttctccttctccctggagctctctctcctgaaaatctccatcagagcaaggcagccagagaagcccctgagagggaatgattgggaagtgtccacttctccaaccggctcatcaaacacactcctttgtctatgaatggcacatgtaaatgatgttatattttgtatcttttatatcatatgcttcaccattctgtaaagggcctctgcattgttgctcccatcaggggtctcaagtggaaataaaccctcgtggataaccaaca

SEQ ID NO: 325003 - DNA, 4422 bp, Homo sapiens
  misc_feature (1591)..(1591): n is a, c, g, or t
  misc_feature (2833)..(2833): n is a, c, g, or t
  misc_feature (2854)..(2854): n is a, c, g, or t
  misc_feature (3007)..(3007): n is a, c, g, or t
  misc_feature (3033)..(3033): n is a, c, g, or t
attccggcacagggacacaaacaagctcacccaacacaggcaagtcaagctgggaggaccaaggccgggcagccgggagcacccaaggcaggaaaatgaggtggctgcttctctattatgctctgtgcttctccctgtcaaaggcttcagcccacaccgtggagctaaacaatatgtttggccagatccagtcgcctggttatccagactcctatcccagtgattcagaggtgacttggaatatcactgtcccagatgggtttcggatcaagctttacttcatgcacttcaacttggaatcctcctacctttgtgaatatgactatgtgaaggtagaaactgaggaccaggtgctggcaaccttctgtggcagggagaccacagacacagagcagactcccggccaggaggtggtcctctcccctggctccttcatgtccatcactttccggtcagatttctccaatgaggagcgtttcacaggctttgatgcccactacatggctgtggatgtggacgagtgcaaggagagggaggacgaggagctgtcctgtgaccactactgccacaactacattggcggctactactgctcctgccgcttcggctacatcctccacacagacaacaggacctgccgagtggagtgcagtgacaacctcttcactcaaaggactggggtgatcaccagccctgacttcccaaacccttaccccaagagctctgaatgcctgtataccatcgagctggaggagggtttcatggtcaacctgcagtttgaggacatatttgacattgaggaccatcctgaggtgccctgcccctatgactacatcaagatcaaagttggtccaaaagttttggggcctttctgtggagagaaagccccagaacccatcagcacccagagccacagtgtcctgatcctgttccatagtgacaactcgggagagaaccggggctggaggctctcatacagggctgcaggaaatgagtgcccagagctacagcctcctgtccatgggaaaatcgagccctcccaagccaagtatttcttcaaagaccaagtgctcgtcagctgtgacacaggctacaaagtgctgaaggataatgtggagatggacacattccagattgagtgtctgaaggatgggacgtggagtaacaagattcccacctgtaaaattgtagactgtagagccccaggagagctggaacacgggctgatcaccttctctacaaggaacaacctcaccacatacaagtctgagatcaaatactcctgtcaggagccctattacaagatgctcaacaataacacaggtatatatacctgttctgcccaaggagtctggatgaataaagtattggggagaagcctacccacctgccttccagtgtgtgggctccccaagttctcccggaagctgatggccaggatcttcaatggacgcccagcccagaaaggcaccactccctggattgccatgctgtcacacctgaatgggcagcccttctgcggaggctcccttctaggctccagctggatcgtgaccgccgcacactgcctccaccagtcactcgatccggnagatccgaccctacgtgattcagacttgctcagcccttctgacttcaaaatcatcctgggcaagcattggaggctccggtcagatgaaaatgaacagcatctcggcgtcaaacacaccactctccacccccagtatgatcccaacacattcgagaatgacgtggctctggtggagctgttggagagcccagtgctgaatgccttcgtgatgcccatctgtctgcctgagggaccccagcaggaaggagccatggtcatcgtcagcggctgggggaagcagttcttgcaaaggttcccagagaccctgatggagattgaaatcccgattgttgaccacagcacctgccagaaggcttatgccccgctgaagaagaaagtgaccagggacatgatctgtgctggggagaaggaagggggaaaggacgcctgtgcgggtgactctggaggccccatggtgaccctgaatagagaaagaggccagtggtacctggtgggcactgtgtcctggggtgatgactgtgggaagaaggaccgctacggagtatactcttacatccaccacaacaaggactggatccagagggtcaccggagtgaggaactgaatttggctcctcagccccagcaccaccagctgtgggcagtcagtagcagaggacgatcctccgatgaaagcagccatttctcctttccttcctcccatcccccctccttcggcctatccattactgggcaatagagcaggtatcttcacccccttttcactctctttaaagagatggagcaagagagtggtcagaacacaggccgaatccaggctctatcacttactagtttgcagtgctgggcaggtgacttcatctcttcgaacttcagtttcttcataagatggaaatgctataccttacctacctcgtaaaagtctgatgaggaaaagattaactaatagatgcatagcacttaacagagtgcatagcatacactgttttcaataaatgcaccttagcagaaggtcgatgtgtctaccaggcagacgaagctctcttacaaacccctgcctgggtcttagcattgatcagtgacacacctctcccctcaaccttgaccatctccatctgcccttaaatgctgtatgcttttttgccaccgtgcaacttgcccaacatcaatcttcaccctcatccctaaaaaagtaaaacagacaaggttctgagtcctgtggtatgtcccctagcaaatgtanctaggaacatgcactagatgncagattgcgggagggcctgagagaagcagggacaggagggagcctggggattgtggtttgggaaggcagacacctggttctagaactagctctgcccttagccccctgtatgaccctatgcaagtcctcctccctcatctcaaagggtcctcnaagctctgacgatctaagatacaatnaagccattttccccctgataagatgaggtaaagccaatgtaaccaaaaggcaaaaattacaatcggttcaaaggaactttgatgcagacaaaatgctgctgctgctgctcctgaaatacccacccctttccactacgggtgggttcccaaggacatgggacaggcaaagtgtgagccaaaggatccttccttattcctaagcagagcatctgctctgggccctggcctccttcccttcttgggaaactgggctgcatgaggtgggccctggtagtttgtaccccaggcccctatactcttccttcctatgtccacagctgaccccaagcagccgttccccgactcctcacccctgagcctcaccctgaactccctcatcttgcaaggccataagtgttttccaagcaaaatgcctctcccatcctctctcaggaagcttctagagactttatgccctccagagctccaagatataagccctccaagggatcagaagctccaagttcctgtcttctgttttatagaaattgatcttccctgggggactttaactcttgacctgtatgcagctgttggagtaattccaggtctcttgaaaaaaaagaggaagataatggagaatgagaacatatatatatatatattaagccccaggctgaatactcagggacagcaattcacagcctgcctctggttctataaacaagtcattctacctctttgtgccctgctgtttattctgtaaggggaaggtggcaatgggacccagctccatcagacacttgtcaagctagcagaaactccattttcaatgccaaagaagaactgtaatgctgttttggaatcatcccaaggcatcccaagacaccatatcttcccatttcaagcactgcctgggcacaccccaacatcccaggctgtggtggctcctgtgggaactacctagatgaagagagtatcatttataccttctaggagctcctattgggagacatgaaacatatgtaattgactaccatgtaatagaacaaaccctgccaagtgctgctttggaaagtcatggaggtaaaagaaagaccattctggtatgaaggttttgggggaggagatatcaatcaagaaggcttcccagaagaggtgactggaccagagccttgtccacaggtaagacggaggaggccttccacatggagggagaacaatagtaaatgtccactcaagatgtcctttattataccagctcctcccacaaaaacacatgtccagtggactctttttctgggatcagaaccaacaccaaaaagagcttttctccttaaagttagaattctaaacaggacttgaaatggcctcaaggtttgtgcacaaatactgacttctggctggacc

SEQ ID NO: 325004 - DNA, 2479 bp, Homo sapiens
gctgaagtcagccacacaggataaaggagggaagggaaggagcagatcttttcggtaggaagacagattttgttgtcaggttcctgggagtgcaagagcaagtcaaaggagagagagaggagagaggaaaagccagagggagagagggggagaggggatctgttgcaggcaggggaaggcgtgacctgaatggagaatgccagccaattccagagacacacagggacctcagaacaaagataaggcatcacggacaccacaccgggcacgagctcacaggcaagtcaagctgggaggaccaaggccgggcagccgggagcacccaaggcaggaaaatgagacctacattcatgtctttcaggtggctgcttctctattatgctctgtgcttctccctgtcaaaggcttcagcccacaccgtggagctaaacaatatgtttggccagatccagtcgcctggttatccagactcctatcccagtgattcagaggtgacttggaatatcactgtcccagatgggtttcggatcaagctttacttcatgcacttcaacttggaatcctcctacctttgtgaatatgactatgtgaaggtagaaactgaggaccaggtgctggcaaccttctgtggcagggagaccacagacacagagcagactcccggccaggaggtggtcctctcccctggctccttcatgtccatcactttccggtcagatttctccaatgaggagcgtttcacaggctttgatgcccactacatggctgtggatgtggacgagtgcaaggagagggaggacgaggagctgtcctgtgaccactactgccacaactacattggcggctactactgctcctgccgcttcggctacatcctccacacagacaacaggacctgccgagtggagtgcagtgacaacctcttcactcaaaggactggggtgatcaccagccctgacttcccaaacccttaccccaagagctctgaatgcctgtataccatcgagctggaggagggtttcatggtcaacctgcagtttgaggacatatttgacattgaggaccatcctgaggtgccctgcccctatgactacatcaagatcaaagttggtccaaaagttttggggcctttctgtggagagaaagccccagaacccatcagcacccagagccacagtgtcctgatcctgttccatagtgacaactcgggagagaaccggggctggaggctctcatacagggctgcaggaaatgagtgcccagagctacagcctcctgtccatgggaaaatcgagccctcccaagccaagtatttcttcaaagaccaagtgctcgtcagctgtgacacaggctacaaagtgctgaaggataatgtggagatggacacattccagattgagtgtctgaaggatgggacgtggagtaacaagattcccacctgtaaaaaaaatgaaatcgatctggagagcgaactcaagtcagagcaagtgacagagtgaatgacgggaccccacacaatgcagacatccagaaatggatcactcccaagacccctggggcccagagctgcaccacccctccccacccacaacacccccgtgcccctttccatgtggattagaatgggtgctgaacaacatgatctcagcagttgaagctgctacgtgtgtgaaagcaaattctccacttgagggtttgcccatcattcaaacactattccagaaaataatgaaaaaaaaatgtgggatttattttagcacctctgagtggactgtacttttctcaacggaaaaaaaaaatgcccttggtccttgagacaaaagatttaatatacaaccatgtggcctcaggctgaccagatcaaagtggtttctaatccattctacatgtcaagtttaaatgaaccagactgcctgtgactttatgaatctgaaggtattacctgttgctgctttcttaaccaccatgagtaggtaaagcaaataataactcacagagtgtggatgagaatctgaatgttttctcattcacaaaagtatcccttctacccctatctggcgcagggctgaaatgtcatcattagaggttctgtcttctggggcttacaagttctatgtttcttaaaattcgctgattaaaaattttaaaaagataggatcacacctgaaagcagtggtcccagctctgtgctgtgggacatcacaggtcctaaacagtgatagagaaagggctggggagtggcagctggaatctctgcttccgtctgaacatctggacacacatgtcagagaatctttgcattaaatggactgcccgatctatttggtgattaaatggctgtgcggtgaggggagaaccctgggcagtctggagactgaggtgccattctcggctagagacaccacccaaagaagagatgggctggctactaaagacaagtgtcagttgaataaatgtctttaaacctaaaaaatattaa

SEQ ID NO: 325005 - DNA, 2406 bp, Homo sapiens
gctgaagtcagccacacaggataaaggagggaagggaaggagcagatcttttcggtaggaagacagattttgttgtcaggttcctgggagtgcaagagcaagtcaaaggagagagagaggagagaggaaaagccagagggagagagggggagaggggatctgttgcaggcaggggaaggcgtgacctgaatggagaatgccagccaattccagagacacacagggacctcagaacaaagataaggcatcacggacaccacaccgggcacgagctcacaggcaagtcaagctgggaggaccaaggccgggcagccgggagcacccaaggcaggaaaatgaggtggctgcttctctattatgctctgtgcttctccctgtcaaaggcttcagcccacaccgtggagctaaacaatatgtttggccagatccagtcgcctggttatccagactcctatcccagtgattcagaggtgacttggaatatcactgtcccagatgggtttcggatcaagctttacttcatgcacttcaacttggaatcctcctacctttgtgaatatgactatgtgaaggtagaaactgaggaccaggtgctggcaaccttctgtggcagggagaccacagacacagagcagactcccggccaggaggtggtcctctcccctggctccttcatgtccatcactttccggtcagatttctccaatgaggagcgtttcacaggctttgatgcccactacatggctgtggatgtggacgagtgcaaggagagggaggacgaggagctgtcctgtgaccactactgccacaactacattggcggctactactgctcctgccgcttcggctacatcctccacacagacaacaggacctgccgagtggagtgcagtgacaacctcttcactcaaaggactggggtgatcaccagccctgacttcccaaacccttaccccaagagctctgaatgcctgtataccatcgagctggaggagggtttcatggtcaacctgcagtttgaggacatatttgacattgaggaccatcctgaggtgccctgcccctatgactacatcaagatcaaagttggtccaaaagttttggggcctttctgtggagagaaagccccagaacccatcagcacccagagccacagtgtcctgatcctgttccatagtgacaactcgggagagaaccggggctggaggctctcatacagggctgcaggaaatgagtgcccagagctacagcctcctgtccatgggaaaatcgagccctcccaagccaagtatttcttcaaagaccaagtgctcgtcagctgtgacacaggctacaaagtgctgaaggataatgtggagatggacacattccagattgagtgtctgaaggatgggacgtggagtaacaagattcccacctgtaaaaaaaatgaaatcgatctggagagcgaactcaagtcagagcaagtgacagagtgaatgacgggaccccacacaatgcagacatccagaaatggatcactcccaagacccctggggcccagagctgcaccacccctccccacccacaacacccccgtgcccctttccatgtggattagaatgggtgctgaacaacatgatctcagcagttgaagctgctacgtgtgtgaaagcaaattctccacttgagggtttgcccatcattcaaacactattccagaaaataatgaaaaaaaaatgtgggatttattttagcacctctgagtggactgtacttttctcaacggaaaaaaaaaatgcccttggtccttgagacaaaagatttaatatacaaccatgtggcctcaggctgaccagatcaaagtggtttctaatccattctacatgtcaagtttaaatgaaccagactgcctgtgactttatgaatctgaaggtattacctgttgctgctgagaatctgaatgttttctcattcacaaaagtatcccttctacccctatctggcgcagggctgaaatgtcatcattagaggttctgtcttctggggcttacaagttctatgtttcttaaaattcgctgattaaaaattttaaaaagataggatcacacctgaaagcagtggtcccagctctgtgctgtgggacatcacaggtcctaaacagtgatagagaaagggctggggagtggcagctggaatctctgcttccgtctgaacatctggacacacatgtcagagaatctttgcattaaatggactgcccgatctatttggtgattaaatggctgtgcggtgaggggagaaccctgggcagtctggagactgaggtgccattctcggctagagacaccacccaaagaagagatgggctggctactaaagacaagtgtcagttgaataaatgtctttaaacctaaaaaatattaa

SEQ ID NO: 325006 - DNA, 5853 bp, Homo sapiens
  misc_feature (3076)..(3076): n is a, c, g, or t
  misc_feature (4264)..(4264): n is a, c, g, or t
  misc_feature (4285)..(4285): n is a, c, g, or t
  misc_feature (4438)..(4438): n is a, c, g, or t
  misc_feature (4464)..(4464): n is a, c, g, or t
gctgaagtcagccacacaggataaaggagggaagggaaggagcagatcttttcggtaggaagacagattttgttgtcaggttcctgggagtgcaagagcaagtcaaaggagagagagaggagagaggaaaagccagagggagagagggggagaggggatctgttgcaggcaggggaaggcgtgacctgaatggagaatgccagccaattccagagacacacagggacctcagaacaaagataaggcatcacggacaccacaccgggcacgagctcacaggcaagtcaagctgggaggaccaaggccgggcagccgggagcacccaaggcaggaaaatgaggtggctgcttctctattatgctctgtgcttctccctgtcaaaggcttcagcccacaccgtggagctaaacaatatgtttggccagatccagtcgcctggttatccagactcctatcccagtgattcagaggtgacttggaatatcactgtcccagatgggtttcggatcaagctttacttcatgcacttcaacttggaatcctcctacctttgtgaatatgactatgtgaaggtagaaactgaggaccaggtgctggcaaccttctgtggcagggagaccacagacacagagcagactcccggccaggaggtggtcctctcccctggctccttcatgtccatcactttccggtcagatttctccaatgaggagcgtttcacaggctttgatgcccactacatggctgtggatgtggacgagtgcaaggagagggaggacgaggagctgtcctgtgaccactactgccacaactacattggcggctactactgctcctgccgcttcggctacatcctccacacagacaacaggacctgccgagtggagtgcagtgacaacctcttcactcaaaggactggggtgatcaccagccctgacttcccaaacccttaccccaagagctctgaatgcctgtataccatcgagctggaggagggtttcatggtcaacctgcagtttgaggacatatttgacattgaggaccatcctgaggtgccctgcccctatgactacatcaagatcaaagttggtccaaaagttttggggcctttctgtggagagaaagccccagaacccatcagcacccagagccacagtgtcctgatcctgttccatagtgacaactcgggagagaaccggggctggaggctctcatacagggctgcaggaaatgagtgcccagagctacagcctcctgtccatgggaaaatcgagccctcccaagccaagtatttcttcaaagaccaagtgctcgtcagctgtgacacaggctacaaagtgctgaaggtgcagagccttgccctgggaaaggggagtgcccaggccacagaaactctccgaaacctgcccctccccagggcagatgggctgccagaacttgtcatagttccagcacagaatttcctagctgcccatcaacttctcaaatgctccagaaattccaaagcatgcgtcccaggcggtctcacactctgaaagtggcacaaaagtttgttttttttttttttttaatcagagcatgagctggtttgaatttttaaaatatggatccatacagctctataatcaaggctgagaactgtaacaaagttcatcgggcttatagaggggagtggagtgggataccaggaaaggaagtaaacagtttaaaagtagcaaatggggctgagcatggtggctcatgcctgtaatcccagcactttgggaggcccaggcgggtggatcacctgatctcaggagtttgagaccagcctggcaaatatggcaaaaccctatctctactaaataatacaaaaaatagccaggtgtggtggcgggcgcctgtaatcccagctacttgggaggctgaggcaggagaatcacttgaatccaggaggcagaggttgcagtgagctgagatcacgcctttgcactccagcctgggtgacaagagcaaaactccatctcaaaaaataaaaaaaggaacagatgggttcccctcactctcccacccccagaagcagtagttctaggaatcacatggttcgctttaaaaaaatcacctcccagctctcacttgagatcagttaaagcagactttttggggctgggaccagtgattggtgcagccaagctagaggaccatcgctttcaaggaatggttctcaaagaggggtgttcagtttcagcatcaccgggaacttgttagaaatgcaaatgcttgggtaggccagcctcactgaatcagaaactctgggggagaagcccagcagcctatgttttaacaagctctctaggagatgctgaccgcttgccctggtttgagaagcactgctctgaaaaaggagtcaatgcttaccgttttcccttcagagatagttgcccaaaccccttcttgcacacagcccttgcccctctccagagtatgaaaaggaggtatgaattcagcatgtatctttcccctaccttcaagctcacccttggaagcccatgggtggaaaatctcagtcgagatcaagacacgtgtggagcttgagttggttttgctaggaagataatgtggagatggacacattccagattgagtgtctgaaggatgggacgtggagtaacaagattcccacctgtaaaattgtagactgtagagccccaggagagctggaacacgggctgatcaccttctctacaaggaacaacctcaccacatacaagtctgagatcaaatactcctgtcaggagccctattacaagatgctcaacaataacacaggtatatatacctgttctgcccaaggagtctggatgaataaagtattggggagaagcctacccacctgccttccagtgtgtgggctccccaagttctcccggaagctgatggccaggatcttcaatggacgcccagcccagaaaggcaccactccctggattgccatgctgtcacacctgaatgggcagcccttctgcggaggctcccttctaggctccagctggatcgtgaccgccgcacactgcctccaccagtcactcgatccggnagatccgaccctacgtgattcagacttgctcagcccttctgacttcaaaatcatcctgggcaagcattggaggctccggtcagatgaaaatgaacagcatctcggcgtcaaacacaccactctccacccccagtatgatcccaacacattcgagaatgacgtggctctggtggagctgttggagagcccagtgctgaatgccttcgtgatgcccatctgtctgcctgagggaccccagcaggaaggagccatggtcatcgtcagcggctgggggaagcagttcttgcaaaggttcccagagaccctgatggagattgaaatcccgattgttgaccacagcacctgccagaaggcttatgccccgctgaagaagaaagtgaccagggacatgatctgtgctggggagaaggaagggggaaaggacgcctgtgcgggtgactctggaggccccatggtgaccctgaatagagaaagaggccagtggtacctggtgggcactgtgtcctggggtgatgactgtgggaagaaggaccgctacggagtatactcttacatccaccacaacaaggactggatccagagggtcaccggagtgaggaactgaatttggctcctcagccccagcaccaccagctgtgggcagtcagtagcagaggacgatcctccgatgaaagcagccatttctcctttccttcctcccatcccccctccttcggcctatccattactgggcaatagagcaggtatcttcacccccttttcactctctttaaagagatggagcaagagagtggtcagaacacaggccgaatccaggctctatcacttactagtttgcagtgctgggcaggtgacttcatctcttcgaacttcagtttcttcataagatggaaatgctataccttacctacctcgtaaaagtctgatgaggtttcaataaatgcaccttagcagaaggtcgatgtgtctaccaggcagacgaagctctcttacaaacccctgcctgggtcttagcattgatcagtgacacacctctcccctcaaccttgaccatctccatctgcccttaaatgctgtatgcttttttgccaccgtgcaacttgcccaacatcaatcttcaccctcatccctaaaaaagtaaaacagacaaggttctgagtcctgtggtatgtcccctagcaaatgtanctaggaacatgcactagatgncagattgcgggagggcctgagagaagcagggacaggagggagcctggggattgtggtttgggaaggcagacacctggttctagaactagctctgcccttagccccctgtatgaccctatgcaagtcctcctccctcatctcaaagggtcctcnaagctctgacgatctaagatacaatnaagccattttccccctgataagatgaggtaaagccaatgtaaccaaaaggcaaaaattacaatcggttcaaaggaactttgatgcagacaaaatgctgctgctgctgctcctgaaatacccacccctttccactacgggtgggttcccaaggacatgggacaggcaaagtgtgagccaaaggatccttccttattcctaagcagagcatctgctctgggccctggcctccttcccttcttgggaaactgggctgcatgaggtgggccctggtagtttgtaccccaggcccctatactcttccttcctatgtccacagctgaccccaagcagccgttccccgactcctcacccctgagcctcaccctgaactccctcatcttgcaaggccataagtgttttccaagcaaaatgcctctcccatcctctctcaggaagcttctagagactttatgccctccagagctccaagatataagccctccaagggatcagaagctccaagttcctgtcttctgttttatagaaattgatcttccctgggggactttaactcttgacctgtatgcagctgttggagtaattccaggtctcttgaaaaaaaagaggaagataatggagaatgagaacatatatatatatatattaagccccaggctgaatactcagggacagcaattcacagcctgcctctggttctataaacaagtcattctacctctttgtgccctgctgtttattctgtaaggggaaggtggcaatgggacccagctccatcagacacttgtcaagctagcagaaactccattttcaatgccaaagaagaactgtaatgctgttttggaatcatcccaaggcatcccaagacaccatatcttcccatttcaagcactgcctgggcacaccccaacatcccaggctgtggtggctcctgtgggaactacctagatgaagagagtatcatttataccttctaggagctcctattgggagacatgaaacatatgtaattgactaccatgtaatagaacaaaccctgccaagtgctgctttggaaagtcatggaggtaaaagaaagaccattctggtatgaaggttttgggggaggagatatcaatcaagaaggcttcccagaagaggtgactggaccagagccttgtccacaggtaagacggaggaggccttccacatggagggagaacaatagtaaatgtccactcaagatgtcctttattataccagctcctcccacaaaaacacatgtccagtggactctttttctgggatcagaaccaacaccaaaaagagcttttctccttaaagttagaattctaaacaggacttgaaatggcctcaaggtttgtgcacaaatactgacttctggctggacc

SEQ ID NO: 325007 - DNA, 740 bp, Homo sapiens
ttcaactgttccttcacctgtagcatggggcagtctcttagatcaagtctaaggtagacacaggtccgtccaggtatggagtggagaggagccgtcttcaggggtgtcagaatagcagaggcttctcagccggggatgaggaccaataacagctttgtgttctagattgaaatcccgattgttgaccacagcacctgccagaaggcttatgccccgctgaagaagaaagtgaccagggacatgatctgtgctggggagaaggaaggtgggttaagaggctggcatacaacaggggcgctgccagccagggagtggtgcagagccagcaagggagcacagaggcctcccaacctggtgggctggcagtgtgggggcgcgggggactggaggaaggccgtgggaggagggattccacaggagaagatgcatcggagaaaagatatttacaggatgctcatcattcccttcccaagttcagtgtttcccttaagaaagaggccttggccgggcacggtggttcatgcctgtaatcccagcactttgggaggccgaggcgggtggatcacctgaggtcgggagttcgagaccagtcttgctaacatggcgaaatcccatctttactaaaaatacaaaaattagccgggcatggtggcaggtgcctgtagtcccagctactcgggaggctgaggagggagaatcacttgaacccaggaggtagaggttgctgtgagccgagatcg

SEQ ID NO: 325008 - DNA, 1671 bp, Homo sapiens
gttcaacttttgttttctacccttctagacattttgtgcgtatatgtacacatatgtgagtagtaaatgagcacttaattagaataatagacctttctcattagtatgagttcttttacttcctgtaaacaagcacactaaaaactttaattttttcagatggactgagctgtgtccaatgattgaagccaggaagaatcatgggctggtatttgtaaaagacaagatatttgctgtgggtggtcagaatggtttaggtggtctggacaatgtggaatattacgatattaagttgaacgaatggaagatggtctcaccaatgccatggaagggtgtaacagtgaaatgtgcagcagttggctctatagtttatgtcttggctggttttcagggtgttggtcgattaggacacattctcgaatataataccgaaacagacaaatgggttgccaactccaaagttcgtgcttttccagtcacaagttgtttaatttgtgttgtcgatacttgtggagcaaatgaagagacccttgaaacatgaaaaatgagtggacttcagactcatcagagactctaaaatatagccaccagtgctttgttccaggagtttggtgacaaagttttggtttggtgtttggtaaagaaagtttcaagtgaaatgaggttcctataaaatagatgtttcttttatatggatttccttaattcaaagatcatattttagctggccacaaaaccaagaacatatctagcaagaaaacttgaaaaagtataagcatttgttaaaaatgtgaatttcttgaatgaatttcacatttgtaactatgattttggcagaatagaagattggctcatcagtgaagcgcagtatcttagctctagattctattttcatgcatcacagaagtgctatacggttaggtctgtttgtgctcagtcaagaactaagaaatagtatgaattgtaagtcaagatgggcaactcagatggagcagcttagtctcacagtttgcttgtctatttattttatttagtgccaaatgtattccattttaaaagtaagccagagtgagtcaaggcatatacacactttctcacaaaacttcctaaacagatttgggggtttaatatgtccaactcctcatgaaatatattcaatccacttaaatatattccatctttttaacataaaatgtaaagcttagcacccatcattaatttatgtctctgttttatccagtggttaaaaaaggattctgcctctttagtcctcactgttaaataaaacccaatcatagtaagtgattaactagcaaaaagtaaagctatttatagcaaatttctagatcattagaaaagcactggtagttgtacaatatcagtgttgactttgaacttctttaacgagatcatgaattcttttcccttagccaaaacatgaaatatttaacctagttgtctctaaaagttttgtaatcatgagttagatatatgtcatctcctattcattgcttttatgtgatcaataaatcttttacaaacccaactactcatttccttcctagtaatactttgcctttttcactgtgtatggaatgaaacatgtaaagctgtcacaatcaatgtttttatctgataatattaaatattttttaacttaaaaaaaaaaac

SEQ ID NO: 325009 - DNA, 3022 bp, Homo sapiens
tcctgggcagggctggggttctgcccggggacgcagcccagttggtagcgtcgctccctgagcgtttctaagggggccgcccggccttgtctttcggcagtggccgagccaccgccgcctgccgcgcgttccagagctgggcgctgcagctgcactgccgatcgccgtgtttggtcgatagaatccccagtgtgcccagagagtgcgacccctcgcccggcccggcgagccccgggcgtgaaccgagctgagggaggatggcagcctctggggtggagaagagcagcaagaagaagaccgagaagaaacttgctgctcgggaagaagctaaattgttggcgggtttcatgggcgtcatgaataacatgcggaaacagaaaacgttgtgtgacgtgatcctcatggtccaggaaagaaagatacctgctcatcgtgttgttcttgctgcagccagtcatttttttaacttaatgttcacaactaacatgcttgaatcaaagtcctttgaagtagaactcaaagatgctgaacctgatattattgaacaactggtggaatttgcttatactgctagaatttccgtgaatagcaacaatgttcagtctttgctggatgcagcaaaccaatatcagattgaacctgtgaagaaaatgtgtgttgattttttgaaagaacaagttgatgcttcaaattgtcttggtataagtgtgctagcggagtgtctagattgtcctgaattgaaagcaactgcagatgactttattcatcagcactttactgaagtttacaaaactgatgaatttcttcaacttgatgtcaagcgagtaacacatcttctcaaccaggacactctgactgtgagagcagaggatcaggtttatgatgctgcagtcaggtggttgaaatacgatgaacctaatcgccagccatttatggttgatatccttgctaaagtcaggtttcctcttatatcaaagaatttcttaagtaaaacggtacaagctgaaccacttattcaagacaatcctgaatgccttaagatggtgataagtggaatgaggtaccatctactgtctccagaggaccgagaagaacttgtagatggcacaagacctagaagaaagaaacatgactaccgcatagccctatttggaggctctcaaccacagtcttgtagatattttaacccaaaggattatagctggacagacatccgctgcccctttgaaaaacgaagagatgcagcatgcgtgttttgggacaatgtagtatacattttgggaggctctcagcttttcccaataaagcgaatggactgctataatgtagtgaaggatagctggtattcgaaactgggtcctccgacacctcgagacagccttgctgcatgtgctgcagaaggcaaaatttatacatctggaggttcagaagtaggaaactcagctctgtatttatttgagtgctatgatacgagaactgaaagctggcacacaaagcccagcatgctgacccagcgctgcagccatgggatggtggaagccaatggcctaatctatgtttgtggtggaagtttaggaaacaatgtttctgggagagtgcttaattcctgtgaagtttatgatcctgccacagaaacatggactgagctgtgtccaatgattgaagccaggaagaatcatgggctggtatttgtaaaagacaagatatttgctgtgggtggtcagaatggtttaggtggtctggacaatgtggaatattacgatattaagttgaacgaatggaagatggtctcaccaatgccatggaagggtgtaacagtgaaatgtgcagcagttggctctatagtttatgtcttggctggttttcagggtgttggtcgattaggacacattctcgaatataataccgaaacagacaaatgggttgccaactccaaagttcgtgcttttccagtcacaagttgtttaatttgtgttgtcgatacttgtggagcaaatgaagagacccttgaaacatgaaaaatgagtggacttcagactcatcagagactctaaaatatagccaccagtgctttgttccaggagtttggtgacaaagttttggtttggtgtttggtaaagaaagtttcaagtgaaatgaggttcctataaaatagatgtttcttttatatggatttccttaattcaaagatcatattttagctggccacaaaaccaagaacatatctagcaagaaaacttgaaaaagtataagcatttgttaaaaatgtgaatttcttgaatgaatttcacatttgtaactatgattttggcagaatagaagattggctcatcagtgaagcgcagtatcttagctctagattctattttcatgcatcacagaagtgctatacggttaggtctgtttgtgctcagtcaagaactaagaaatagtatgaattgtaagtcaagatgggcaactcagatggagcagcttagtctcacagtttgcttgtctatttattttatttagtgccaaatgtattccattttaaaagtaagccagagtgagtcaaggcatatacacactttctcacaaaacttcctaaacagatttgggggtttaatatgtccaactcctcatgaaatatattcaatccacttaaatatattccatctttttaacataaaatgtaaagcttagcacccatcattaatttatgtctctgttttatccagtggttaaaaaaggattctgcctctttagtcctcactgttaaataaaacccaatcatagtaagtgattaactagcaaaaagtaaagctatttatagcaaatttctagatcattagaaaagcactggtagttgtacaatatcagtgttgactttgaacttctttaacgagatcatgaattcttttcccttagccaaaacatgaaatatttaacctagttgtctctaaaagttttgtaatcatgagttagatatatgtcatctcctattcattgcttttatgtgatcaataaatcttttacaaaccca

SEQ ID NO: 325010 - DNA, 483 bp, Homo sapiens
cattccacagtaacatttaaataataaaaaatcatgggtaactaatattccctctaacttatttgcagaatttccgtgaatagcaacaatgttcagtctttgctggatgcagcaaaccaatatcagattgaacctgtgaagaaaatgtgtgttgattttttgaaagaacaagttgatgcttcaaattgtcttggagaagcagaaaaagttgatcagagccttccagagtgtggtatgcttttcactgtgtgatgatccttagtggcacatgaatgaacgtccagatgtttgtgcagtagcccacccttatctgcaggatacgttccaagacccccagtgaatgcctgaaactgcagatagtactgaatcctatatatactgtgttttttatgatacatacatgcctatgatgaagtttaatttctaaattagacagtaaaagattaacaacaataataataaaatagaacaactttaacaata

SEQ ID NO: 325011 - DNA, 3148 bp, Homo sapiens
tcctgggcagggctggggttctgcccggggacgcagcccagttggtagcgtcgctccctgagcgtttctaagggggccgcccggccttgtctttcggcagtggccgagccaccgccgcctgccgcgcgttccagagctgggcgctgcagctgcactgccgatcgccgtgtttggtcgatagaatccccagtgtgcccagagagtgcgacccctcgcccggcccggcgagccccgggcgtgaaccgagctgagggaggatggcagcctctggggtggagaagagcagcaagaagaagaccgagaagaaacttgctgctcgggaagaagctaaattgttggcgggtttcatgggcgtcatgaataacatgcggaaacagaaaacgttgtgtgacgtgatcctcatggtccaggaaagaaagatacctgctcatcgtgttgttcttgctgcagccagtcatttttttaacttaatgttcacaactaacatgcttgaatcaaagtcctttgaagtagaactcaaagatgctgaacctgatattattgaacaactggtggaatttgcttatactgctagaatttccgtgaatagcaacaatgttcagtctttgctggatgcagcaaaccaatatcagattgaacctgtgaagaaaatgtgtgttgattttttgaaagaacaagttgatgcttcaaattgtcttggtataagtgtgctagcggagtgtctagattgtcctgaattgaaagcaactgcagatgactttattcatcagcactttactgaagtttacaaaactgatgaatttcttcaacttgatgtcaagcgagtaacacatcttctcaaccaggacactctgactgtgagagcagaggatcaggtttatgatgctgcagtcaggtggttgaaatacgatgaacctaatcgccagccatttatggttgatatccttgctaaagtcaggtttcctcttatatcaaagaatttcttaagtaaaacggtacaagctgaaccacttattcaagacaatcctgaatgccttaagatggtgataagtggaatgaggtaccatctactgtctccagaggaccgagaagaacttgtagatggcacaagacctagaagaaagaaacatgactaccgcatagccctatttggaggctctcaaccacagtcttgtagatattttaacccaaaggattatagctggacagacatccgctgcccctttgaaaaacgaagagatgcagcatgcgtgttttgggacaatgtagtatacattttgggaggctctcagcttttcccaataaagcgaatggactgctataatgtagtgaaggatagctggtattcgaaactgggtcctccgacacctcgagacagccttgctgcatgtgctgcagaaggcaaaatttatacatctggaggttcagaagtaggaaactcagctctgtatttatttgagtgctatgatacgagaactgaaagctggcacacaaagcccagcatgctgacccagcgctgcagccatgggatggtggaagccaatggcctaatctatgtttgtggtggaagtttaggaaacaatgtttctgggagagtgcttaattcctgtgaagtttatgatcctgccacagaaacatggactgagctgtgtccaatgattgaagccaggaagaatcatgggctggtatttgtaaaagacaagatatttgctgtgggtggtcagaatggtttaggtggtctggacaatgtggaatattacgatattaagttgaacgaatggaagatggtctcaccaatgccatggaagggtgtaacagtgaaatgtgcagcagttggctctatagtttatgtcttggctggttttcagggtgttggtcgattaggacacattctcgaatataataccgaaacagacaaatgggttgccaactccaaagttcgtgcttttccagtcacaagttgtttaatttgtgttgtcgatacttgtggagcaaatgaagagacccttgaaacatgaaaaatgagtggacttcagactcatcagagactctaaaatatagccaccagtgctttgttccaggagtttggtgacaaagttttggtttggtgtttggtaaagaaagtttcaagtgaaatgaggttcctataaaatagatgtttcttttatatggatttccttaattcaaagatcatattttagctggccacaaaaccaagaacatatctagcaagaaaacttgaaaaagtataagcatttgttaaaaatgtgaatttcttgaatgaatttcacatttgtaactatgattttggcagaatagaagattggctcatcagtgaagcgcagtatcttagctctagattctattttcatgcatcacagaagtgctatacggttaggtctgtttgtgctcagtcaagaactaagaaatagtatgaattgtaagtcaagatgggcaactcagatggagcagcttagtctcacagtttgcttgtctatttattttatttagtgccaaatgtattccattttaaaagtaagccagagtgagtcaaggcatatacacactttctcacaaaacttcctaaacagatttgggggtttaatatgtccaactcctcatgaaatatattcaatccacttaaatatattccatctttttaacataaaatgtaaagcttagcacccatcattaatttatgtctctgttttatccagtggttaaaaaaggattctgcctctttagtcctcactgttaaataaaacccaatcatagtaagtgattaactagcaaaaagtaaagctatttatagcaaatttctagatcattagaaaagcactggtagttgtacaatatcagtgttgactttgaacttctttaacgagatcatgaattcttttcccttagccaaaacatgaaatatttaacctagttgtctctaaaagttttgtaatcatgagttagatatatgtcatctcctattcattgcttttatgtgatcaataaatcttttacaaacccaactactcatttccttcctagtaatactttgcctttttcactgtgtatggaatgaaacatgtaaagctgtcacaatcaatgtttttatctgataatattaaatattttttaacttaaaaaaaaaaac

SEQ ID NO: 325012 - DNA, 3273 bp, Homo sapiens
agcggagttggtagaggggcgcgtaaaacaattctcgagcaaaagtgcttctcgtctgccgaggatgtagctcccaagtcagactcctgggggactcctcaggctggctttcgccgtcgggtatcggttgtgtaacagctctgccctagttatctctttgtggggcgaggatccttccattggcgagccgttttaaggtgccgtgagatcttgtgtgaagaaacccgttggcatagcccaaaccgaagcccccaaagggaggagagttgctggcctgacatcagctgctcttaaataaggatccccgccccctcctgtgttccccggtggagctagttgaagaggagtcctcctgttcgtgctaatttagagcagaagcagccatcgataaataccatgccatcttctaagggcactgtgcgcctctgttattaagaggagctctttgttctgtccttggtgtgtggtgcattcgtgaaattctgcagcacatcggcgaaagaaaacgttgtgtgacgtgatcctcatggtccaggaaagaaagatacctgctcatcgtgttgttcttgctgcagccagtcatttttttaacttaatgttcacaactaacatgcttgaatcaaagtcctttgaagtagaactcaaagatgctgaacctgatattattgaacaactggtggaatttgcttatactgctagaatttccgtgaatagcaacaatgttcagtctttgctggatgcagcaaaccaatatcagattgaacctgtgaagaaaatgtgtgttgattttttgaaagaacaagttgatgcttcaaattgtcttggtataagtgtgctagcggagtgtctagattgtcctgaattgaaagcaactgcagatgactttattcatcagcactttactgaagtttacaaaactgatgaatttcttcaacttgatgtcaagcgagtaacacatcttctcaaccaggacactctgactgtgagagcagaggatcaggtttatgatgctgcagtcaggtggttgaaatacgatgaacctaatcgccagccatttatggttgatatccttgctaaagtcaggtttcctcttatatcaaagaatttcttaagtaaaacggtacaagctgaaccacttattcaagacaatcctgaatgccttaagatggtgataagtggaatgaggtaccatctactgtctccagaggaccgagaagaacttgtagatggcacaagacctagaagaaagaaacatgactaccgcatagccctatttggaggctctcaaccacagtcttgtagatattttaacccaaaggattatagctggacagacatccgctgcccctttgaaaaacgaagagatgcagcatgcgtgttttgggacaatgtagtatacattttgggaggctctcagcttttcccaataaagcgaatggactgctataatgtagtgaaggatagctggtattcgaaactgggtcctccgacacctcgagacagccttgctgcatgtgctgcagaaggcaaaatttatacatctggaggttcagaagtaggaaactcagctctgtatttatttgagtgctatgatacgagaactgaaagctggcacacaaagcccagcatgctgacccagcgctgcagccatgggatggtggaagccaatggcctaatctatgtttgtggtggaagtttaggaaacaatgtttctgggagagtgcttaattcctgtgaagtttatgatcctgccacagaaacatggactgagctgtgtccaatgattgaagccaggaagaatcatgggctggtatttgtaaaagacaagatatttgctgtgggtggtcagaatggtttaggtggtctggacaatgtggaatattacgatattaagttgaacgaatggaagatggtctcaccaatgccatggaagggtgtaacagtgaaatgtgcagcagttggctctatagtttatgtcttggctggttttcagggtgttggtcgattaggacacattctcgaatataataccgaaacagacaaatgggttgccaactccaaagttcgtgcttttccagtcacaagttgtttaatttgtgttgtcgatacttgtggagcaaatgaagagacccttgaaacatgaaaaatgagtggacttcagactcatcagagactctaaaatatagccaccagtgctttgttccaggagtttggtgacaaagttttggtttggtgtttggtaaagaaagtttcaagtgaaatgaggttcctataaaatagatgtttcttttatatggatttccttaattcaaagatcatattttagctggccacaaaaccaagaacatatctagcaagaaaacttgaaaaagtataagcatttgttaaaaatgtgaatttcttgaatgaatttcacatttgtaactatgattttggcagaatagaagattggctcatcagtgaagcgcagtatcttagctctagattctattttcatgcatcacagaagtgctatacggttaggtctgtttgtgctcagtcaagaactaagaaatagtatgaattgtaagtcaagatgggcaactcagatggagcagcttagtctcacagtttgcttgtctatttattttatttagtgccaaatgtattccattttaaaagtaagccagagtgagtcaaggcatatacacactttctcacaaaacttcctaaacagatttgggggtttaatatgtccaactcctcatgaaatatattcaatccacttaaatatattccatctttttaacataaaatgtaaagcttagcacccatcattaatttatgtctctgttttatccagtggttaaaaaaggattctgcctctttagtcctcactgttaaataaaacccaatcatagtaagtgattaactagcaaaaagtaaagctatttatagcaaatttctagatcattagaaaagcactggtagttgtacaatatcagtgttgactttgaacttctttaacgagatcatgaattcttttcccttagccaaaacatgaaatatttaacctagttgtctctaaaagttttgtaatcatgagttagatatatgtcatctcctattcattgcttttatgtgatcaataaatcttttacaaacccaactactcatttccttcctagtaatactttgcctttttcactgtgtatggaatgaaacatgtaaagctgtcacaatcaatgtttttatctgataatattaaatattttttaacttaaaaaaaaaaac

SEQ ID NO: 325013 - DNA, 3116 bp, Homo sapiens
ttacgatattaagttgaacgaatggaagatggtctcaccaatgccatggaagggtgtaccggcgagccccgggcgtgaaccgagctgagggaggatggcagcctctggggtggagaagagcagcaagaagaagaccgagaagaaacttgctgctcgggaagaagctaaattgttggcgggtttcatgggcgtcatgaataacatgcggaaacagtgatttaaatctaccacccagctgtagttgaatctacaatctgctcagggatttatactcaatgccaatttgatatcatgctgggagggactgattgcagaaccttcttgacaagccacataaatctaaagaaaacgttgtgtgacgtgatcctcatggtccaggaaagaaagatacctgctcatcgtgttgttcttgctgcagccagtcatttttttaacttaatgttcacaactaacatgcttgaatcaaagtcctttgaagtagaactcaaagatgctgaacctgatattattgaacaactggtggaatttgcttatactgctagaatttccgtgaatagcaacaatgttcagtctttgctggatgcagcaaaccaatatcagattgaacctgtgaagaaaatgtgtgttgattttttgaaagaacaagttgatgcttcaaattgtcttggtataagtgtgctagcggagtgtctagattgtcctgaattgaaagcaactgcagatgactttattcatcagcactttactgaagtttacaaaactgatgaatttcttcaacttgatgtcaagcgagtaacacatcttctcaaccaggacactctgactgtgagagcagaggatcaggtttatgatgctgcagtcaggtggttgaaatacgatgaacctaatcgccagccatttatggttgatatccttgctaaagtcaggtttcctcttatatcaaagaatttcttaagtaaaacggtacaagctgaaccacttattcaagacaatcctgaatgccttaagatggtgataagtggaatgaggtaccatctactgtctccagaggaccgagaagaacttgtagatggcacaagacctagaagaaagaaacatgactaccgcatagccctatttggaggctctcaaccacagtcttgtagatattttaacccaaaggattatagctggacagacatccgctgcccctttgaaaaacgaagagatgcagcatgcgtgttttgggacaatgtagtatacattttgggaggctctcagcttttcccaataaagcgaatggactgctataatgtagtgaaggatagctggtattcgaaactgggtcctccgacacctcgagacagccttgctgcatgtgctgcagaaggcaaaatttatacatctggaggttcagaagtaggaaactcagctctgtatttatttgagtgctatgatacgagaactgaaagctggcacacaaagcccagcatgctgacccagcgctgcagccatgggatggtggaagccaatggcctaatctatgtttgtggtggaagtttaggaaacaatgtttctgggagagtgcttaattcctgtgaagtttatgatcctgccacagaaacatggactgagctgtgtccaatgattgaagccaggaagaatcatgggctggtatttgtaaaagacaagatatttgctgtgggtggtcagaatggtttaggtggtctggacaatgtggaatattacgatattaagttgaacgaatggaagatggtctcaccaatgccatggaagggtgtaacagtgaaatgtgcagcagttggctctatagtttatgtcttggctggttttcagggtgttggtcgattaggacacattctcgaatataataccgaaacagacaaatgggttgccaactccaaagttcgtgcttttccagtcacaagttgtttaatttgtgttgtcgatacttgtggagcaaatgaagagacccttgaaacatgaaaaatgagtggacttcagactcatcagagactctaaaatatagccaccagtgctttgttccaggagtttggtgacaaagttttggtttggtgtttggtaaagaaagtttcaagtgaaatgaggttcctataaaatagatgtttcttttatatggatttccttaattcaaagatcatattttagctggccacaaaaccaagaacatatctagcaagaaaacttgaaaaagtataagcatttgttaaaaatgtgaatttcttgaatgaatttcacatttgtaactatgattttggcagaatagaagattggctcatcagtgaagcgcagtatcttagctctagattctattttcatgcatcacagaagtgctatacggttaggtctgtttgtgctcagtcaagaactaagaaatagtatgaattgtaagtcaagatgggcaactcagatggagcagcttagtctcacagtttgcttgtctatttattttatttagtgccaaatgtattccattttaaaagtaagccagagtgagtcaaggcatatacacactttctcacaaaacttcctaaacagatttgggggtttaatatgtccaactcctcatgaaatatattcaatccacttaaatatattccatctttttaacataaaatgtaaagcttagcacccatcattaatttatgtctctgttttatccagtggttaaaaaaggattctgcctctttagtcctcactgttaaataaaacccaatcatagtaagtgattaactagcaaaaagtaaagctatttatagcaaatttctagatcattagaaaagcactggtagttgtacaatatcagtgttgactttgaacttctttaacgagatcatgaattcttttcccttagccaaaacatgaaatatttaacctagttgtctctaaaagttttgtaatcatgagttagatatatgtcatctcctattcattgcttttatgtgatcaataaatcttttacaaacccaactactcatttccttcctagtaatactttgcctttttcactgtgtatggaatgaaacatgtaaagctgtcacaatcaatgtttttatctgataatattaaatattttttaacttaaaaaaaaaaac

SEQ ID NO: 325014 - DNA, 1836 bp, Homo sapiens
  misc_feature (1790)..(1790): n is a, c, g, or t
  misc_feature (1795)..(1795): n is a, c, g, or t
  misc_feature (1836)..(1836): n is a, c, g, or t
tcctgggcagggctggggttctgcccggggacgcagcccagttggtagcgtcgctccctgagcgtttctaagggggccgcccggccttgtctttcggcagtggccgagccaccgccgcctgccgcgcgttccagagctgggcgctgcagctgcactgccgatcgccgtgtttggtcgatagaatccccagtgtgcccagagagtgcgacccctcgcccggcccggcgagccccgggcgtgaaccgagctgagggaggatggcagcctctggggtggagaagagcagcaagaagaagaccgagaagaaacttgctgctcgggaagaagctaaattgttggcgggtttcatgggcgtcatgaataacatgcggaaacagaaaacgttgtgtgacgtgatcctcatggtccaggaaagaaagatacctgctcatcgtgttgttcttgctgcagccagtcatttttttaacttaatgttcacaactaacatgcttgaatcaaagtcctttgaagtagaactcaaagatgctgaacctgatattattgaacaactggtggaatttgcttatactgctagaatttccgtgaatagcaacaatgttcagtctttgctggatgcagcaaaccaatatcagattgaacctgtgaagaaaatgtgtgttgattttttgaaagaacaagttgatgcttcaaattgtcttggtataagtgtgctagcggagtgtctagattgtcctgaattgaaagcaactgcagatgactttattcatcagcactttactgaagtttacaaaactgatgaatttcttcaacttgatgtcaagcgagtaacacatcttctcaaccaggacactctgactgtgagagcagaggatcaggtttatgatgctgcagtcaggtggttgaaatacgatgaacctaatcgccagccatttatggttgatatccttgctaaagtcaggtttcctcttatatcaaagaatttcttaagtaaaacggtacaagctgaaccacttattcaagacaatcctgaatgccttaagatggtgataagtggaatgaggtaccatctactgtctccagaggaccgagaagaacttgtagatggcacaagacctagaagaaagaaacatgactaccgcatagccctatttggaggctctcaaccacagtcttgtagatattttaacccaaaggattatagctggacagacatccgctgcccctttgaaaaacgaagagatgcagcatgcgtgttttgggacaatgtagtatacattttgggaggctctcagcttttcccaataaagcgaatggactgctataatgtagtgaaggatagctggtattcgaaactgggtcctccgacacctcgagacagccttgctgcatgtgctgcagaaggcaaaatttatacatctggaggttcagaagtaggaaactcagctctgtatttatttgagtgctatgatacgagaactgaaagctggcacacaaagcccagcatgctgacccagcgctgcagccatgggatggtggaagccaatggcctaatctatgtttgtggtggaagtttaggaaacaatgtttctgggagagtgcttaattcctgtgaagtttatgatcctgccacagaaacatggactgagctgtgtccaatgattgaagccaggaagaatcatgggctggtatttgtaaaagacaagatatttgctgtgggtggtcagaatggtttagttcggtaagcattaggaatgccattgcgattagaatgggtacatgaggagtagagntgcangggtatgtgaccgatatcgtggtccgagccgatcgtatcan

SEQ ID NO: 325015 - DNA, 1310 bp, Homo sapiens
tcctgggcagggctggggttctgcccggggacgcagcccagttggtagcgtcgctccctgagcgtttctaagggggccgcccggccttgtctttcggcagtggccgagccaccgccgcctgccgcgcgttccagagctgggcgctgcagctgcactgccgatcgccgtgtttggtcgatagaatccccagtgtgcccagagagtgcgacccctcgcccggcccggcgagccccgggcgtgaaccgagctgagggaggatggcagcctctggggtggagaagagcagcaagaagaagaccgagaagaaacttgctgctcgggaagaagctaaattgttggcgggtttcatgggcgtcatgaataacatgcggaaacagaaaacgttgtgtgacgtgatcctcatggtccaggaaagaaagatacctgctcatcgtgttgttcttgctgcagccagtcatttttttaacttaatgttcacaactaacatgcttgaatcaaagtcctttgaagtagaactcaaagatgctgaacctgatattattgaacaactggtggaatttgcttatactgctagaatttccgtgaatagcaacaatgttcagtctttgctggatgcagcaaaccaatatcagattgaacctgtgaagaaaatgtgtgttgattttttgaaagaacaagttgatgcttcaaattgtcttggagaagcagaaaaagttgatcagagccttccagagtgtggtatgcttttcactgtgtgatgatccttagtggcacatgaatgaacgtccagatgtttgtgcagtagcccacccttatctgcaggatacgttccaagacccccagtgaatgcctgaaactgcagatagtactgaatcctatatatactgtgttttttatgatacatacatgcctatgatgaagtttaatttctaaattagacagtaaaagattaacaacaataataataaaatagaacaactttaacaataaaaaaaaaaaaaaaaaaaaaaaaaaggggggagagagggaagagagcagaaccgacacgcacaccacaggcaaacgagaagagcaaacatgaccaacaagagacgacacaacgacgaacactaaacgagagacgacaacaaccagtccacaccgcagcgccaaccacaccgcaaccacaagacgctgacccacaacaacgaagtgacacggcgcaaccacgcggcaatcacagaggagccagccgcagcagacgataacaaacacgagagagaccgcacagaagcagcacaagaaaaacatacaaccaaacgcaacgcaga

SEQ ID NO: 325016 - DNA, 862 bp, Homo sapiens
tcctgggcagggctggggttctgcccggggacgcagcccagttggtagcgtcgctccctgagcgtttctaagggggccgcccggccttgtctttcggcagtggccgagccaccgccgcctgccgcgcgttccagagctgggcgctgcagctgcactgccgatcgccgtgtttggtcgatagaatccccagtgtgcccagagagtgcgacccctcgcccggcccggcgagccccgggcgtgaaccgagctgagggaggatggcagcctctggggtggagaagagcagcaagaagaagaccgagaagaaacttgctgctcgggaagaagctaaattgttggcgggtttcatgggcgtcatgaataacatgcggaaacagtgatttaaatctaccacccagctgtagttgaatctacaatctgctcagggatttatactcaatgccaatttgatatcatgctgggagggactgattgcagaaccttcttgacaagccacataaatctaaagaaaacgttgtgtgacgtgatcctcatggtccaggaaagaaagatacctgctcatcgtgttgttcttgctgcagccagtcatttttttaacttaatgttcacaactaacatgcttgaatcaaagtcctttgaagtagaactcaaagatgctgaacctgatattattgaacaactggtggaatttgcttatactgctagaatttccgtgaatagcaacaatgttcagtctttgctggatgcagcaaaccaatatcagattgaacctgtgaagaaaatgtgtgttgattttttgaaagaacaagttgatgcttcaaattgtcttggtaagaaatatcagattcctgttgtgtgttta

SEQ ID NO: 325017 - DNA, 989 bp, Homo sapiens
tcctgggcagggctggggttctgcccggggacgcagcccagttggtagcgtcgctccctgagcgtttctaagggggccgcccggccttgtctttcggcagtggccgagccaccgccgcctgccgcgcgttccagagctgggcgctgcagctgcactgccgatcgccgtgtttggtcgatagaatccccagtgtgcccagagagtgcgacccctcgcccggcccggcgagccccgggcgtgaaccgagctgagggaggatggcagcctctggggtggagaagagcagcaagaagaagaccgagaagaaacttgctgctcgggaagaagctaaattgttggcgggtttcatgggcgtcatgaataacatgcggaaacagaaaacgttgtgtgacgtgatcctcatggtccaggaaagaaagatacctgctcatcgtgttgttcttgctgcagccagtcatttttttaacttaatgttcacaactaacatgcttgaatcaaagtcctttgaagtagaactcaaagatgctgaacctgatattattgaacaactggtggaatttgcttatactgctagaatttccgtgaatagcaacaatgttcagtctttgctggatgcagcaaaccaatatcagattgaacctgtgaagaaaatgtgtgttgattttttgaaagaacaagttgatgcttcaaattgtcttggagaagcagaaaaagttgatcagagccttccagagtgtggtatgcttttcactgtgtgatgatccttagtggcacatgaatgaacgtccagatgtttgtgcagtagcccacccttatctgcaggatacgttccaagacccccagtgaatgcctgaaactgcagatagtactgaatcctatatatactgtgttttttatgatacatacatgcctatgatgaagtttaatttctaaattagacagtaaaagattaacaacaataataataaaatagaacaactttaacaata

SEQ ID NO: 325018 - DNA, 3279 bp, Homo sapiens
tcctgggcagggctggggttctgcccggggacgcagcccagttggtagcgtcgctccctgagcgtttctaagggggccgcccggccttgtctttcggcagtggccgagccaccgccgcctgccgcgcgttccagagctgggcgctgcagctgcactgccgatcgccgtgtttggtcgatagaatccccagtgtgcccagagagtgcgacccctcgcccggcccggcgagccccgggcgtgaaccgagctgagggaggatggcagcctctggggtggagaagagcagcaagaagaagaccgagaagaaacttgctgctcgggaagaagctaaattgttggcgggtttcatgggcgtcatgaataacatgcggaaacagtgatttaaatctaccacccagctgtagttgaatctacaatctgctcagggatttatactcaatgccaatttgatatcatgctgggagggactgattgcagaaccttcttgacaagccacataaatctaaagaaaacgttgtgtgacgtgatcctcatggtccaggaaagaaagatacctgctcatcgtgttgttcttgctgcagccagtcatttttttaacttaatgttcacaactaacatgcttgaatcaaagtcctttgaagtagaactcaaagatgctgaacctgatattattgaacaactggtggaatttgcttatactgctagaatttccgtgaatagcaacaatgttcagtctttgctggatgcagcaaaccaatatcagattgaacctgtgaagaaaatgtgtgttgattttttgaaagaacaagttgatgcttcaaattgtcttggtataagtgtgctagcggagtgtctagattgtcctgaattgaaagcaactgcagatgactttattcatcagcactttactgaagtttacaaaactgatgaatttcttcaacttgatgtcaagcgagtaacacatcttctcaaccaggacactctgactgtgagagcagaggatcaggtttatgatgctgcagtcaggtggttgaaatacgatgaacctaatcgccagccatttatggttgatatccttgctaaagtcaggtttcctcttatatcaaagaatttcttaagtaaaacggtacaagctgaaccacttattcaagacaatcctgaatgccttaagatggtgataagtggaatgaggtaccatctactgtctccagaggaccgagaagaacttgtagatggcacaagacctagaagaaagaaacatgactaccgcatagccctatttggaggctctcaaccacagtcttgtagatattttaacccaaaggattatagctggacagacatccgctgcccctttgaaaaacgaagagatgcagcatgcgtgttttgggacaatgtagtatacattttgggaggctctcagcttttcccaataaagcgaatggactgctataatgtagtgaaggatagctggtattcgaaactgggtcctccgacacctcgagacagccttgctgcatgtgctgcagaaggcaaaatttatacatctggaggttcagaagtaggaaactcagctctgtatttatttgagtgctatgatacgagaactgaaagctggcacacaaagcccagcatgctgacccagcgctgcagccatgggatggtggaagccaatggcctaatctatgtttgtggtggaagtttaggaaacaatgtttctgggagagtgcttaattcctgtgaagtttatgatcctgccacagaaacatggactgagctgtgtccaatgattgaagccaggaagaatcatgggctggtatttgtaaaagacaagatatttgctgtgggtggtcagaatggtttaggtggtctggacaatgtggaatattacgatattaagttgaacgaatggaagatggtctcaccaatgccatggaagggtgtaacagtgaaatgtgcagcagttggctctatagtttatgtcttggctggttttcagggtgttggtcgattaggacacattctcgaatataataccgaaacagacaaatgggttgccaactccaaagttcgtgcttttccagtcacaagttgtttaatttgtgttgtcgatacttgtggagcaaatgaagagacccttgaaacatgaaaaatgagtggacttcagactcatcagagactctaaaatatagccaccagtgctttgttccaggagtttggtgacaaagttttggtttggtgtttggtaaagaaagtttcaagtgaaatgaggttcctataaaatagatgtttcttttatatggatttccttaattcaaagatcatattttagctggccacaaaaccaagaacatatctagcaagaaaacttgaaaaagtataagcatttgttaaaaatgtgaatttcttgaatgaatttcacatttgtaactatgattttggcagaatagaagattggctcatcagtgaagcgcagtatcttagctctagattctattttcatgcatcacagaagtgctatacggttaggtctgtttgtgctcagtcaagaactaagaaatagtatgaattgtaagtcaagatgggcaactcagatggagcagcttagtctcacagtttgcttgtctatttattttatttagtgccaaatgtattccattttaaaagtaagccagagtgagtcaaggcatatacacactttctcacaaaacttcctaaacagatttgggggtttaatatgtccaactcctcatgaaatatattcaatccacttaaatatattccatctttttaacataaaatgtaaagcttagcacccatcattaatttatgtctctgttttatccagtggttaaaaaaggattctgcctctttagtcctcactgttaaataaaacccaatcatagtaagtgattaactagcaaaaagtaaagctatttatagcaaatttctagatcattagaaaagcactggtagttgtacaatatcagtgttgactttgaacttctttaacgagatcatgaattcttttcccttagccaaaacatgaaatatttaacctagttgtctctaaaagttttgtaatcatgagttagatatatgtcatctcctattcattgcttttatgtgatcaataaatcttttacaaacccaactactcatttccttcctagtaatactttgcctttttcactgtgtatggaatgaaacatgtaaagctgtcacaatcaatgtttttatctgataatattaaatattttttaacttaaaaaaaaaaac

SEQ ID NO: 325019 - DNA, 3404 bp, Homo sapiens
agcggagttggtagaggggcgcgtaaaacaattctcgagcaaaagtgcttctcgtctgccgaggatgtagctcccaagtcagactcctgggggactcctcaggctggctttcgccgtcgggtatcggttgtgtaacagctctgccctagttatctctttgtggggcgaggatccttccattggcgagccgttttaaggtgccgtgagatcttgtgtgaagaaacccgttggcatagcccaaaccgaagcccccaaagggaggagagttgctggcctgacatcagctgctcttaaataaggatccccgccccctcctgtgttccccggtggagctagttgaagaggagtcctcctgttcgtgctaatttagagcagaagcagccatcgataaataccatgccatcttctaagggcactgtgcgcctctgttattaagaggagctctttgttctgtccttggtgtgtggtgcattcgtgaaattctgcagcacatcggcgaaagtgatttaaatctaccacccagctgtagttgaatctacaatctgctcagggatttatactcaatgccaatttgatatcatgctgggagggactgattgcagaaccttcttgacaagccacataaatctaaagaaaacgttgtgtgacgtgatcctcatggtccaggaaagaaagatacctgctcatcgtgttgttcttgctgcagccagtcatttttttaacttaatgttcacaactaacatgcttgaatcaaagtcctttgaagtagaactcaaagatgctgaacctgatattattgaacaactggtggaatttgcttatactgctagaatttccgtgaatagcaacaatgttcagtctttgctggatgcagcaaaccaatatcagattgaacctgtgaagaaaatgtgtgttgattttttgaaagaacaagttgatgcttcaaattgtcttggtataagtgtgctagcggagtgtctagattgtcctgaattgaaagcaactgcagatgactttattcatcagcactttactgaagtttacaaaactgatgaatttcttcaacttgatgtcaagcgagtaacacatcttctcaaccaggacactctgactgtgagagcagaggatcaggtttatgatgctgcagtcaggtggttgaaatacgatgaacctaatcgccagccatttatggttgatatccttgctaaagtcaggtttcctcttatatcaaagaatttcttaagtaaaacggtacaagctgaaccacttattcaagacaatcctgaatgccttaagatggtgataagtggaatgaggtaccatctactgtctccagaggaccgagaagaacttgtagatggcacaagacctagaagaaagaaacatgactaccgcatagccctatttggaggctctcaaccacagtcttgtagatattttaacccaaaggattatagctggacagacatccgctgcccctttgaaaaacgaagagatgcagcatgcgtgttttgggacaatgtagtatacattttgggaggctctcagcttttcccaataaagcgaatggactgctataatgtagtgaaggatagctggtattcgaaactgggtcctccgacacctcgagacagccttgctgcatgtgctgcagaaggcaaaatttatacatctggaggttcagaagtaggaaactcagctctgtatttatttgagtgctatgatacgagaactgaaagctggcacacaaagcccagcatgctgacccagcgctgcagccatgggatggtggaagccaatggcctaatctatgtttgtggtggaagtttaggaaacaatgtttctgggagagtgcttaattcctgtgaagtttatgatcctgccacagaaacatggactgagctgtgtccaatgattgaagccaggaagaatcatgggctggtatttgtaaaagacaagatatttgctgtgggtggtcagaatggtttaggtggtctggacaatgtggaatattacgatattaagttgaacgaatggaagatggtctcaccaatgccatggaagggtgtaacagtgaaatgtgcagcagttggctctatagtttatgtcttggctggttttcagggtgttggtcgattaggacacattctcgaatataataccgaaacagacaaatgggttgccaactccaaagttcgtgcttttccagtcacaagttgtttaatttgtgttgtcgatacttgtggagcaaatgaagagacccttgaaacatgaaaaatgagtggacttcagactcatcagagactctaaaatatagccaccagtgctttgttccaggagtttggtgacaaagttttggtttggtgtttggtaaagaaagtttcaagtgaaatgaggttcctataaaatagatgtttcttttatatggatttccttaattcaaagatcatattttagctggccacaaaaccaagaacatatctagcaagaaaacttgaaaaagtataagcatttgttaaaaatgtgaatttcttgaatgaatttcacatttgtaactatgattttggcagaatagaagattggctcatcagtgaagcgcagtatcttagctctagattctattttcatgcatcacagaagtgctatacggttaggtctgtttgtgctcagtcaagaactaagaaatagtatgaattgtaagtcaagatgggcaactcagatggagcagcttagtctcacagtttgcttgtctatttattttatttagtgccaaatgtattccattttaaaagtaagccagagtgagtcaaggcatatacacactttctcacaaaacttcctaaacagatttgggggtttaatatgtccaactcctcatgaaatatattcaatccacttaaatatattccatctttttaacataaaatgtaaagcttagcacccatcattaatttatgtctctgttttatccagtggttaaaaaaggattctgcctctttagtcctcactgttaaataaaacccaatcatagtaagtgattaactagcaaaaagtaaagctatttatagcaaatttctagatcattagaaaagcactggtagttgtacaatatcagtgttgactttgaacttctttaacgagatcatgaattcttttcccttagccaaaacatgaaatatttaacctagttgtctctaaaagttttgtaatcatgagttagatatatgtcatctcctattcattgcttttatgtgatcaataaatcttttacaaacccaactactcatttccttcctagtaatactttgcctttttcactgtgtatggaatgaaacatgtaaagctgtcacaatcaatgtttttatctgataatattaaatattttttaacttaaaaaaaaaaac

SEQ ID NO: 325020 - DNA, 1701 bp, Homo sapiens
tcctgggcagggctggggttctgcccggggacgcagcccagttggtagcgtcgctccctgagcgtttctaagggggccgcccggccttgtctttcggcagtggccgagccaccgccgcctgccgcgcgttccagagctgggcgctgcagctgcactgccgatcgccgtgtttggtcgatagaatccccagtgtgcccagagagtgcgacccctcgcccggcccggcgagccccgggcgtgaaccgagctgagggaggatggcagcctctggggtggagaagagcagcaagaagaagaccgagaagaaacttgctgctcgggaagaagctaaattgttggcgggtttcatgggcgtcatgaataacatgcggaaacagaaaacgttgtgtgacgtgatcctcatggtccaggaaagaaagatacctgctcatcgtgttgttcttgctgcagccagtcatttttttaacttaatgttcacaactaacatgcttgaatcaaagtcctttgaagtagaactcaaagatgctgaacctgatattattgaacaactggtggaatttgcttatactgctagaatttccgtgaatagcaacaatgttcagtctttgctggatgcagcaaaccaatatcagattgaacctgtgaagaaaatgtgtgttgattttttgaaagaacaagttgatgcttcaaattgtcttggtataagtgtgctagcggagtgtctagattgtcctgaattgaaagcaactgcagatgactttattcatcagcactttactgaagtttacaaaactgatgaatttcttcaacttgatgtcaagcgagtaacacatcttctcaaccaggacactctgactgtgagagcagaggatcaggtttatgatgctgcagtcaggtggttgaaatacgatgaacctaatcgccagccatttatggttgatatccttgctaaagtcaggtttcctcttatatcaaagaatttcttaagtaaaacggtacaagctgaaccacttattcaagacaatcctgaatgccttaagatggtgataagtggaatgaggtaccatctactgtctccagaggaccgagaagaacttgtagatggcacaagacctagaagaaagaaacatgactaccgcatagccctatttggaggctctcaaccacagtcttgtagatattttaacccaaaggattatagctggacagacatccgctgcccctttgaaaaacgaagagatgcagcatgcgtgttttgggacaatgtagtatacattttgggaggctctcagcttttcccaataaagcgaatggactgctataatgtagtgaaggatagctggtattcgaaactgggtcctccgacacctcgagacagccttgctgcatgtgctgcagaaggcaaaatttatacatctggaggttcagaagtaggaaactcagctctgtatttatttgagtgctatgatacgagaactgaaagctggcacacaaagcccagcatgctgacccagcgctgcagccatgggatggtggaagccaatggcctaatctatgtttgtggtggaagtttaggaaacaatgtttctgggagagtgcttaattcctgtgaagtttatgatcctgccacagaaacgtatgtatctatttaaaatttattttacagttaactgtattctataagctctgtaggagatgtca

SEQ ID NO: 325021 - DNA, 1273 bp, Homo sapiens
tcctgggcagggctggggttctgcccggggacgcagcccagttggtagcgtcgctccctgagcgtttctaagggggccgcccggccttgtctttcggcagtggccgagccaccgccgcctgccgcgcgttccagagctgggcgctgcagctgcactgccgatcgccgtgtttggtcgatagaatccccagtgtgcccagagagtgcgacccctcgcccggcccggcgagccccgggcgtgaaccgagctgagggaggatggcagcctctggggtggagaagagcagcaagaagaagaccgagaagaaacttgctgctcgggaagaagctaaattgttggcgggtttcatgggcgtcatgaataacatgcggaaacagaaaacgttgtgtgacgtgatcctcatggtccaggaaagaaagatacctgctcatcgtgttgttcttgctgcagccagtcatttttttaacttaatgttcacaactaacatgcttgaatcaaagtcctttgaagtagaactcaaagatgctgaacctgatattattgaacaactggtggaatttgcttatactgctagaatttccgtgaatagcaacaatgttcagtctttgctggatgcagcaaaccaatatcagattgaacctgtgaagaaaatgtgtgttgattttttgaaagaacaagttgatgcttcaaattgtcttggtataagtgtgctagcggagtgtctagattgtcctgaattgaaagcaactgcagatgactttattcatcagcactttactgaagtttacaaaactgatgaatttcttcaacttgatgtcaagcgagtaacacatcttctcaaccaggacactctgactgtgagagcagaggatcaggtttatgatgctgcagtcaggtggttgaaatacgatgaacctaatcgccagccatttatggttgcagctgagaagcttccaagctttggggcctgggcagagctaaactggggaaaggcttccagcctttctttttcagatcatcagttgtcttcctaccaccggactttgttgcctttccagagtagaagaaaaacagaaaagacggttgaaaaataacataaaactaagcttaaaaattttacatccaaaagaaaatgaattacaaaatacaaatgaagtgcacagccaaagccaccacaaagggccaggccaacttcttactgaaaatttagaaatgattatacctaaatctggaaagaataactcccaaaggaataagcctaagcaacaattag

SEQ ID NO: 325022 - DNA, 336 bp, Homo sapiens
gaaatttactcaactaattttcctgaagtcatgcttcatcttgaatgtatacttggtttttctaaaaatgattttctattcttttattttctttctgtgtttaggtataagtgtgctagcggagtgtctagattgtcctgaattgaaagcaactgcagatgactttattcatcagcactttactgaagtttacaaaactgatgaatttcttcaacttgatgtcaagcgagtaacacatcttctcaaccaggacactctgactgtgagagcagaggatcaggtgactaaattgccttctcacatttttcttaataaaaatgtctttattggtttctt

SEQ ID NO: 325023 - DNA, 655 bp, Homo sapiens
acactaacaccagtattggttttagctctattttttgtaccaccatatggatttgtacattttcccccaaacctggtcacctattgccaaagactgggactttttacatcccatggagaagtttcccagcatgattgatcacccactggaaaactctaatattgtacagtgggctcttgaaagtgaagcaaagattattcttggtgaaggaggaattggacaagccctgaagataaaattttgcctggagaagtggtaatatgtataacttgataatatgagagtcagaggacagtaatctcacacgttttagtggcattaattagggcaggcataggaagataggaaagactgacttggaggctgttaaagtatttcatgaatgaagtaaagaagattgcagggggccccttaaataacagcaataggaagagataggaaagaatgtgaggcattttgaaataagtagcaaaacttattgactcgctcactggatatgggaaatggaggagatgtttgaagataacttcaggtttttaagactaatcagagaaataatgtcactaacagacagtgaaattgagtttatttgagttttctaaacaagtgagttaagtttagaaagtgccttacttaaagcataagtaagatatat

SEQ ID NO: 325024 - DNA, 806 bp, Homo sapiens
cttctccctgccctctttctttcagaaaaagatgcaaagccgagtcacatttgataccatggacttcattgcagaggagggtcactttcctccaaaggccattcagatcatgcagaagaagccttcctggagaacagaggatgagatccaggccgtctgtaacatcttgcaggttctggatagctatcggaactacgcagagcccctgcagctgctcctggccaaagtcatgcgctttgaacggtttggtcgcaggcgtgtgatcatcaagaaggggcagaagggcaacagcttttatttcatctacctgggcacagttgcaataaccaaggacgaggatggcagcagtgccttcctagatccccacccgaaattgctgcacaagggtagctgttttggggaaatggacgttctgcatgcttcagtgaggaggtccaccatcgtctgtatggaagaaacggagttcctggttgttgaccgggaggacttctttgctaataagctggaccaggaagttcagaaggatgctcagtatcggtttgaattttttaggaagatggagctgtttgcatcatggtctgatgagaagctctggcagctggtagccatggcgaagatagagaggttctcgtatgggcagctgatctcaaaagattttggagagtcacccttcatcatgtttatcagcaagggcagctgtgaagtcctgcggctgttggaccttggggcctccccttcctaccgtagatggatctggcagcacctggagctgatagatggcagacctctgaagacccacctgagtg

SEQ ID NO: 325025 - DNA, 1030 bp, Homo sapiens
ctctattttcataagcactctgtatgtggacgattttaatcctctaaacagtgttatgaagtagataatattaatagatgaggaaactgagacaaagattggtaacttgttcaagggcacagtggagccaagattcaaactcgggcagtttgtgtccagagtacaccctttgaagaccaccaagcttataacttttctcatatataataatttttgccctgaattacagaaagatctgaagccaggatcgctcaggagacgatggagagagctcctagcagagttgggacggttctcagtgtgccccaatgttgcagttgtttttcagcatattctgtctttctcctcagtcaaggaccaacctaccttttcttttctagtgctgaggaatgtaaacaagtttgctgggccttgcgagacttcaccaggttgtttcgatagctcacactcctgcactgtgcctgtcacccagggtgaggatacatagttcccagcttttgtccggactgtcggactgttggggatgcctgggaatggggataggttttaatgcctatcatgggaccagtcttatagctagagtcagggaaggactcagcagtttaactgtggtgaacagctggaatatacagggcccggattttcttgggcctgggcagccagtaattgtcagtgtctttggggtaccattttcacctccataagaaagtaactgttacacagtgcattgaaacattttcttcccccttccccttacagacacttctaagatggtaagtgtacatggcaacaaacaaataagtatttttaacctggccactttggcgaaaacaacctcaagttgactgttatatgtggtgccagtctcctaaaactgaccctccagatgtaatgagcaaagagcttattcttatcacttttatgacctgaatgctgaagtgccaggttttgaccagggcaggaggtatgaattgaatatcccttatccgaaatgcttgggatttcggaggaaaaaacactttcagaagtg

SEQ ID NO: 325026 - DNA, 527 bp, Homo sapiens
ctctattttcataagcactctgtatgtggacgattttaatcctctaaacagtgttatgaagtagataatattaatagatgaggaaactgagacaaagattggtaacttgttcaagggcacagtggagccaagattcaaactcgggcagtttgtgtccagagtacaccctttgaagaccaccaagcttataacttttctcatatataataatttttgccctgaattacagaaagatctgaagccaggatcgctcaggagacgatggagagagctcctagcagagttgggacggttctcagtgtgccccaatgttgcagttgtttttcagcatattctgtctttctcctcagtcaaggaccaacctaccttttcttttctagtgctgaggaatgtaaacaagtttgctgggccttgcgagacttcaccaggttgtttcgatagctcacactcctgcactgtgcctgtcacccagcaggagtgtaacaggtcgcgccacgtgaatctcgattcatggtaatagctttttc

SEQ ID NO: 325027 - DNA, 4621 bp, Homo sapiens
  misc_feature (4617)..(4617): n is a, c, g, or t
atcggtgctgtcgcttccggtccgggtaaacgaaccttaggtacactggtgtgtggcctcccaagataggcttctgagggcaagtcagcgactgaagacgggagcgccagaatctgtggactcaagagtctagaatcaagtggaaaaaccggaaaaaaggccaggaacctgaatacgacctaatagctgtttccgagggggcaacttccacggagaaccttctgccctggtaacggccaaagaggaggagatggcgccagtcagggagcggccgtggcccagacagtgaggaagcgcgaaggcggagcaaccgaggaatcctccggagaagaatcagagccgtcgctaccgccactaccgccaccaccatggaaggagcaaagccgacattgcagctcgtgtaccaggcagtgcaggcgctttaccacgacccagatcccagcggaaaggagcgcgcctctttttggcttggggagctgcagcgttcggttcatgcatgggagatctcagaccagttgttacagatccggcaggatgtggagtcatgctattttgctgcacagaccatgaaaatgaagattcagacctcattttatgagctccccacagactctcatgcctctttacgggactcattgctaacccatatccagaacttgaaagacttgtcacctgttattgtaacgcagctggctttagcaatagcagatcttgccctacagatgccttcctggaagggatgtgtgcaaacactggtggaaaaatacagcaatgatgtgacttctttgccttttttgctggagatccttacagtgttacctgaagaagtacatagtcgttccttacgaattggagctaatcggcgcacagaaattatagaagatttggccttctactctagtacagtagtatctctattgatgacctgtgtagaaaaagcaggaacagatgagaaaatgcttatgaaggtttttcgctgtttgggaagttggtttaacttgggagttttggacagtaacttcatggctaacaataaattactagcactcctttttgaggttttgcaacaggataagacctcgtctaacctacatgaagctgcttcggactgtgtatgctcagctctctatgccattgagaatgtggagactaacttgccattagccatgcaactttttcagggagtgctgacattggagactgcctatcatatggccgtggcacgtgaagatttagacaaagttctgaattactgccgtattttcactgaactatgtgaaacttttcttgaaaaaattgtttgtactccaggccaaggtcttggggaccttcgaactctggagctgctgcttatctgtgcaggccatcctcaatatgaggtagtagaaatttcatttaacttttggtaccgactgggggaacatttgtacaaaactaacgatgaagttattcatggcatcttcaaagcttacattcagaggctgcttcacgccttggctcgacactgccagctggaaccagaccatgagggggttcctgaggagactgatgactttggggagtttcgcatgagggtatcagacctggtaaaggacttgattttcttgatagggtctatggagtgttttgctcagttatattctactctgaaagaaggcaacccaccctgggaggtgacagaagcggttctctttatcatggctgctatagcaaagagtgttgatccggaaaacaatccaacacttgtggaagtcctagaaggagttgtccgcctcccggagaccgtacatacggctgtgcgatacaccagcattgaattggttggagagatgagtgaagtcgttgatcgaaatcctcagttccttgaccctgtgttgggctatttgatgaaaggcctgtgtgaaaagcccctggcttctgctgcagccaaagccattcataacatttgctctgtctgccgagatcacatggctcagcactttaatggactcctggagattgcccgctccctcgattccttcctgttgtctccagaagctgctgtgggcttgctaaaagggacagcacttgtcctagcccgattacctttggataagattaccgaatgtcttagtgaactatgttctgttcaggttatggcattgaaaaagctgttgtctcaagagcccagcaatggcatatcctcagatcccacagtgttcttagatcgccttgcagtgatatttaggcataccaatcccattgtggaaaatggacagactcatccgtgtcagaaagtcatacaggaaatatggccagttttatccgagactctaaataagcaccgagctgataatcggattgtagagcgttgttgcaggtgcctgcgctttgctgttcgctgtgtaggcaaaggatctgcagcactgctgcagccactagtcacacagatggtgaatgtgtaccacgtacatcagcattcctgcttcctgtaccttggcagtatccttgtggatgaatatggcatggaagaaggctgtcggcagggactgctagacatgctccaggcactgtgcatccccacctttcagctcctagaacagcagaatggtctccagaatcaccctgacactgtagatgacctgttccggctagccaccaggtttattcagcgtagccctgtcaccttgctgcggagccaagtggtcatccctatcttacagtgggccattgcctctactaccctggaccaccgggatgccaattgtagtgtcatgaggtttctacgagacctcattcatacaggggtagccaatgatcatgaagaagactttgaattacggaaagaactgattggacaggtgatgaaccagcttggacagcagcttgtcagccagctgctgcacacctgctgcttttgcctccccccctataccctaccagatgtggctgaagtgctctgggagatcatgcaggttgacagaccgactttttgtcgatggttagaaaattccttaaaaggtttgccaaaggaaacaaccgtgggagccgtcacagtgacacacaaacaacttacagacttccacaagcaagtcactagtgctgaggaatgtaaacaagtttgctgggccttgcgagacttcaccaggttgtttcgatagctcacactcctgcactgtgcctgtcacccaggaatgtcttttttaattagaagacaggaagaaaacaaaaaccagactgtgtcccacaatcagaaacctccgttgtggcagaggggccttcaccgccaccagggtgtcccgccagacagggagagactccagccttctgaggccatcctgaggagttcctgtttgggggtgtgagggaaaatcagcgcggattttaaaaagatggctgtggcctgcccggcgtggtgggaggggagctggtttcctggtgaactttctaaaaggaaaaataattttaagtaaagaaaaaagaaaaaaaaggaagactaaacagaaaccagaactgaaacattcacctggtagcaaatgacacatgcacgcacacacacatacacgcacaagcgccagtgcgcacgtgtacacagaaaaacaaaaggacaagctttctgtgaaacaaaatatttacttagggataatgtggggattcacatgaattaaatagctgcaattggaagaagagggtcagggtcatttgttcaggttttctattgttttgtcctctctttcctctcctacccttccttctctttctctctcccctccttttaaatgcaaatgagtagaaatttcttctaccttccccagctgtttcttcccacctttagagttgtttagacaaggaggagtaagcaaggaacttgttctgctttctatcgtggtcacattggtgatgctcgggacctgccagggtcagaatttatggatatctgaaccctgaccccgttcattctctcagtccacttccaatccacatcagtttgttgtctgccttggagagaagagccaaaactggggtgggcgggtgggtggggagtgcaggatataaatgtgtaagtttttgttttttaaggtttttttcttagtgaattattcacccacagacatgagagaaaaaaagagggagggtgtgtggagaaaaaatgtttacagggctaacaagggatgatgtgtcatttagtatgttactaaaaagtgtggaaatgacttgattttaaggggagggtgaggccgaagagggaagcccaaagcagatcttaatgtttcaaaggagtgcagcccttcacagccatcagatatgagggcactgttctgtctggtgttgtagccatctcaagaacaaatcaacagcaacaaaagagaaagaataaatttttaaaatttaaaaaaacaagaaaacaatcgagggggggccggtccccaatagcccataggggcgcataaactccaggccgccgtaacacgccggcgggaaccggcgtcaccccggagaccacccccgccggaactgaacaagacagacacccacccaaccccccgacagagacaccaccagataaccacagcataacattacaggcgcacaacaaagagtatcggagagacagaacatatcagggaggcgaggagncggc

SEQ ID NO: 325028 - DNA, 4337 bp, Homo sapiens
atcggtgctgtcgcttccggtccgggtaaacgaaccttaggtacactggtgtgtggcctcccaagataggcttctgagggcaagtcagcgactgaagacgggagcgccagaatctgtggactcaagagtctagaatcaagtggaaaaaccggaaaaaaggccaggaacctgaatacgacctaatagctgtttccgagggggcaacttccacggagaaccttctgccctggtaacggccaaagaggaggagatggcgccagtcagggagcggccgtggcccagacagtgaggaagcgcgaaggcggagcaaccgaggaatcctccggagaagaatcagagccgtcgctaccgccactaccgccaccaccatggaaggagcaaagccgacattgcagctcgtgtaccaggcagtgcaggcgctttaccacgacccagatcccagcggaaaggagcgcgcctctttttggcttggggagctgcagcgttcggttcatgcatgggagatctcagaccagttgttacagatccggcaggatgtggagtcatgctattttgctgcacagaccatgaaaatgaagattcagacctcattttatgagctccccacagactctcatgcctctttacgggactcattgctaacccatatccagaacttgaaagacttgtcacctgttattgtaacgcagctggctttagcaatagcagatcttgccctacagatgccttcctggaagggatgtgtgcaaacactggtggaaaaatacagcaatgatgtgacttctttgccttttttgctggagatccttacagtgttacctgaagaagtacatagtcgttccttacgaattggagctaatcggcgcacagaaattatagaagatttggccttctactctagtacagtagtatctctattgatgacctgtgtagaaaaagcaggaacagatgagaaaatgcttatgaaggtttttcgctgtttgggaagttggtttaacttgggagttttggacagtaacttcatggctaacaataaattactagcactcctttttgaggttttgcaacaggataagacctcgtctaacctacatgaagctgcttcggactgtgtatgctcagctctctatgccattgagaatgtggagactaacttgccattagccatgcaactttttcagggagtgctgacattggagactgcctatcatatggccgtggcacgtgaagatttagacaaagttctgaattactgccgtattttcactgaactatgtgaaacttttcttgaaaaaattgtttgtactccaggccaaggtcttggggaccttcgaactctggagctgctgcttatctgtgcaggccatcctcaatatgaggtagtagaaatttcatttaacttttggtaccgactgggggaacatttgtacaaaactaacgatgaagttattcatggcatcttcaaagcttacattcagaggctgcttcacgccttggctcgacactgccagctggaaccagaccatgagggggttcctgaggagactgatgactttggggagtttcgcatgagggtatcagacctggtaaaggacttgattttcttgatagggtctatggagtgttttgctcagttatattctactctgaaagaaggcaacccaccctgggaggtgacagaagcggttctctttatcatggctgctatagcaaagagtgttgatccggaaaacaatccaacacttgtggaagtcctagaaggagttgtccgcctcccggagaccgtacatacggctgtgcgatacaccagcattgaattggttggagagatgagtgaagtcgttgatcgaaatcctcagttccttgaccctgtgttgggctatttgatgaaaggcctgtgtgaaaagcccctggcttctgctgcagccaaagccattcataacatttgctctgtctgccgagatcacatggctcagcactttaatggactcctggagattgcccgctccctcgattccttcctgttgtctccagaagctgctgtgggcttgctaaaagggacagcacttgtcctagcccgattacctttggataagattaccgaatgtcttagtgaactatgttctgttcaggttatggcattgaaaaagctgttgtctcaagagcccagcaatggcatatcctcagatcccacagtgttcttagatcgccttgcagtgatatttaggcataccaatcccattgtggaaaatggacagactcatccgtgtcagaaagtcatacaggaaatatggccagttttatccgagactctaaataagcaccgagctgataatcggattgtagagcgttgttgcaggtgcctgcgctttgctgttcgctgtgtaggcaaaggatctgcagcactgctgcagccactagtcacacagatggtgaatgtgtaccacgtacatcagcattcctgcttcctgtaccttggcagtatccttgtggatgaatatggcatggaagaaggctgtcggcagggactgctagacatgctccaggcactgtgcatccccacctttcagctcctagaacagcagaatggtctccagaatcaccctgacactgtagatgacctgttccggctagccaccaggtttattcagcgtagccctgtcaccttgctgcggagccaagtggtcatccctatcttacagtgggccattgcctctactaccctggaccaccgggatgccaattgtagtgtcatgaggtttctacgagacctcattcatacaggggtagccaatgatcatgaagaagactttgaattacggaaagaactgattggacaggtgatgaaccagcttggacagcagcttgtcagccagctgctgcacacctgctgcttttgcctccccccctataccctaccagatgtggctgaagtgctctgggagatcatgcaggttgacagaccgactttttgtcgatggttagaaaattccttaaaaggtttgccaaaggaaacaaccgtgggagccgtcacagtgacacacaaacaacttacagacttccacaagcaagtcactagtgctgaggaatgtaaacaagtttgctgggccttgcgagacttcaccaggttgtttcgatagctcacactcctgcactgtgcctgtcacccaggaatgtcttttttaattagaagacaggaagaaaacaaaaaccagactgtgtcccacaatcagaaacctccgttgtggcagaggggccttcaccgccaccagggtgtcccgccagacagggagagactccagccttctgaggccatcctgaggagttcctgtttgggggtgtgagggaaaatcagcgcggattttaaaaagatggctgtggcctgcccggcgtggtgggaggggagctggtttcctggtgaactttctaaaaggaaaaataattttaagtaaagaaaaaagaaaaaaaaggaagactaaacagaaaccagaactgaaacattcacctggtagcaaatgacacatgcacgcacacacacataaaaaaaaaaaaaaaaaaaaaaaaaaaaaaaaaaaaaaaaaaaaaaaaaaagggggggggggcaaaaaatacaccccgggggggccccattcgggcccccccgttttttggaaaaaggggggcccccatggggggcatttaaaaagacacgaggcgcgggccgagcccgggcgataaacaagagcgccgggtgcgacggggaaaccggtggtggccggcgcggacaactggtggaggaggaaccccactacactttggggggcggctgaccacatagttggggccaacatcacacccacaaggaagtacgtacacgcaccgagaggggacaaaactaacaactacgggggtgtctagcgtcgttaacaaccaaacgggcaattatgacggccgaagcgacaagtgtgggctgacgagacagcaattcgcgaaccaaattatttctcgccagaggcgtcgtctaagaaaccggggacgacacgacagcaaggtgcagtcgaggccacgaagaagacgaaaacgaaccaagagaacagcaggagaggaagaacgaggaggagcagaaaggcgagagtgaaacgaagcaagcaaagcacgcagaagcaagaaggaagccggaaagagaaagagcggagaagcaagaaagaaagaagaacaaacaaaagaaacgaaagaagagagagagaacgaggaaagagcaagacagaaaaaagaaacgcggagagaaaacagaaaagagaagcgagaacggaagcgaaaaagacaagacagaagcagcagacagcatagccgccgtc

SEQ ID NO: 325029 - DNA, 4723 bp, Homo sapiens
  misc_feature (1750)..(1750): n is a, c, g, or t
  misc_feature (1756)..(1756): n is a, c, g, or t
  misc_feature (4719)..(4719): n is a, c, g, or t
atcggtgctgtcgcttccggtccgggtaaacgaaccttaggtacactggtgtgtggcctcccaagataggcttctgagggcaagtcagcgactgaagacgggagcgccagaatctgtggactcaagagtctagaatcaagtggaaaaaccggaaaaaaggccaggaacctgaatacgacctaatagctgtttccgagggggcaacttccacggagaaccttctgccctggtaacggccaaagaggaggagatggcgccagtcagggagcggccgtggcccagacagtgaggaagcgcgaaggcggagcaaccgaggaatcctccggagaagaatcagagccgtcgctaccgccactaccgccaccaccatggaaggagcaaagccgacattgcagctcgtgtaccaggcagtgcaggcgctttaccacgacccagatcccagcggaaaggagcgcgcctctttttggcttggggagctgcagcgttcggttcatgcatgggagatctcagaccagttgttacagatccggcaggatgtggagtcatgctattttgctgcacagaccatgaaaatgaagattcagacctcattttatgagctccccacagactctcatgcctctttacgggactcattgctaacccatatccagaacttgaaagacttgtcacctgttattgtaacgcagctggctttagcaatagcagatcttgccctacagatgccttcctggaagggatgtgtgcaaacactggtggaaaaatacagcaatgatgtgacttctttgccttttttgctggagatccttacagtgttacctgaagaagtacatagtcgttccttacgaattggagctaatcggcgcacagaaattatagaagatttggccttctactctagtacagtagtatctctattgatgacctgtgtagaaaaagcaggaacagatgagaaaatgcttatgaaggtttttcgctgtttgggaagttggtttaacttgggagttttggacagtaacttcatggctaacaataaattactagcactcctttttgaggttttgcaacaggataagacctcgtctaacctacatgaagctgcttcggactgtgtatgctcagctctctatgccattgagaatgtggagactaacttgccattagccatgcaactttttcagggagtgctgacattggagactgcctatcatatggccgtggcacgtgaagatttagacaaagttctgaattactgccgtattttcactgaactatgtgaaacttttcttgaaaaaattgtttgtactccaggccaaggtcttggggaccttcgaactctggagctgctgcttatctgtgcaggccatcctcaatatgaggtagtagaaatttcatttaacttttggtaccgactgggggaacatttgtacaaaactaacgatgaagttattcatggcatcttcaaagcttacattcagaggctgcttcacgccttggctcgacactgccagctggaaccagaccatgagggggttcctgaggagactgatgactttggggagtttcgcatgagggtatcagacctggtaaaggacttgattttcttgatagggtctatggagtgttttgctcagttatattctactctgaaagaaggcaacccaccctgggaggtgacagaagcggttctctttatcatggctgctatagcaaagagtgttgatccaaagaagccctttagcaatgctgngtgtcntcacagcctgttatttggccagaatataacctctgaaatcagtaactgtgagtacttaccgcctgtactcagggaaaacaatccaacacttgtggaagtcctagaaggagttgtccgcctcccggagaccgtacatacggctgtgcgatacaccagcattgaattggttggagagatgagtgaagtcgttgatcgaaatcctcagttccttgaccctgtgttgggctatttgatgaaaggcctgtgtgaaaagcccctggcttctgctgcagccaaagccattcataacatttgctctgtctgccgagatcacatggctcagcactttaatggactcctggagattgcccgctccctcgattccttcctgttgtctccagaagctgctgtgggcttgctaaaagggacagcacttgtcctagcccgattacctttggataagattaccgaatgtcttagtgaactatgttctgttcaggttatggcattgaaaaagctgttgtctcaagagcccagcaatggcatatcctcagatcccacagtgttcttagatcgccttgcagtgatatttaggcataccaatcccattgtggaaaatggacagactcatccgtgtcagaaagtcatacaggaaatatggccagttttatccgagactctaaataagcaccgagctgataatcggattgtagagcgttgttgcaggtgcctgcgctttgctgttcgctgtgtaggcaaaggatctgcagcactgctgcagccactagtcacacagatggtgaatgtgtaccacgtacatcagcattcctgcttcctgtaccttggcagtatccttgtggatgaatatggcatggaagaaggctgtcggcagggactgctagacatgctccaggcactgtgcatccccacctttcagctcctagaacagcagaatggtctccagaatcaccctgacactgtagatgacctgttccggctagccaccaggtttattcagcgtagccctgtcaccttgctgcggagccaagtggtcatccctatcttacagtgggccattgcctctactaccctggaccaccgggatgccaattgtagtgtcatgaggtttctacgagacctcattcatacaggggtagccaatgatcatgaagaagactttgaattacggaaagaactgattggacaggtgatgaaccagcttggacagcagcttgtcagccagctgctgcacacctgctgcttttgcctccccccctataccctaccagatgtggctgaagtgctctgggagatcatgcaggttgacagaccgactttttgtcgatggttagaaaattccttaaaaggtttgccaaaggaaacaaccgtgggagccgtcacagtgacacacaaacaacttacagacttccacaagcaagtcactagtgctgaggaatgtaaacaagtttgctgggccttgcgagacttcaccaggttgtttcgatagctcacactcctgcactgtgcctgtcacccaggaatgtcttttttaattagaagacaggaagaaaacaaaaaccagactgtgtcccacaatcagaaacctccgttgtggcagaggggccttcaccgccaccagggtgtcccgccagacagggagagactccagccttctgaggccatcctgaggagttcctgtttgggggtgtgagggaaaatcagcgcggattttaaaaagatggctgtggcctgcccggcgtggtgggaggggagctggtttcctggtgaactttctaaaaggaaaaataattttaagtaaagaaaaaagaaaaaaaaggaagactaaacagaaaccagaactgaaacattcacctggtagcaaatgacacatgcacgcacacacacatacacgcacaagcgccagtgcgcacgtgtacacagaaaaacaaaaggacaagctttctgtgaaacaaaatatttacttagggataatgtggggattcacatgaattaaatagctgcaattggaagaagagggtcagggtcatttgttcaggttttctattgttttgtcctctctttcctctcctacccttccttctctttctctctcccctccttttaaatgcaaatgagtagaaatttcttctaccttccccagctgtttcttcccacctttagagttgtttagacaaggaggagtaagcaaggaacttgttctgctttctatcgtggtcacattggtgatgctcgggacctgccagggtcagaatttatggatatctgaaccctgaccccgttcattctctcagtccacttccaatccacatcagtttgttgtctgccttggagagaagagccaaaactggggtgggcgggtgggtggggagtgcaggatataaatgtgtaagtttttgttttttaaggtttttttcttagtgaattattcacccacagacatgagagaaaaaaagagggagggtgtgtggagaaaaaatgtttacagggctaacaagggatgatgtgtcatttagtatgttactaaaaagtgtggaaatgacttgattttaaggggagggtgaggccgaagagggaagcccaaagcagatcttaatgtttcaaaggagtgcagcccttcacagccatcagatatgagggcactgttctgtctggtgttgtagccatctcaagaacaaatcaacagcaacaaaagagaaagaataaatttttaaaatttaaaaaaacaagaaaacaatcgagggggggccggtccccaatagcccataggggcgcataaactccaggccgccgtaacacgccggcgggaaccggcgtcaccccggagaccacccccgccggaactgaacaagacagacacccacccaaccccccgacagagacaccaccagataaccacagcataacattacaggcgcacaacaaagagtatcggagagacagaacatatcagggaggcgaggagncggc

SEQ ID NO: 325030 - DNA, 4429 bp, Homo sapiens
  misc_feature (4425)..(4425): n is a, c, g, or t
atcggtgctgtcgcttccggtccgggtaaacgaaccttaggtacactggtgtgtggcctcccaagataggcttctgagggcaagtcagcgactgaagacgggagcgccagaatctgtggactcaagagtctagaatcaagtggaaaaaccggaaaaaaggccaggaacctgaatacgacctaatagctgtttccgagggggcaacttccacggagaaccttctgccctggtaacggccaaagaggaggagatggcgccagtcagggagcggccgtggcccagacagtgaggaagcgcgaaggcggagcaaccgaggaatcctccggagaagaatcagagccgtcgctaccgccactaccgccaccaccatggaaggagcaaagccgacattgcagctcgtgtaccaggcagtgcaggcgctttaccacgacccagatcccagcggaaaggagcgcgcctctttttggcttggggagctgcagcgttcggttcatgcatgggagatctcagaccagttgttacagatccggcaggatgtggagtcatgctattttgctgcacagaccatgaaaatgaagattcagacctcattttatgagctccccacagactctcatgcctctttacgggactcattgctaacccatatccagaacttgaaagacttgtcacctgttattgtaacgcagctggctttagcaatagcagatcttgccctacagatgccttcctggaagggatgtgtgcaaacactggtggaaaaatacagcaatgatgtgacttctttgccttttttgctggagatccttacagtgttacctgaagaagtacatagtcgttccttacgaattggagctaatcggcgcacagaaattatagaagatttggccttctactctagtacagtagtatctctattgatgacctgtgtagaaaaagcaggaacagatgagaaaatgcttatgaaggtttttcgctgtttgggaagttggtttaacttgggagttttggacagtaacttcatggctaacaataaattactagcactcctttttgaggttttgcaacaggataagacctcgtctaacctacatgaagctgcttcggactgtgtatgctcagctctctatgccattgagaatgtggagactaacttgccattagccatgcaactttttcagggagtgctgacattggagactgcctatcatatggccgtggcacgtgaagatttagacaaagttctgaattactgccgtattttcactgaactatgtgaaacttttcttgaaaaaattgtttgtactccaggccaaggtcttggggaccttcgaactctggagctgctgcttatctgtgcaggccatcctcaatatgaggtagtagaaatttcatttaacttttggtaccgactgggggaacatttgtacaaaactaacgatgaagttattcatggcatcttcaaagcttacattcagaggctgcttcacgccttggctcgacactgccagctggaaccagaccatgagggggttcctgaggagactgatgactttggggagtttcgcatgagggtatcagacctggtaaaggacttgattttcttgatagggtctatggagtgttttgctcagttatattctactctgaaagaaggcaacccaccctgggaggtgacagaagcggttctctttatcatggctgctatagcaaagagtgttgatccggaaaacaatccaacacttgtggaagtcctagaaggagttgtccgcctcccggagaccgtacatacggctgtgcgatacaccagcattgaattggttggagagatgagtgaagtcgttgatcgaaatcctcagttccttgggacagcacttgtcctagcccgattacctttggataagattaccgaatgtcttagtgaactatgttctgttcaggttatggcattgaaaaagctgttgtctcaagagcccagcaatggcatatcctcagatcccacagtgttcttagatcgccttgcagtgatatttaggcataccaatcccattgtggaaaatggacagactcatccgtgtcagaaagtcatacaggaaatatggccagttttatccgagactctaaataagcaccgagctgataatcggattgtagagcgttgttgcaggtgcctgcgctttgctgttcgctgtgtaggcaaaggatctgcagcactgctgcagccactagtcacacagatggtgaatgtgtaccacgtacatcagcattcctgcttcctgtaccttggcagtatccttgtggatgaatatggcatggaagaaggctgtcggcagggactgctagacatgctccaggcactgtgcatccccacctttcagctcctagaacagcagaatggtctccagaatcaccctgacactgtagatgacctgttccggctagccaccaggtttattcagcgtagccctgtcaccttgctgcggagccaagtggtcatccctatcttacagtgggccattgcctctactaccctggaccaccgggatgccaattgtagtgtcatgaggtttctacgagacctcattcatacaggggtagccaatgatcatgaagaagactttgaattacggaaagaactgattggacaggtgatgaaccagcttggacagcagcttgtcagccagctgctgcacacctgctgcttttgcctccccccctataccctaccagatgtggctgaagtgctctgggagatcatgcaggttgacagaccgactttttgtcgatggttagaaaattccttaaaaggtttgccaaaggaaacaaccgtgggagccgtcacagtgacacacaaacaacttacagacttccacaagcaagtcactagtgctgaggaatgtaaacaagtttgctgggccttgcgagacttcaccaggttgtttcgatagctcacactcctgcactgtgcctgtcacccaggaatgtcttttttaattagaagacaggaagaaaacaaaaaccagactgtgtcccacaatcagaaacctccgttgtggcagaggggccttcaccgccaccagggtgtcccgccagacagggagagactccagccttctgaggccatcctgaggagttcctgtttgggggtgtgagggaaaatcagcgcggattttaaaaagatggctgtggcctgcccggcgtggtgggaggggagctggtttcctggtgaactttctaaaaggaaaaataattttaagtaaagaaaaaagaaaaaaaaggaagactaaacagaaaccagaactgaaacattcacctggtagcaaatgacacatgcacgcacacacacatacacgcacaagcgccagtgcgcacgtgtacacagaaaaacaaaaggacaagctttctgtgaaacaaaatatttacttagggataatgtggggattcacatgaattaaatagctgcaattggaagaagagggtcagggtcatttgttcaggttttctattgttttgtcctctctttcctctcctacccttccttctctttctctctcccctccttttaaatgcaaatgagtagaaatttcttctaccttccccagctgtttcttcccacctttagagttgtttagacaaggaggagtaagcaaggaacttgttctgctttctatcgtggtcacattggtgatgctcgggacctgccagggtcagaatttatggatatctgaaccctgaccccgttcattctctcagtccacttccaatccacatcagtttgttgtctgccttggagagaagagccaaaactggggtgggcgggtgggtggggagtgcaggatataaatgtgtaagtttttgttttttaaggtttttttcttagtgaattattcacccacagacatgagagaaaaaaagagggagggtgtgtggagaaaaaatgtttacagggctaacaagggatgatgtgtcatttagtatgttactaaaaagtgtggaaatgacttgattttaaggggagggtgaggccgaagagggaagcccaaagcagatcttaatgtttcaaaggagtgcagcccttcacagccatcagatatgagggcactgttctgtctggtgttgtagccatctcaagaacaaatcaacagcaacaaaagagaaagaataaatttttaaaatttaaaaaaacaagaaaacaatcgagggggggccggtccccaatagcccataggggcgcataaactccaggccgccgtaacacgccggcgggaaccggcgtcaccccggagaccacccccgccggaactgaacaagacagacacccacccaaccccccgacagagacaccaccagataaccacagcataacattacaggcgcacaacaaagagtatcggagagacagaacatatcagggaggcgaggagncggc

SEQ ID NO: 325031 - DNA, 4452 bp, Homo sapiens
  misc_feature (4448)..(4448): n is a, c, g, or t
atcggtgctgtcgcttccggtccgggtaaacgaaccttaggtacactggtgtgtggcctcccaagataggcttctgagggcaagtcagcgactgaagacgggagcgccagaatctgtggactcaagagtctagaatcaagtggaaaaaccggaaaaaaggccaggaacctgaatacgacctaatagctgtttccgagggggcaacttccacggagaaccttctgccctggtaacggccaaagaggaggagatggcgccagtcagggagcggccgtggcccagacagtgaggaagcgcgaaggcggagcaaccgaggaatcctccggagaagaatcagagccgtcgctaccgccactaccgccaccaccatggaaggagcaaagccgacattgcagctcgtgtaccaggcagtgcaggcgctttaccacgacccagatcccagcggaaaggagcgcgcctctttttggcttggggagctgcagcgttcggttcatgcatgggagatctcagaccagttgttacagatccggcaggatgtggagtcatgctattttgctgcacagaccatgaaaatgaagattcagacctcattttatgagctccccacagactctcatgcctctttacgggactcattgctaacccatatccagaacttgaaagacttgtcacctgttattgtaacgcagctggctttagcaatagcagatcttgccctacagatgccttcctggaagggatgtgtgcaaacactggtggaaaaatacagcaatgatgtgacttctttgccttttttgctggagatccttacagtgttacctgaagaagtacatagtcgttccttacgaattggagctaatcggcgcacagaaattatagaagatttggccttctactctagtacagtagtatctctattgatgacctgtgtagaaaaagcaggaacagatgagaaaatgcttatgaaggtttttcgctgtttgggaagttggtttaacttgggagttttggacagtaacttcatggctaacaataaattactagcactcctttttgaggttttgcaacaggataagacctcgtctaacctacatgaagctgcttcggactgtgtatgctcagctctctatgccattgagaatgtggagactaacttgccattagccatgcaactttttcagggagtgctgacattggagactgcctatcatatggccgtggcacgtgaagatttagacaaagttctgaattactgccgtattttcactgaactatgtgaaacttttcttgaaaaaattgtttgtactccaggccaaggtcttggggaccttcgaactctggagctgctgcttatctgtgcaggccatcctcaatatgaggtagtagaaatttcatttaacttttggtaccgactgggggaacatttgtacaaaactaacgatgaagttattcatggcatcttcaaagcttacattcagaggctgcttcacgccttggctcgacactgccagctggaaccagaccatgagggggttcctgaggagactgatgactttggggagtttcgcatgagggtatcagacctggtaaaggacttgattttcttgatagggtctatggagtgttttgctcagttatattctactctgaaagaaggcaacccaccctgggaggtgacagaagcggttctctttatcatggctgctatagcaaagagtgttgatccggaaaacaatccaacacttgtggaagtcctagaaggagttgtccgcctcccggagaccgtacatacggctgtgcgatacaccagcattgaattggttggagagatgagtgaagtcgttgatcgaaatcctcagttccttgaccctgtgttgggctatttgatgaaaggcctgtgtgaaaagcccctggcttctgctgcagccaaagccattcataacatttgctctgtctgccgagatcacatggctcagcactttaatggactcctggagattgcccgctccctcgattccttcctgttgtctccagaagctgctgtgggcttgctaaaagggacagcacttgtcctagcccgattacctttggataagattaccgaatgtcttagtgaactatgttctgttcaggttatggcattgaaaaagctgttgtctcaagagcccagcaatggcatatcctcagatcccacagtgttcttagatcgccttgcagtgatatttaggcataccaatcccattgtggaaaatggacagactcatccgtgtcagaaagtcatacaggaaatatggccagttttatccgagactctaaataagcaccgagctgataatcggattgtagagcgttgttgcaggtgcctgcgctttgctgttcgctgtgtaggcaaaggatctgcagcactgctgcagccactagtcacacagatggtgaatgtgtaccacgtacatcagcattcctgcttcctgtaccttggcagtatccttgtggatgaatatggcatggaagaaggctgtcggcagggactgctagacatgctccaggcactgtgcatccccacctttcagctcctagaacagcagaatggtctccagaatcaccctgacactgtagatgacctgttccggctagccaccaggtttattcagcgtagccctgtcaccttgctgcggagccaagtggtcatccctatcttacagtgggccattgcctctactaccctggaccaccgggatgccaattgtagtgtcatgaggtttctacgagacctcattcatacaggggtagccaatgatcatgaagaagactttgaattacggaaagaactgattggacaggtgatgaaccagcttggacagcagcttgtcagccagctgctgcacacctgctgcttttgcctccccccctataccctaccagatgtggctgaagtgctctgggagatcatgcaggttgacagaccgactttttgtcgatggttagaaaattccttaaaaggtttgccaaaggaaacaaccgtgggagccgtcacagtgacacacaaacaacttacagacttccacaagcaagtcactagtgctgaggaatgtaaacaagtttgctgggccttgcgagacttcaccaggttgtttcgatagctcacactcctgcactgtgcctgtcacccaggtgagggaaaatcagcgcggattttaaaaagatggctgtggcctgcccggcgtggtgggaggggagctggtttcctggtgaactttctaaaaggaaaaataattttaagtaaagaaaaaagaaaaaaaaggaagactaaacagaaaccagaactgaaacattcacctggtagcaaatgacacatgcacgcacacacacatacacgcacaagcgccagtgcgcacgtgtacacagaaaaacaaaaggacaagctttctgtgaaacaaaatatttacttagggataatgtggggattcacatgaattaaatagctgcaattggaagaagagggtcagggtcatttgttcaggttttctattgttttgtcctctctttcctctcctacccttccttctctttctctctcccctccttttaaatgcaaatgagtagaaatttcttctaccttccccagctgtttcttcccacctttagagttgtttagacaaggaggagtaagcaaggaacttgttctgctttctatcgtggtcacattggtgatgctcgggacctgccagggtcagaatttatggatatctgaaccctgaccccgttcattctctcagtccacttccaatccacatcagtttgttgtctgccttggagagaagagccaaaactggggtgggcgggtgggtggggagtgcaggatataaatgtgtaagtttttgttttttaaggtttttttcttagtgaattattcacccacagacatgagagaaaaaaagagggagggtgtgtggagaaaaaatgtttacagggctaacaagggatgatgtgtcatttagtatgttactaaaaagtgtggaaatgacttgattttaaggggagggtgaggccgaagagggaagcccaaagcagatcttaatgtttcaaaggagtgcagcccttcacagccatcagatatgagggcactgttctgtctggtgttgtagccatctcaagaacaaatcaacagcaacaaaagagaaagaataaatttttaaaatttaaaaaaacaagaaaacaatcgagggggggccggtccccaatagcccataggggcgcataaactccaggccgccgtaacacgccggcgggaaccggcgtcaccccggagaccacccccgccggaactgaacaagacagacacccacccaaccccccgacagagacaccaccagataaccacagcataacattacaggcgcacaacaaagagtatcggagagacagaacatatcagggaggcgaggagncggc

SEQ ID NO: 325032 - DNA, 2103 bp, Homo sapiens
  misc_feature (2099)..(2099): n is a, c, g, or t
gattctggagaccattctgctgttctagaagctgaaaggtggggatgcacagtgcctggaacagcagaatggtctccagaatcaccctgacactgtagatgacctgttccggctagccaccaggtttattcagcgtagccctgtcaccttgctgcggagccaagtggtcatccctatcttacagtgggccattgcctctactaccctggaccaccgggatgccaattgtagtgtcatgaggtttctacgagacctcattcatacaggggtagccaatgatcatgaagaagactttgaattacggaaagaactgattggacaggtgatgaaccagcttggacagcagcttgtcagccagctgctgcacacctgctgcttttgcctccccccctataccctaccagatgtggctgaagtgctctgggagatcatgcaggttgacagaccgactttttgtcgatggttagaaaattccttaaaaggtttgccaaaggaaacaaccgtgggagccgtcacagtgacacacaaacaacttacagacttccacaagcaagtcactagtgctgaggaatgtaaacaagtttgctgggccttgcgagacttcaccaggttgtttcgatagctcacactcctgcactgtgcctgtcacccaggaatgtcttttttaattagaagacaggaagaaaacaaaaaccagactgtgtcccacaatcagaaacctccgttgtggcagaggggccttcaccgccaccagggtgtcccgccagacagggagagactccagccttctgaggccatcctgaggagttcctgtttgggggtgtgagggaaaatcagcgcggattttaaaaagatggctgtggcctgcccggcgtggtgggaggggagctggtttcctggtgaactttctaaaaggaaaaataattttaagtaaagaaaaaagaaaaaaaaggaagactaaacagaaaccagaactgaaacattcacctggtagcaaatgacacatgcacgcacacacacatacacgcacaagcgccagtgcgcacgtgtacacagaaaaacaaaaggacaagctttctgtgaaacaaaatatttacttagggataatgtggggattcacatgaattaaatagctgcaattggaagaagagggtcagggtcatttgttcaggttttctattgttttgtcctctctttcctctcctacccttccttctctttctctctcccctccttttaaatgcaaatgagtagaaatttcttctaccttccccagctgtttcttcccacctttagagttgtttagacaaggaggagtaagcaaggaacttgttctgctttctatcgtggtcacattggtgatgctcgggacctgccagggtcagaatttatggatatctgaaccctgaccccgttcattctctcagtccacttccaatccacatcagtttgttgtctgccttggagagaagagccaaaactggggtgggcgggtgggtggggagtgcaggatataaatgtgtaagtttttgttttttaaggtttttttcttagtgaattattcacccacagacatgagagaaaaaaagagggagggtgtgtggagaaaaaatgtttacagggctaacaagggatgatgtgtcatttagtatgttactaaaaagtgtggaaatgacttgattttaaggggagggtgaggccgaagagggaagcccaaagcagatcttaatgtttcaaaggagtgcagcccttcacagccatcagatatgagggcactgttctgtctggtgttgtagccatctcaagaacaaatcaacagcaacaaaagagaaagaataaatttttaaaatttaaaaaaacaagaaaacaatcgagggggggccggtccccaatagcccataggggcgcataaactccaggccgccgtaacacgccggcgggaaccggcgtcaccccggagaccacccccgccggaactgaacaagacagacacccacccaaccccccgacagagacaccaccagataaccacagcataacattacaggcgcacaacaaagagtatcggagagacagaacatatcagggaggcgaggagncggc

SEQ ID NO: 325033 - DNA, 2953 bp, Homo sapiens
atcggtgctgtcgcttccggtccgggtaaacgaaccttaggtacactggtgtgtggcctcccaagataggcttctgagggcaagtcagcgactgaagacgggagcgccagaatctgtggactcaagagtctagaatcaagtggaaaaaccggaaaaaaggccaggaacctgaatacgacctaatagctgtttccgagggggcaacttccacggagaaccttctgccctggtaacggccaaagaggaggagatggcgccagtcagggagcggccgtggcccagacagtgaggaagcgcgaaggcggagcaaccgaggaatcctccggagaagaatcagagccgtcgctaccgccactaccgccaccaccatggaaggagcaaagccgacattgcagctcgtgtaccaggcagtgcaggcgctttaccacgacccagatcccagcggaaaggagcgcgcctctttttggcttggggagctgcagcgttcggttcatgcatgggagatctcagaccagttgttacagatccggcaggatgtggagtcatgctattttgctgcacagaccatgaaaatgaagattcagacctcattttatgagctccccacagactctcatgcctctttacgggactcattgctaacccatatccagaacttgaaagacttgtcacctgttattgtaacgcagctggctttagcaatagcagatcttgccctacagatgccttcctggaagggatgtgtgcaaacactggtggaaaaatacagcaatgatgtgacttctttgccttttttgctggagatccttacagtgttacctgaagaagtacatagtcgttccttacgaattggagctaatcggcgcacagaaattatagaagatttggccttctactctagtacagtagtatctctattgatgacctgtgtagaaaaagcaggaacagatgagaaaatgcttatgaaggtttttcgctgtttgggaagttggtttaacttgggagttttggacagtaacttcatggctaacaataaattactagcactcctttttgaggttttgcaacaggataagacctcgtctaacctacatgaagctgcttcggactgtgtatgctcagctctctatgccattgagaatgtggagactaacttgccattagccatgcaactttttcagggagtgctgacattggagactgcctatcatatggccgtggcacgtgaagatttagacaaagttctgaattactgccgtattttcactgaactatgtgaaacttttcttgaaaaaattgtttgtactccaggccaaggtcttggggaccttcgaactctggagctgctgcttatctgtgcaggccatcctcaatatgaggtagtagaaatttcatttaacttttggtaccgactgggggaacatttgtacaaaactaacgatgaagttattcatggcatcttcaaagcttacattcagaggctgcttcacgccttggctcgacactgccagctggaaccagaccatgagggggttcctgaggagactgatgactttggggagtttcgcatgagggtatcagacctggtaaaggacttgattttcttgatagggtctatggagtgttttgctcagttatattctactctgaaagaaggcaacccaccctgggaggtgacagaagcggttctctttatcatggctgctatagcaaagagtgttgatccggaaaacaatccaacacttgtggaagtcctagaaggagttgtccgcctcccggagaccgtacatacggctgtgcgatacaccagcattgaattggttggagagatgagtgaagtcgttgatcgaaatcctcagttccttgaccctgtgttgggctatttgatgaaaggcctgtgtgaaaagcccctggcttctgctgcagccaaagccattcataacatttgctctgtctgccgagatcacatggctcagcactttaatggactcctggagattgcccgctccctcgattccttcctgttgtctccagaagctgctgtgggcttgctaaaagggacagcacttgtcctagcccgattacctttggataagattaccgaatgtcttagtgaactatgttctgttcaggttatggcattgaaaaagctgttgtctcaagagcccagcaatggcatatcctcagatcccacagtgttcttagatcgccttgcagtgatatttaggcataccaatcccattgtggaaaatggacagactcatccgtgtcagaaagtcatacaggaaatatggccagttttatccgagactctaaataagcaccgagctgataatcggattgtagagcgttgttgcaggtgcctgcgctttgctgttcgctgtgtaggcaaaggatctgcagcactgctgcagccactagtcacacagatggtgaatgtgtaccacgtacatcagcattcctgcttcctgtaccttggcagtatccttgtggatgaatatggcatggaagaaggctgtcggcagggactgctagacatgctccaggcactgtgcatccccacctttcagctcctagaacagcagaatggtctccagaatcaccctgacactgtagatgacctgttccggctagccaccaggtttattcagcgtagccctgtcaccttgctgcggagccaagtggtcatccctatcttacagtgggccattgcctctactaccctggaccaccgggatgccaattgtagtgtcatgaggtttctacgagacctcattcatacaggggtagccaatgatttttgtaaaggggtagaaagtgaagattttaggctttgcaggccatatagcctctgctgcaaatgctcagccctgctgttgtaatgtaaaagctgccacagacactacatgaacacgaatgagtgtggctggtgttccaataaaactttatttac

SEQ ID NO: 325034 - DNA, 1845 bp, Homo sapiens
  misc_feature (1841)..(1841): n is a, c, g, or t
tcaactgttattagtaggcaaagccttctttcaaaataaaatcgacatgaagcctgtgggatttagcagactgaggcaaagcttccctggttgctttggaatgggaggcctggacctgctggctctttgccctcctgacacatcatcccttgtttccacagcacactcagcattggaagcacactgcagacggtgtctcattaaagcagtagctcccttgaacccacaagttaaaacgccagacttttatttatttgtttattttttctgagttcttattggcagacttcagaatgaggtacctgaggaaatatagaaacctctgccttaaggttgattttactaaatgctctattttctggtgcagttattgactgtcttatctcttttgtcaggaatgtcttttttaattagaagacaggaagaaaacaaaaaccagactgtgtcccacaatcagaaacctccgttgtggcagaggggccttcaccgccaccagggtgtcccgccagacagggagagactccagccttctgaggccatcctgaggagttcctgtttgggggtgtgagggaaaatcagcgcggattttaaaaagatggctgtggcctgcccggcgtggtgggaggggagctggtttcctggtgaactttctaaaaggaaaaataattttaagtaaagaaaaaagaaaaaaaaggaagactaaacagaaaccagaactgaaacattcacctggtagcaaatgacacatgcacgcacacacacatacacgcacaagcgccagtgcgcacgtgtacacagaaaaacaaaaggacaagctttctgtgaaacaaaatatttacttagggataatgtggggattcacatgaattaaatagctgcaattggaagaagagggtcagggtcatttgttcaggttttctattgttttgtcctctctttcctctcctacccttccttctctttctctctcccctccttttaaatgcaaatgagtagaaatttcttctaccttccccagctgtttcttcccacctttagagttgtttagacaaggaggagtaagcaaggaacttgttctgctttctatcgtggtcacattggtgatgctcgggacctgccagggtcagaatttatggatatctgaaccctgaccccgttcattctctcagtccacttccaatccacatcagtttgttgtctgccttggagagaagagccaaaactggggtgggcgggtgggtggggagtgcaggatataaatgtgtaagtttttgttttttaaggtttttttcttagtgaattattcacccacagacatgagagaaaaaaagagggagggtgtgtggagaaaaaatgtttacagggctaacaagggatgatgtgtcatttagtatgttactaaaaagtgtggaaatgacttgattttaaggggagggtgaggccgaagagggaagcccaaagcagatcttaatgtttcaaaggagtgcagcccttcacagccatcagatatgagggcactgttctgtctggtgttgtagccatctcaagaacaaatcaacagcaacaaaagagaaagaataaatttttaaaatttaaaaaaacaagaaaacaatcgagggggggccggtccccaatagcccataggggcgcataaactccaggccgccgtaacacgccggcgggaaccggcgtcaccccggagaccacccccgccggaactgaacaagacagacacccacccaaccccccgacagagacaccaccagataaccacagcataacattacaggcgcacaacaaagagtatcggagagacagaacatatcagggaggcgaggagncggc

SEQ ID NO: 325035 - DNA, 1589 bp, Homo sapiens
  misc_feature (1585)..(1585): n is a, c, g, or t
agaggatccccgtcggatgcaagtgtcagacttcagaatgaggtacctgaggaaatatagaaacctctgccttaaggttgattttactaaatgctctattttctggtgcagttattgactgtcttatctcttttgtcaggaatgtcttttttaattagaagacaggaagaaaacaaaaaccagactgtgtcccacaatcagaaacctccgttgtggcagaggggccttcaccgccaccagggtgtcccgccagacagggagagactccagccttctgaggccatcctgaggagttcctgtttgggggtgtgagggaaaatcagcgcggattttaaaaagatggctgtggcctgcccggcgtggtgggaggggagctggtttcctggtgaactttctaaaaggaaaaataattttaagtaaagaaaaaagaaaaaaaaggaagactaaacagaaaccagaactgaaacattcacctggtagcaaatgacacatgcacgcacacacacatacacgcacaagcgccagtgcgcacgtgtacacagaaaaacaaaaggacaagctttctgtgaaacaaaatatttacttagggataatgtggggattcacatgaattaaatagctgcaattggaagaagagggtcagggtcatttgttcaggttttctattgttttgtcctctctttcctctcctacccttccttctctttctctctcccctccttttaaatgcaaatgagtagaaatttcttctaccttccccagctgtttcttcccacctttagagttgtttagacaaggaggagtaagcaaggaacttgttctgctttctatcgtggtcacattggtgatgctcgggacctgccagggtcagaatttatggatatctgaaccctgaccccgttcattctctcagtccacttccaatccacatcagtttgttgtctgccttggagagaagagccaaaactggggtgggcgggtgggtggggagtgcaggatataaatgtgtaagtttttgttttttaaggtttttttcttagtgaattattcacccacagacatgagagaaaaaaagagggagggtgtgtggagaaaaaatgtttacagggctaacaagggatgatgtgtcatttagtatgttactaaaaagtgtggaaatgacttgattttaaggggagggtgaggccgaagagggaagcccaaagcagatcttaatgtttcaaaggagtgcagcccttcacagccatcagatatgagggcactgttctgtctggtgttgtagccatctcaagaacaaatcaacagcaacaaaagagaaagaataaatttttaaaatttaaaaaaacaagaaaacaatcgagggggggccggtccccaatagcccataggggcgcataaactccaggccgccgtaacacgccggcgggaaccggcgtcaccccggagaccacccccgccggaactgaacaagacagacacccacccaaccccccgacagagacaccaccagataaccacagcataacattacaggcgcacaacaaagagtatcggagagacagaacatatcagggaggcgaggagncggc

SEQ ID NO: 325036 - DNA, 1772 bp, Homo sapiens
  misc_feature (1768)..(1768): n is a, c, g, or t
tgttttttaaggtttttttcttagtgaattattcacccacagacatgagagaaaaaaagagggagggtgtgtggagaaaaaaccacagcacactcagcattggaagcacactgcagacggtgtctcattaaagcagtagctcccttgaacccacaagttaaaacgccagacttttatttatttgtttattttttctgagttcttattggcagacttcagaatgaggtacctgaggaaatatagaaacctctgccttaaggttgattttactaaatgctctattttctggtgcagttattgactgtcttatctcttttgtcaggaatgtcttttttaattagaagacaggaagaaaacaaaaaccagactgtgtcccacaatcagaaacctccgttgtggcagaggggccttcaccgccaccagggtgtcccgccagacagggagagactccagccttctgaggccatcctgaggagttcctgtttgggggtgtgagggaaaatcagcgcggattttaaaaagatggctgtggcctgcccggcgtggtgggaggggagctggtttcctggtgaactttctaaaaggaaaaataattttaagtaaagaaaaaagaaaaaaaaggaagactaaacagaaaccagaactgaaacattcacctggtagcaaatgacacatgcacgcacacacacatacacgcacaagcgccagtgcgcacgtgtacacagaaaaacaaaaggacaagctttctgtgaaacaaaatatttacttagggataatgtggggattcacatgaattaaatagctgcaattggaagaagagggtcagggtcatttgttcaggttttctattgttttgtcctctctttcctctcctacccttccttctctttctctctcccctccttttaaatgcaaatgagtagaaatttcttctaccttccccagctgtttcttcccacctttagagttgtttagacaaggaggagtaagcaaggaacttgttctgctttctatcgtggtcacattggtgatgctcgggacctgccagggtcagaatttatggatatctgaaccctgaccccgttcattctctcagtccacttccaatccacatcagtttgttgtctgccttggagagaagagccaaaactggggtgggcgggtgggtggggagtgcaggatataaatgtgtaagtttttgttttttaaggtttttttcttagtgaattattcacccacagacatgagagaaaaaaagagggagggtgtgtggagaaaaaatgtttacagggctaacaagggatgatgtgtcatttagtatgttactaaaaagtgtggaaatgacttgattttaaggggagggtgaggccgaagagggaagcccaaagcagatcttaatgtttcaaaggagtgcagcccttcacagccatcagatatgagggcactgttctgtctggtgttgtagccatctcaagaacaaatcaacagcaacaaaagagaaagaataaatttttaaaatttaaaaaaacaagaaaacaatcgagggggggccggtccccaatagcccataggggcgcataaactccaggccgccgtaacacgccggcgggaaccggcgtcaccccggagaccacccccgccggaactgaacaagacagacacccacccaaccccccgacagagacaccaccagataaccacagcataacattacaggcgcacaacaaagagtatcggagagacagaacatatcagggaggcgaggagncggc

SEQ ID NO: 325037 - DNA, 1481 bp, Homo sapiens
  misc_feature (1477)..(1477): n is a, c, g, or t
aaatgacacatgcacgcacacacacatacacgcacaagcgccagtgcgcacgtgtacacagaaaacaaaaaccagactgtgtcccacaatcagaaacctccgttgtggcagaggggccttcaccgccaccagggtgtcccgccagacagggagagactccagccttctgaggccatcctgaggagttcctgtttgggggtgtgagggaaaatcagcgcggattttaaaaagatggctgtggcctgcccggcgtggtgggaggggagctggtttcctggtgaactttctaaaaggaaaaataattttaagtaaagaaaaaagaaaaaaaaggaagactaaacagaaaccagaactgaaacattcacctggtagcaaatgacacatgcacgcacacacacatacacgcacaagcgccagtgcgcacgtgtacacagaaaaacaaaaggacaagctttctgtgaaacaaaatatttacttagggataatgtggggattcacatgaattaaatagctgcaattggaagaagagggtcagggtcatttgttcaggttttctattgttttgtcctctctttcctctcctacccttccttctctttctctctcccctccttttaaatgcaaatgagtagaaatttcttctaccttccccagctgtttcttcccacctttagagttgtttagacaaggaggagtaagcaaggaacttgttctgctttctatcgtggtcacattggtgatgctcgggacctgccagggtcagaatttatggatatctgaaccctgaccccgttcattctctcagtccacttccaatccacatcagtttgttgtctgccttggagagaagagccaaaactggggtgggcgggtgggtggggagtgcaggatataaatgtgtaagtttttgttttttaaggtttttttcttagtgaattattcacccacagacatgagagaaaaaaagagggagggtgtgtggagaaaaaatgtttacagggctaacaagggatgatgtgtcatttagtatgttactaaaaagtgtggaaatgacttgattttaaggggagggtgaggccgaagagggaagcccaaagcagatcttaatgtttcaaaggagtgcagcccttcacagccatcagatatgagggcactgttctgtctggtgttgtagccatctcaagaacaaatcaacagcaacaaaagagaaagaataaatttttaaaatttaaaaaaacaagaaaacaatcgagggggggccggtccccaatagcccataggggcgcataaactccaggccgccgtaacacgccggcgggaaccggcgtcaccccggagaccacccccgccggaactgaacaagacagacacccacccaaccccccgacagagacaccaccagataaccacagcataacattacaggcgcacaacaaagagtatcggagagacagaacatatcagggaggcgaggagncggc

SEQ ID NO: 325038 - DNA, 1413 bp, Homo sapiens
  misc_feature (10)..(10): n is a, c, g, or t
  misc_feature (30)..(30): n is a, c, g, or t
  misc_feature (1409)..(1409): n is a, c, g, or t
acttaaaatnatttttccttttagaaagtncaccaggaaaccagctccccttcaccgccaccagggtgtcccgccagacagggagagactccagccttctgaggccatcctgaggagttcctgtttgggggtgtgagggaaaatcagcgcggattttaaaaagatggctgtggcctgcccggcgtggtgggaggggagctggtttcctggtgaactttctaaaaggaaaaataattttaagtaaagaaaaaagaaaaaaaaggaagactaaacagaaaccagaactgaaacattcacctggtagcaaatgacacatgcacgcacacacacatacacgcacaagcgccagtgcgcacgtgtacacagaaaaacaaaaggacaagctttctgtgaaacaaaatatttacttagggataatgtggggattcacatgaattaaatagctgcaattggaagaagagggtcagggtcatttgttcaggttttctattgttttgtcctctctttcctctcctacccttccttctctttctctctcccctccttttaaatgcaaatgagtagaaatttcttctaccttccccagctgtttcttcccacctttagagttgtttagacaaggaggagtaagcaaggaacttgttctgctttctatcgtggtcacattggtgatgctcgggacctgccagggtcagaatttatggatatctgaaccctgaccccgttcattctctcagtccacttccaatccacatcagtttgttgtctgccttggagagaagagccaaaactggggtgggcgggtgggtggggagtgcaggatataaatgtgtaagtttttgttttttaaggtttttttcttagtgaattattcacccacagacatgagagaaaaaaagagggagggtgtgtggagaaaaaatgtttacagggctaacaagggatgatgtgtcatttagtatgttactaaaaagtgtggaaatgacttgattttaaggggagggtgaggccgaagagggaagcccaaagcagatcttaatgtttcaaaggagtgcagcccttcacagccatcagatatgagggcactgttctgtctggtgttgtagccatctcaagaacaaatcaacagcaacaaaagagaaagaataaatttttaaaatttaaaaaaacaagaaaacaatcgagggggggccggtccccaatagcccataggggcgcataaactccaggccgccgtaacacgccggcgggaaccggcgtcaccccggagaccacccccgccggaactgaacaagacagacacccacccaaccccccgacagagacaccaccagataaccacagcataacattacaggcgcacaacaaagagtatcggagagacagaacatatcagggaggcgaggagncggc

SEQ ID NO: 325039 - DNA, 257 bp, Homo sapiens
ccttggctcgacactgccagctggaaccagaccatgtaagttcccttctctacctcttcaaatcttaatttcttcctcttgtcagtgccaacttgaaaaggaactgagaagatagataataaacctggctgggcaccctggctcatgcctgtagtccagcactttgggaggccaaggcagatgaatcgttagagcccaggaattcaagaccagcctgggcaacatagggaatcccctgtctctacaaaaagaaataa

SEQ ID NO: 325040 - DNA, 411 bp, Homo sapiens
tgcccctctgtgcacagtttccaagagatgcagatgcccaagtcccttatataaaatggtgcagtatttgcatataacctatccacatcttcccatatactctaaatcacctgtaaattacttataatacctaatacaatgtaaatgctatgtaaatagttgctatagggtaatttttaaatttgtgtttttcattgtattattatttacttatattttgaatattttctatcgatggttgattgaaccctagggtgtgcagggccaactgtagatcactccttagtgatcatacttcttgcttccctattcctgctacctccccagcaacaggataagacctcgtctaacctacatgaagctgcttcggactgtgtatgctcagctctctatgccattgagaatgtggag

SEQ ID NO: 325041 - DNA, 4782 bp, Homo sapiens
  misc_feature (4778)..(4778): n is a, c, g, or t
atcggtgctgtcgcttccggtccgggtaaacgaaccttaggtacactggtgtgtggcctcccaagataggcttctgagggcaagtcagcgactgaagacgggagcgccagaatctgtggactcaagagtctagaatcaagtggaaaaaccggaaaaaaggccaggaacctgaatacgacctaatagctgtttccgagggggcaacttccacggagaaccttctgccctggtaacggccaaagaggaggagatggcgccagtcagggagcggccgtggcccagacagtgaggaagcgcgaaggcggagcaaccgaggaatcctccggagaagaatcagagccgtcgctaccgccactaccgccaccaccatggaaggagcaaagccgacattgcagctcgtgtaccaggcagtgcaggcgctttaccacgacccagatcccagcggaaaggagcgcgcctctttttggcttggggagctgcagcgttcgcctctttgaaatgtgctgctagtgggagctgcagcttcctcctgctgactctgagccccaggcttcagttgagatggtcctttcagaaatgtggagcttagtccaagcctggatttcagtgggtagcacctggcatctgtggctagaaagtcctatgaagtgttcatgcatgggagatctcagaccagttgttacagatccggcaggatgtggagtcatgctattttgctgcacagaccatgaaaatgaagattcagacctcattttatgagctccccacagactctcatgcctctttacgggactcattgctaacccatatccagaacttgaaagacttgtcacctgttattgtaacgcagctggctttagcaatagcagatcttgccctacagatgccttcctggaagggatgtgtgcaaacactggtggaaaaatacagcaatgatgtgacttctttgccttttttgctggagatccttacagtgttacctgaagaagtacatagtcgttccttacgaattggagctaatcggcgcacagaaattatagaagatttggccttctactctagtacagtagtatctctattgatgacctgtgtagaaaaagcaggaacagatgagaaaatgcttatgaaggtttttcgctgtttgggaagttggtttaacttgggagttttggacagtaacttcatggctaacaataaattactagcactcctttttgaggttttgcaacaggataagacctcgtctaacctacatgaagctgcttcggactgtgtatgctcagctctctatgccattgagaatgtggagactaacttgccattagccatgcaactttttcagggagtgctgacattggagactgcctatcatatggccgtggcacgtgaagatttagacaaagttctgaattactgccgtattttcactgaactatgtgaaacttttcttgaaaaaattgtttgtactccaggccaaggtcttggggaccttcgaactctggagctgctgcttatctgtgcaggccatcctcaatatgaggtagtagaaatttcatttaacttttggtaccgactgggggaacatttgtacaaaactaacgatgaagttattcatggcatcttcaaagcttacattcagaggctgcttcacgccttggctcgacactgccagctggaaccagaccatgagggggttcctgaggagactgatgactttggggagtttcgcatgagggtatcagacctggtaaaggacttgattttcttgatagggtctatggagtgttttgctcagttatattctactctgaaagaaggcaacccaccctgggaggtgacagaagcggttctctttatcatggctgctatagcaaagagtgttgatccggaaaacaatccaacacttgtggaagtcctagaaggagttgtccgcctcccggagaccgtacatacggctgtgcgatacaccagcattgaattggttggagagatgagtgaagtcgttgatcgaaatcctcagttccttgaccctgtgttgggctatttgatgaaaggcctgtgtgaaaagcccctggcttctgctgcagccaaagccattcataacatttgctctgtctgccgagatcacatggctcagcactttaatggactcctggagattgcccgctccctcgattccttcctgttgtctccagaagctgctgtgggcttgctaaaagggacagcacttgtcctagcccgattacctttggataagattaccgaatgtcttagtgaactatgttctgttcaggttatggcattgaaaaagctgttgtctcaagagcccagcaatggcatatcctcagatcccacagtgttcttagatcgccttgcagtgatatttaggcataccaatcccattgtggaaaatggacagactcatccgtgtcagaaagtcatacaggaaatatggccagttttatccgagactctaaataagcaccgagctgataatcggattgtagagcgttgttgcaggtgcctgcgctttgctgttcgctgtgtaggcaaaggatctgcagcactgctgcagccactagtcacacagatggtgaatgtgtaccacgtacatcagcattcctgcttcctgtaccttggcagtatccttgtggatgaatatggcatggaagaaggctgtcggcagggactgctagacatgctccaggcactgtgcatccccacctttcagctcctagaacagcagaatggtctccagaatcaccctgacactgtagatgacctgttccggctagccaccaggtttattcagcgtagccctgtcaccttgctgcggagccaagtggtcatccctatcttacagtgggccattgcctctactaccctggaccaccgggatgccaattgtagtgtcatgaggtttctacgagacctcattcatacaggggtagccaatgatcatgaagaagactttgaattacggaaagaactgattggacaggtgatgaaccagcttggacagcagcttgtcagccagctgctgcacacctgctgcttttgcctccccccctataccctaccagatgtggctgaagtgctctgggagatcatgcaggttgacagaccgactttttgtcgatggttagaaaattccttaaaaggtttgccaaaggaaacaaccgtgggagccgtcacagtgacacacaaacaacttacagacttccacaagcaagtcactagtgctgaggaatgtaaacaagtttgctgggccttgcgagacttcaccaggttgtttcgatagctcacactcctgcactgtgcctgtcacccaggaatgtcttttttaattagaagacaggaagaaaacaaaaaccagactgtgtcccacaatcagaaacctccgttgtggcagaggggccttcaccgccaccagggtgtcccgccagacagggagagactccagccttctgaggccatcctgaggagttcctgtttgggggtgtgagggaaaatcagcgcggattttaaaaagatggctgtggcctgcccggcgtggtgggaggggagctggtttcctggtgaactttctaaaaggaaaaataattttaagtaaagaaaaaagaaaaaaaaggaagactaaacagaaaccagaactgaaacattcacctggtagcaaatgacacatgcacgcacacacacatacacgcacaagcgccagtgcgcacgtgtacacagaaaaacaaaaggacaagctttctgtgaaacaaaatatttacttagggataatgtggggattcacatgaattaaatagctgcaattggaagaagagggtcagggtcatttgttcaggttttctattgttttgtcctctctttcctctcctacccttccttctctttctctctcccctccttttaaatgcaaatgagtagaaatttcttctaccttccccagctgtttcttcccacctttagagttgtttagacaaggaggagtaagcaaggaacttgttctgctttctatcgtggtcacattggtgatgctcgggacctgccagggtcagaatttatggatatctgaaccctgaccccgttcattctctcagtccacttccaatccacatcagtttgttgtctgccttggagagaagagccaaaactggggtgggcgggtgggtggggagtgcaggatataaatgtgtaagtttttgttttttaaggtttttttcttagtgaattattcacccacagacatgagagaaaaaaagagggagggtgtgtggagaaaaaatgtttacagggctaacaagggatgatgtgtcatttagtatgttactaaaaagtgtggaaatgacttgattttaaggggagggtgaggccgaagagggaagcccaaagcagatcttaatgtttcaaaggagtgcagcccttcacagccatcagatatgagggcactgttctgtctggtgttgtagccatctcaagaacaaatcaacagcaacaaaagagaaagaataaatttttaaaatttaaaaaaacaagaaaacaatcgagggggggccggtccccaatagcccataggggcgcataaactccaggccgccgtaacacgccggcgggaaccggcgtcaccccggagaccacccccgccggaactgaacaagacagacacccacccaaccccccgacagagacaccaccagataaccacagcataacattacaggcgcacaacaaagagtatcggagagacagaacatatcagggaggcgaggagncggc

SEQ ID NO: 325042 - DNA, 3179 bp, Homo sapiens
  misc_feature (3175)..(3175): n is a, c, g, or t
atgcacagaaccagcagagtctccccttttcctgagccgagtgccaggaacactgtggacgtctttgttcagaagggatcaggttggggggcagcccccagtccctttctgtcccagctcagttttccaaaagacactgacatgtaattcttctctattgtaaggtttccatctatggagtgttttgctcagttatattctactctgaaagaaggcaacccaccctgggaggtgacagaagcggttctctttatcatggctgctatagcaaagagtgttgatccggaaaacaatccaacacttgtggaagtcctagaaggagttgtccgcctcccggagaccgtacatacggctgtgcgatacaccagcattgaattggttggagagatgagtgaagtcgttgatcgaaatcctcagttccttgaccctgtgttgggctatttgatgaaaggcctgtgtgaaaagcccctggcttctgctgcagccaaagccattcataacatttgctctgtctgccgagatcacatggctcagcactttaatggactcctggagattgcccgctccctcgattccttcctgttgtctccagaagctgctgtgggcttgctaaaagggacagcacttgtcctagcccgattacctttggataagattaccgaatgtcttagtgaactatgttctgttcaggttatggcattgaaaaagctgttgtctcaagagcccagcaatggcatatcctcagatcccacagtgttcttagatcgccttgcagtgatatttaggcataccaatcccattgtggaaaatggacagactcatccgtgtcagaaagtcatacaggaaatatggccagttttatccgagactctaaataagcaccgagctgataatcggattgtagagcgttgttgcaggtgcctgcgctttgctgttcgctgtgtaggcaaaggatctgcagcactgctgcagccactagtcacacagatggtgaatgtgtaccacgtacatcagcattcctgcttcctgtaccttggcagtatccttgtggatgaatatggcatggaagaaggctgtcggcagggactgctagacatgctccaggcactgtgcatccccacctttcagctcctagaacagcagaatggtctccagaatcaccctgacactgtagatgacctgttccggctagccaccaggtttattcagcgtagccctgtcaccttgctgcggagccaagtggtcatccctatcttacagtgggccattgcctctactaccctggaccaccgggatgccaattgtagtgtcatgaggtttctacgagacctcattcatacaggggtagccaatgatcatgaagaagactttgaattacggaaagaactgattggacaggtgatgaaccagcttggacagcagcttgtcagccagctgctgcacacctgctgcttttgcctccccccctataccctaccagatgtggctgaagtgctctgggagatcatgcaggttgacagaccgactttttgtcgatggttagaaaattccttaaaaggtttgccaaaggaaacaaccgtgggagccgtcacagtgacacacaaacaacttacagacttccacaagcaagtcactagtgctgaggaatgtaaacaagtttgctgggccttgcgagacttcaccaggttgtttcgatagctcacactcctgcactgtgcctgtcacccaggaatgtcttttttaattagaagacaggaagaaaacaaaaaccagactgtgtcccacaatcagaaacctccgttgtggcagaggggccttcaccgccaccagggtgtcccgccagacagggagagactccagccttctgaggccatcctgaggagttcctgtttgggggtgtgagggaaaatcagcgcggattttaaaaagatggctgtggcctgcccggcgtggtgggaggggagctggtttcctggtgaactttctaaaaggaaaaataattttaagtaaagaaaaaagaaaaaaaaggaagactaaacagaaaccagaactgaaacattcacctggtagcaaatgacacatgcacgcacacacacatacacgcacaagcgccagtgcgcacgtgtacacagaaaaacaaaaggacaagctttctgtgaaacaaaatatttacttagggataatgtggggattcacatgaattaaatagctgcaattggaagaagagggtcagggtcatttgttcaggttttctattgttttgtcctctctttcctctcctacccttccttctctttctctctcccctccttttaaatgcaaatgagtagaaatttcttctaccttccccagctgtttcttcccacctttagagttgtttagacaaggaggagtaagcaaggaacttgttctgctttctatcgtggtcacattggtgatgctcgggacctgccagggtcagaatttatggatatctgaaccctgaccccgttcattctctcagtccacttccaatccacatcagtttgttgtctgccttggagagaagagccaaaactggggtgggcgggtgggtggggagtgcaggatataaatgtgtaagtttttgttttttaaggtttttttcttagtgaattattcacccacagacatgagagaaaaaaagagggagggtgtgtggagaaaaaatgtttacagggctaacaagggatgatgtgtcatttagtatgttactaaaaagtgtggaaatgacttgattttaaggggagggtgaggccgaagagggaagcccaaagcagatcttaatgtttcaaaggagtgcagcccttcacagccatcagatatgagggcactgttctgtctggtgttgtagccatctcaagaacaaatcaacagcaacaaaagagaaagaataaatttttaaaatttaaaaaaacaagaaaacaatcgagggggggccggtccccaatagcccataggggcgcataaactccaggccgccgtaacacgccggcgggaaccggcgtcaccccggagaccacccccgccggaactgaacaagacagacacccacccaaccccccgacagagacaccaccagataaccacagcataacattacaggcgcacaacaaagagtatcggagagacagaacatatcagggaggcgaggagncggc

SEQ ID NO: 325043 - DNA, 4861 bp, Homo sapiens
  misc_feature (4857)..(4857): n is a, c, g, or t
atcggtgctgtcgcttccggtccgggtaaacgaaccttaggtacactggtgtgtggcctcccaagataggcttctgagggcaagtcagcgactgaagacgggagcgccagaatctgtggactcaagagtctagaatcaagtggaaaaaccggaaaaaaggccaggaacctgaatacgacctaatagctgtttccgagggggcaacttccacggagaaccttctgccctggtaacggccaaagaggaggagatggcgccagtcagggagcggccgtggcccagacagtgaggaagcgcgaaggcggagcaaccgaggaatcctccggagaagaatcagagccgtcgctaccgccactaccgccaccaccatggaaggagcaaagccgacattgcagctcgtgtaccaggcagtgcaggcgctttaccacgacccagatcccagcggaaaggagcgcgcctctttttggcttggggagctgcagcgttcggttcatgcatgggagatctcagaccagttgttacagatccggcaggatgtggagtcatgctattttgctgcacagaccatgaaaatgaagattcagacctcattttatgagctccccacagactctcatgcctctttacgggactcattgctaacccatatccagaacttgaaagacttgtcacctgttattgtaacgcagctggctttagcaatagcagatcttgccctacagatgccttcctggaagggatgtgtgcaaacactggtggaaaaatacagcaatgatgtgacttctttgccttttttgctggagatccttacagtgttacctgaagaagtacatagtcgttccttacgaattggagctaatcggcgcacagaaattatagaagatttggccttctactctagtacagtagtatctctattgatgacctgtgtagaaaaagcaggaacagatgagaaaatgcttatgaaggtttttcgctgtttgggaagttggtttaacttgggagttttggacagtaacttcatggctaacaataaattactagcactcctttttgaggttttgcaacaggataagacctcgtctaacctacatgaagctgcttcggactgtgtatgctcagctctctatgccattgagaatgtggagactaacttgccattagccatgcaactttttcagggagtgctgacattggagactgcctatcatatggccgtggcacgtgaagatttagacaaagttctgaattactgccgtattttcactgaactatgtgaaacttttcttgaaaaaattgtttgtactccaggccaaggtcttggggaccttcgaactctggagctgctgcttatctgtgcaggccatcctcaatatgaggtagtagaaatttcatttaacttttggtaccgactgggggaacatttgtacaaaactaacgatgaagttattcatggcatcttcaaagcttacattcagaggctgcttcacgccttggctcgacactgccagctggaaccagaccatgagggggttcctgaggagactgatgactttggggagtttcgcatgagggtatcagacctggtaaaggacttgattttcttgatagggtctatggagtgttttgctcagttatattctactctgaaagaaggcaacccaccctgggaggtgacagaagcggttctctttatcatggctgctatagcaaagagtgttgatccggaaaacaatccaacacttgtggaagtcctagaaggagttgtccgcctcccggagaccgtacatacggctgtgcgatacaccagcattgaattggttggagagatgagtgaagtcgttgatcgaaatcctcagttccttgaccctgtgttgggctatttgatgaaaggcctgtgtgaaaagcccctggcttctgctgcagccaaagccattcataacatttgctctgtctgccgagatcacatggctcagcactttaatggactcctggagattgcccgctccctcgattccttcctgttgtctccagaagctgctgtgggcttgctaaaagggacagcacttgtcctagcccgattacctttggataagattaccgaatgtcttagtgaactatgttctgttcaggttatggcattgaaaaagctgttgtctcaagagcccagcaatggcatatcctcagatcccacagtgttcttagatcgccttgcagtgatatttaggcataccaatcccattgtggaaaatggacagactcatccgtgtcagaaagtcatacaggaaatatggccagttttatccgagactctaaataagcaccgagctgataatcggattgtagagcgttgttgcaggtgcctgcgctttgctgttcgctgtgtaggcaaaggatctgcagcactgctgcagccactagtcacacagatggtgaatgtgtaccacgtacatcagcattcctgcttcctgtaccttggcagtatccttgtggatgaatatggcatggaagaaggctgtcggcagggactgctagacatgctccaggcactgtgcatccccacctttcagctcctagaacagcagaatggtctccagaatcaccctgacactgtagatgacctgttccggctagccaccaggtttattcagcgtagccctgtcaccttgctgcggagccaagtggtcatccctatcttacagtgggccattgcctctactaccctggaccaccgggatgccaattgtagtgtcatgaggtttctacgagacctcattcatacaggggtagccaatgatcatgaagaagactttgaattacggaaagaactgattggacaggtgatgaaccagcttggacagcagcttgtcagccagctgctgcacacctgctgcttttgcctccccccctataccctaccagatgtggctgaagtgctctgggagatcatgcaggttgacagaccgactttttgtcgatggttagaaaattccttaaaaggtttgccaaaggaaacaaccgtgggagccgtcacagtgacacacaaacaacttacagacttccacaagcaagtcactagtgctgaggaatgtaaacaagtttgctgggccttgcgagacttcaccaggttgtttcgatagctcacactcctgcactgtgcctgtcacccagccacagcacactcagcattggaagcacactgcagacggtgtctcattaaagcagtagctcccttgaacccacaagttaaaacgccagacttttatttatttgtttattttttctgagttcttattggcagacttcagaatgaggtacctgaggaaatatagaaacctctgccttaaggttgattttactaaatgctctattttctggtgcagttattgactgtcttatctcttttgtcaggaatgtcttttttaattagaagacaggaagaaaacaaaaaccagactgtgtcccacaatcagaaacctccgttgtggcagaggggccttcaccgccaccagggtgtcccgccagacagggagagactccagccttctgaggccatcctgaggagttcctgtttgggggtgtgagggaaaatcagcgcggattttaaaaagatggctgtggcctgcccggcgtggtgggaggggagctggtttcctggtgaactttctaaaaggaaaaataattttaagtaaagaaaaaagaaaaaaaaggaagactaaacagaaaccagaactgaaacattcacctggtagcaaatgacacatgcacgcacacacacatacacgcacaagcgccagtgcgcacgtgtacacagaaaaacaaaaggacaagctttctgtgaaacaaaatatttacttagggataatgtggggattcacatgaattaaatagctgcaattggaagaagagggtcagggtcatttgttcaggttttctattgttttgtcctctctttcctctcctacccttccttctctttctctctcccctccttttaaatgcaaatgagtagaaatttcttctaccttccccagctgtttcttcccacctttagagttgtttagacaaggaggagtaagcaaggaacttgttctgctttctatcgtggtcacattggtgatgctcgggacctgccagggtcagaatttatggatatctgaaccctgaccccgttcattctctcagtccacttccaatccacatcagtttgttgtctgccttggagagaagagccaaaactggggtgggcgggtgggtggggagtgcaggatataaatgtgtaagtttttgttttttaaggtttttttcttagtgaattattcacccacagacatgagagaaaaaaagagggagggtgtgtggagaaaaaatgtttacagggctaacaagggatgatgtgtcatttagtatgttactaaaaagtgtggaaatgacttgattttaaggggagggtgaggccgaagagggaagcccaaagcagatcttaatgtttcaaaggagtgcagcccttcacagccatcagatatgagggcactgttctgtctggtgttgtagccatctcaagaacaaatcaacagcaacaaaagagaaagaataaatttttaaaatttaaaaaaacaagaaaacaatcgagggggggccggtccccaatagcccataggggcgcataaactccaggccgccgtaacacgccggcgggaaccggcgtcaccccggagaccacccccgccggaactgaacaagacagacacccacccaaccccccgacagagacaccaccagataaccacagcataacattacaggcgcacaacaaagagtatcggagagacagaacatatcagggaggcgaggagncggc

SEQ ID NO: 325044 - DNA, 4529 bp, Homo sapiens
  misc_feature (4525)..(4525): n is a, c, g, or t
atcggtgctgtcgcttccggtccgggtaaacgaaccttaggtacactggtgtgtggcctcccaagataggcttctgagggcaagtcagcgactgaagacgggagcgccagaatctgtggactcaagagtctagaatcaagtggaaaaaccggaaaaaaggccaggaacctgaatacgacctaatagctgtttccgagggggcaacttccacggagaaccttctgccctggtaacggccaaagaggaggagatggcgccagtcagggagcggccgtggcccagacagtgaggaagcgcgaaggcggagcaaccgaggaatcctccggagaagaatcagagccgtcgctaccgccactaccgccaccaccatggaaggagcaaagccgacattgcagctcgtgtaccaggcagtgcaggcgctttaccacgacccagatcccagcggaaaggagcgcgcctctttttggcttggggagctgcagcgttcggttcatgcatgggagatctcagaccagttgttacagatccggcaggatgtggagtcatgctattttgctgcacagaccatgaaaatgaagattcagacctcattttatgagctccccacagactctcatgcctctttacgggactcattgctaacccatatccagaacttgaaagacttgtcacctgttattgtaacgcagctggctttagcaatagcagatcttgccctacagatgccttcctggaagggatgtgtgcaaacactggtggaaaaatacagcaatgatgtgacttctttgccttttttgctggagatccttacagtgttacctgaagaagtacatagtcgttccttacgaattggagctaatcggcgcacagaaattatagaagatttggccttctactctagtacagtagtatctctattgatgacctgtgtagaaaaagcaggaacagatgagaaaatgcttatgaaggtttttcgctgtttgggaagttggtttaacttgggagttttggacagtaacttcatggctaacaataaattactagcactcctttttgaggttttgcaacaggataagacctcgtctaacctacatgaagctgcttcggactgtgtatgctcagctctctatgccattgagaatgtggagactaacttgccattagccatgcaactttttcagggagtgctgacattggagactgcctatcatatggccgtggcacgtgaagatttagacaaagttctgaattactgccgtattttcactgaactatgtgaaacttttcttgaaaaaattgtttgtactccaggccaaggtcttggggaccttcgaactctggagctgctgcttatctgtgcaggccatcctcaatatgaggtagtagaaatttcatttaacttttggtaccgactgggggaacatttgtacaaaactaacgatgaagttattcatggcatcttcaaagcttacattcagaggctgcttcacgccttggctcgacactgccagctggaaccagaccatgagggggttcctgaggagactgatgactttggggagtttcgcatgagggtatcagacctggtaaaggacttgattttcttgatagggtctatggagtgttttgctcagttatattctactctgaaagaaggcaacccaccctgggaggtgacagaagcggttctctttatcatggctgctatagcaaagagtgttgatccggaaaacaatccaacacttgtggaagtcctagaaggagttgtccgcctcccggagaccgtacatacggctgtgcgatacaccagcattgaattggttggagagatgagtgaagtcgttgatcgaaatcctcagttccttgaccctgtgttgggctatttgatgaaaggcctgtgtgaaaagcccctggcttctgctgcagccaaagccattcataacatttgctctgtctgccgagatcacatggctcagcactttaatggactcctggagattgcccgctccctcgattccttcctgttgtctccagaagctgctgtgggcttgctaaaagggacagcacttgtcctagcccgattacctttggataagattaccgaatgtcttagtgaactatgttctgttcaggttatggcattgaaaaagctgttgtctcaagagcccagcaatggcatatcctcagatcccacagtgttcttagatcgccttgcagtgatatttaggcataccaatcccattgtggaaaatggacagactcatccgtgtcagaaagtcatacaggaaatatggccagttttatccgagactctaaataagcaccgagctgataatcggattgtagagcgttgttgcaggtgcctgcgctttgctgttcgctgtgtaggcaaaggatctgcagcactgctgcagccactagtcacacagatggtgaatgtgtaccacgtacatcagcattcctgcttcctgtaccttggcagtatccttgtggatgaatatggcatggaagaaggctgtcggcagggactgctagacatgctccaggcactgtgcatccccacctttcagctcctagaacagcagaatggtctccagaatcaccctgacactgtagatgacctgttccggctagccaccaggtttattcagcgtagccctgtcaccttgctgcggagccaagtggtcatccctatcttacagtgggccattgcctctactaccctggaccaccgggatgccaattgtagtgtcatgaggtttctacgagacctcattcatacaggggtagccaatgatcatgaagaagactttgaattacggaaagaactgattggacaggtgatgaaccagcttggacagcagcttgtcagccagctgctgcacacctgctgcttttgcctccccccctataccctaccagatgtggctgaagtgctctgggagatcatgcaggttgacagaccgactttttgtcgatggttagaaaattccttaaaaggtttgccaaaggaaacaaccgtgggagccgtcacagtgacacacaaacaacttacagacttccacaagcaagtcactaggaatgtcttttttaattagaagacaggaagaaaacaaaaaccagactgtgtcccacaatcagaaacctccgttgtggcagaggggccttcaccgccaccagggtgtcccgccagacagggagagactccagccttctgaggccatcctgaggagttcctgtttgggggtgtgagggaaaatcagcgcggattttaaaaagatggctgtggcctgcccggcgtggtgggaggggagctggtttcctggtgaactttctaaaaggaaaaataattttaagtaaagaaaaaagaaaaaaaaggaagactaaacagaaaccagaactgaaacattcacctggtagcaaatgacacatgcacgcacacacacatacacgcacaagcgccagtgcgcacgtgtacacagaaaaacaaaaggacaagctttctgtgaaacaaaatatttacttagggataatgtggggattcacatgaattaaatagctgcaattggaagaagagggtcagggtcatttgttcaggttttctattgttttgtcctctctttcctctcctacccttccttctctttctctctcccctccttttaaatgcaaatgagtagaaatttcttctaccttccccagctgtttcttcccacctttagagttgtttagacaaggaggagtaagcaaggaacttgttctgctttctatcgtggtcacattggtgatgctcgggacctgccagggtcagaatttatggatatctgaaccctgaccccgttcattctctcagtccacttccaatccacatcagtttgttgtctgccttggagagaagagccaaaactggggtgggcgggtgggtggggagtgcaggatataaatgtgtaagtttttgttttttaaggtttttttcttagtgaattattcacccacagacatgagagaaaaaaagagggagggtgtgtggagaaaaaatgtttacagggctaacaagggatgatgtgtcatttagtatgttactaaaaagtgtggaaatgacttgattttaaggggagggtgaggccgaagagggaagcccaaagcagatcttaatgtttcaaaggagtgcagcccttcacagccatcagatatgagggcactgttctgtctggtgttgtagccatctcaagaacaaatcaacagcaacaaaagagaaagaataaatttttaaaatttaaaaaaacaagaaaacaatcgagggggggccggtccccaatagcccataggggcgcataaactccaggccgccgtaacacgccggcgggaaccggcgtcaccccggagaccacccccgccggaactgaacaagacagacacccacccaaccccccgacagagacaccaccagataaccacagcataacattacaggcgcacaacaaagagtatcggagagacagaacatatcagggaggcgaggagncggc

SEQ ID NO: 325045 - DNA, 449 bp, Homo sapiens
gacattctgggaaatatcagtcaggaatgctgatcccgtttcagtcttagcatgctgtatgatcttgagagagtgtcttaacctctctggggtttgggctttcccatctgtaggggagcattcccggattgtctgggtgaacagctggcagatgagaaaggccagtggttgctactaagcagctgctgaatgaacacagcagtggggctgctgagggcatagtagaggcccagaatcagagtggactttccagatgtaagaaccataagcaatggagattttgagtcctacacgtgagtcagctgggctcattctgcatgtcctgcctggattgttgttcagggggtaccaatggctaactttgggggtccttgtctccgatcctcatccactcactttgcatgtgctgtgaatcgggctgaactcatatttctattttgcatccggac

SEQ ID NO: 325046 - DNA, 4864 bp, Homo sapiens
agccacagtgccctgctcagaagccccgggctcgtcagtcaaaccggttctctgtttgcactcggcagcacgggcaggcaagtggtccctaggttcgggagcagagcagcagcgcctcagtcctggtcccccagtcccaagcctcacctgcctgcccagcgccaggatggccaccatcacctgcacccgcttcacggaagagtaccagctcttcgaggaattgggcaagggagccttctcggtggtgcgaaggtgtgtgaaggtgctggctggccaggagtatgctgccaagatcatcaacacaaagaagctgtcagccagagaccatcagaagctggagcgtgaagcccgcatctgccgcctgctgaagcaccccaacatcgtccgactacatgacagcatctcagaggagggacaccactacctgatcttcgacctggtcactggtggggaactgtttgaagatatcgtggcccgggagtattacagtgaggcggatgccagtcactgtatccagcagatcctggaggctgtgctgcactgccaccagatgggggtggtgcaccgggacctgaagcctgagaatctgttgctggcctccaagctcaagggtgccgcagtgaagctggcagactttggcctggccatagaggtggagggggagcagcaggcatggtttgggtttgcagggactcctggatatctctccccagaagtgctgcggaaggacccgtacgggaagcctgtggacctgtgggcttgtggggtcatcctgtacatcctgctggttgggtaccccccgttctgggatgaggaccagcaccgcctgtaccagcagatcaaagccggcgcctatgatttcccatcgccggaatgggacactgtcaccccggaagccaaggatctgatcaataagatgctgaccattaacccatccaaacgcatcacagctgccgaagcccttaagcacccctggatctcgcaccgctccaccgtggcatcctgcatgcacagacaggagaccgtggactgcctgaagaagttcaatgccaggaggaaactgaagggagccattctcaccacgatgctggccaccaggaacttctccggagggaagagtgggggaaacaagaagagcgatggtgtgaagaaaagaaagtccagttccagcgttcagttaatggaatcctcagagagcaccaacaccaccatcgaggatgaagacaccaaagtgcggaaacaggaaattataaaagtgacagagcagctgattgaagccataagcaatggagattttgagtcctacacgaagatgtgcgaccctggcatgacagccttcgaacctgaggccctggggaacctggttgagggcctggacttccatcgattctattttgaaaacctgtggtcccggaacagcaagcccgtgcacaccaccatcctgaatccccacatccacctgatgggcgacgagtcagcctgcatcgcctacatccgcatcacgcagtacctggacgctggcggcatcccacgcaccgcccagtcggaggagacccgtgtctggcaccgccgggacggcaaatggcagatcgtccacttccacagatctggggcgccctccgtcctgccccactgagggaccaggctggggtcgctgcgttgctgtgccgcagagatccactctgtccgtggagtggagctgctggttctcccaggtggattttgctggaattctcccatgtcatcaccccaccaccgtcacttctgtacctgcatcaagaaaacctgcttgttcacaaaagtcatcgcaacttcagagcgaacggccacatctccccacctctcacccccaccctctcccctgccaggctggggcttcctcaggcatgggtgtccacagcactggccccctctccccagcctcagctgctgtccgcctgatctgtcttgggctgtaggctagaatgcccgggctggtgcccaccaggggctggggagaaggaggggtggcatgatgaggaaggcagcatccgtccgtccctctcccagacctctcctcttccagtgtccccggggaagggcagatgacactcccttccccctaagccaaccgcactgaaggagtggggagaagagcatacgccaggagcctcctgcctcaaagtgctcccctaagtcttcttcctcctgtgctgacctcagggtggtctgacccttccctcggtgtgggggatgtggccctctcaggtgcccctacttgctttctgcttccttctggtgaagtccacctccaacattaacctgcccaccccacccccgtcatccctggagaattccagctttgtcgtatctcagagagggaatctaattgtttttggggggcaaaagaaagcaacgtttaggtatcacttctacttggaccgcatgcctttttatagccaaatttctgtgtatttcgtaaatggatttcgcgttaatggatatttatgtaataactagacttctcagattattgtgagaagggtcaggttggaaggggtgtaggaagaggggtgaggggtagtttttttctgttctagtttttttttttttttttgtcatctctgaggtggaccttgtcacctgtggttattggggccaaggcggactcagctccggggagaagggcctctctgccatttcggtcccaaggtgagctgacacaggcgttccttttgggactgtggaagcatcagatgccagcactgactcaggaacagcaagtcagggcagagaggaggagggaggctgtcaggatggaaatacctggacttttctttgcttccctcgcaaactggggtcttctctaccgaacttcccaggatttcatctcaccatatctgtgtgccgcccccagcaccccccacccacctctggggggcccgtgagcgtgtgtcttcattgcctctctccccttggcgtctgatgaccacagcaaagcactgggaatttctactcttcatgcctcatcctgcagcctcgggttcgcattctctctttcttttcctctttccctctttccctgggattgactctgagtggaataccttggcacatccactaggatctactgtctgcactgttttctttgcatgactttatacgcagtaagtatgttgaaaacaaacaaaaagaagaaaacactcaacaaaaccaatctacatgttttggactaaaaaaaaaaatagaggttgtattctcagtgtccgactcggaattatgttgctgcctctctgtgcttttggcctctgtgtggccgtgttttgccagcatgagatactgtcccctctggaggattttaggggaggaagagccacgtccccagggattggaggaggctccggtacccttgaccctcctgggtgttggttggagcagaactggtgaggatgtttgatccgagattttctgagctctccccgatcaccagctgtctgctgggttcttttctcaagtcctgctgcccaggcccaggtgagacaggcaacgccaggtctgcaggccaggagagatgctgcccaggcctcctggtttccaagctggtccatcactggcctctgtccttggcagagaccttgctgcccaggcccaggggcaggctcttggcctgccccaggcccagagggcttcccagtaaggcccagtgatcccattatcccaggggcaaaaccacctgtccccttttgagctgccagttccctacagccatccccagtcaagggtgagggtgtggccttcaccaggggctgctgtaattaccgagcaaggtctgagctcttcttcagcctcagttccctcattggttaaaagggttctttgttcccatccagccgatgaaggagcaaacgtctggctatgtgaagcctaatttacctgcaggaactggcagggatagtcactggctggactcctgtttacttctagacctggtcaggctccatcccctcccccacctgcccctgattcccctcgtcggtgcctgtcaactgcttttcagcagtggactgcaggggaaagagcagtgatttggggtgagtaggcttcaattcccagctctgaccagacttgctgtgtgaccttgggcaagttcctttccctctttggagcttggtttccctgccagaggaaactgagctggaggagcctgaggtcctgcctttcattggctgacacacctcctgtccactgtgtcactctccaagtgccagagaagtggaggcagatcgctaccccaggctgagatggcccccactgtgaaggccacgcctgtgggtgggcagccacctggtgccaccacagggcaccagggatgatcctgatgcggcaggcaggggagactcacagaaaaatctgcccagagcctaccctcaccagacaaactctgtgctcctccaaaacatcctttagatgcaaaataataataataataataataaataaataaataaaaatccaaacccaagtcaaaaccttggctccagcatgaaaacacgtttacaggaaagtgttctcctgggtttgtgcccaccatggtgcgaatcctgacccaaggcctcctgtctcccttcaaagggagacccttttgggggatgagtttgccagactccccgtgctggtttctttgttactatttgtttggggttttgttttagttcttttttttttttcttttcttttttaaaaatatgtggctgtgaacttgaatgaacactgctcaaactttctgctattgggggggcgggtgggatgggaagaaggggcgtttgttttattcttggtgttttcagtgcaataaatagctacaaacttctgtgcaaaaaaaatg

SEQ ID NO: 325047 - DNA, 4292 bp, Homo sapiens
agccacagtgccctgctcagaagccccgggctcgtcagtcaaaccggttctctgtttgcactcggcagcacgggcaggcaagtggtccctaggttcgggagcagagcagcagcgcctcagtcctggtcccccagtcccaagcctcacctgcctgcccagcgccaggatggccaccatcacctgcacccgcttcacggaagagtaccagctcttcgaggaattgggcaagggagccttctcggtggtgcgaaggtgtgtgaaggtgctggctggccaggagtatgctgccaagatcatcaacacaaagaagctgtcagccagagaccatcagaagctggagcgtgaagcccgcatctgccgcctgctgaagcaccccaacatcgtccgactacatgacagcatctcagaggagggacaccactacctgatcttcgacctggtcactggtggggaactgtttgaagatatcgtggcccgggagtattacagtgaggcggatgccagtcactgtatccagcagatcctggaggctgtgctgcactgccaccagatgggggtggtgcaccgggacctgaagcctgagaatctgttgctggcctccaagctcaagggtgccgcagtgaagctggcagactttggcctggccatagaggtggagggggagcagcaggcatggtttgggtttgcagggactcctggatatctctccccagaagtgctgcggaaggacccgtacgggaagcctgtggacctgtgggcttgtggggtcatcctgtacatcctgctggttgggtaccccccgttctgggatgaggaccagcaccgcctgtaccagcagatcaaagccggcgcctatgatttcccatcgccggaatgggacactgtcaccccggaagccaaggatctgatcaataagatgctgaccattaacccatccaaacgcatcacagctgccgaagcccttaagcacccctggatctcgcaccgctccaccgtggcatcctgcatgcacagacaggagaccgtggactgcctgaagaagttcaatgccaggaggaaactgaagggagccattctcaccacgatgctggccaccaggaacttctccggagggaagagtgggggaaacaagaagagcgatggtgtgaaggaatcctcagagagcaccaacaccaccatcgaggatgaagacaccaaagtgcggaaacaggaaattataaaagtgacagagcagctgattgaagccataagcaatggagattttgagtcctacacgaagatgtgcgaccctggcatgacagccttcgaacctgaggccctggggaacctggttgagggcctggacttccatcgattctattttgaaaacctgtggtcccggaacagcaagcccgtgcacaccaccatcctgaatccccacatccacctgatgggcgacgagtcagcctgcatcgcctacatccgcatcacgcagtacctggacgctggcggcatcccacgcaccgcccagtcggaggagacccgtgtctggcaccgccgggacggcaaatggcagatcgtccacttccacagatctggggcgccctccgtcctgccccactgagggaccaggctggggtcgctgcgttgctgtgccgcagagatccactctgtccgtggagtggagctgctggttctcccaggtggattttgctggaattctcccatgtcatcaccccaccaccgtcacttctgtacctgcatcaagaaaacctgcttgttcacaaaagtcatcgcaacttcagagcgaacggccacatctccccacctctcacccccaccctctcccctgccaggctggggcttcctcaggcatgggtgtccacagcactggccccctctccccagcctcagctgctgtccgcctgatctgtcttgggctgtaggctagaatgcccgggctggtgcccaccaggggctggggagaaggaggggtggcatgatgaggaaggcagcatccgtccgtccctctcccagacctctcctcttccagtgtccccggggaagggcagatgacactcccttccccctaagccaaccgcactgaaggagtggggagaagagcatacgccaggagcctcctgcctcaaagtgctcccctaagtcttcttcctcctgtgctgacctcagggtggtctgacccttccctcggtgtgggggatgtggccctctcaggtgcccctacttgctttctgcttccttctggtgaagtccacctccaacattaacctgcccaccccacccccgtcatccctggagaattccagctttgtcgtatctcagagagggaatctaattgtttttggggggcaaaagaaagcaacgtttaggtatcacttctacttggaccgcatgcctttttatagccaaatttctgtgtatttcgtaaatggatttcgcgttaatggatatttatgtaataactagacttctcagattattgtgagaagggtcaggttggaaggggtgtaggaagaggggtgaggggtagtttttttctgttctagtttttttttttttttttgtcatctctgaggtggaccttgtcacctgtggttattggggccaaggcggactcagctccggggagaagggcctctctgccatttcggtcccaaggtgagctgacacaggcgttccttttgggactgtggaagcatcagatgccagcactgactcaggaacagcaagtcagggcagagaggaggagggaggctgtcaggatggaaatacctggacttttctttgcttccctcgcaaactggggtcttctctaccgaacttcccaggatttcatctcaccatatctgtgtgccgcccccagcaccccccacccacctctggggggcccgtgagcgtgtgtcttcattgcctctctccccttggcgtctgatgaccacagcaaagcactgggaatttctactcttcatgcctcatcctgcagcctcgggttcgcattctctctttcttttcctctttccctctttccctgggattgactctgagtggaataccttggcacatccactaggatctactgtctgcactgttttctttgcatgactttatacgcagtaagtatgttgaaaacaaacaaaaagaagaaaacactcaacaaaaccaatctacatgttttggactaaaaaaaaaaatagaggttgtattctcagtgtccgactcggaattatgttgctgcctctctgtgcttttggcctctgtgtggccgtgttttgccagcatgagatactgtcccctctggaggattttaggggaggaagagccacgtccccagggattggaggaggctccggtacccttgaccctcctgggtgttggttggagcagaactggtgaggatgtttgatccgagattttctgagctctccccgatcaccagctgtctgctgggttcttttctcaagtcctgctgcccaggcccaggtgagacaggcaacgccaggtctgcaggccaggagagatgctgcccaggcctcctggtttccaagctggtccatcactggcctctgtccttggcagagaccttgctgcccaggcccaggggcaggctcttggcctgccccaggcccagagggcttcccagtaaggcccagtgatcccattatcccaggggcaaaaccacctgtccccttttgagctgccagttccctacagccatccccagtcaagggtgagggtgtgggtgggcagccacctggtgccaccacagggcaccagggatgatcctgatgcggcaggcaggggagactcacagaaaaatctgcccagagcctaccctcaccagacaaactctgtgctcctccaaaacatcctttagatgcaaaataataataataataataataaataaataaataaaaatccaaacccaagtcaaaaccttggctccagcatgaaaacacgtttacaggaaagtgttctcctgggtttgtgcccaccatggtgcgaatcctgacccaaggcctcctgtctcccttcaaagggagacccttttgggggatgagtttgccagactccccgtgctggtttctttgttactatttgtttggggttttgttttagttcttttttttttttcttttcttttttaaaaatatgtggctgtgaacttgaatgaacactgctcaaactttctgctattgggggggcgggtgggatgggaagaaggggcgtttgttttattcttggtgttttcagtgcaataaatagctacaaacttctgtgcaaaaaaaatg

SEQ ID NO: 325048 - DNA, 4776 bp, Homo sapiens
agccacagtgccctgctcagaagccccgggctcgtcagtcaaaccggttctctgtttgcactcggcagcacgggcaggcaagtggtccctaggttcgggagcagagcagcagcgcctcagtcctggtcccccagtcccaagcctcacctgcctgcccagcgccaggatggccaccatcacctgcacccgcttcacggaagagtaccagctcttcgaggaattgggcaagggagccttctcggtggtgcgaaggtgtgtgaaggtgctggctggccaggagtatgctgccaagatcatcaacacaaagaagctgtcagccagagaccatcagaagctggagcgtgaagcccgcatctgccgcctgctgaagcaccccaacatcgtccgactacatgacagcatctcagaggagggacaccactacctgatcttcgacctggtcactggtggggaactgtttgaagatatcgtggcccgggagtattacagtgaggcggatgccagtcactgtatccagcagatcctggaggctgtgctgcactgccaccagatgggggtggtgcaccgggacctgaagcctgagaatctgttgctggcctccaagctcaagggtgccgcagtgaagctggcagactttggcctggccatagaggtggagggggagcagcaggcatggtttgggtttgcagggactcctggatatctctccccagaagtgctgcggaaggacccgtacgggaagcctgtggacctgtgggcttgtggggtcatcctgtacatcctgctggttgggtaccccccgttctgggatgaggaccagcaccgcctgtaccagcagatcaaagccggcgcctatgatttcccatcgccggaatgggacactgtcaccccggaagccaaggatctgatcaataagatgctgaccattaacccatccaaacgcatcacagctgccgaagcccttaagcacccctggatctcgcaccgctccaccgtggcatcctgcatgcacagacaggagaccgtggactgcctgaagaagttcaatgccaggaggaaactgaagggagccattctcaccacgatgctggccaccaggaacttctccggagggaagagtgggggaaacaagaagagcgatggtgtgaaggaatcctcagagagcaccaacaccaccatcgaggatgaagacaccaaagccccggtctcagcaccttatctggactgacttcctggagtgtcactatagcccatgaagtaggtgctgctgtgaacctcattctacagctgaggaaacagaggacagagaggccggtgtggtcccggaacagcaagcccgtgcacaccaccatcctgaatccccacatccacctgatgggcgacgagtcagcctgcatcgcctacatccgcatcacgcagtacctggacgctggcggcatcccacgcaccgcccagtcggaggagacccgtgtctggcaccgccgggacggcaaatggcagatcgtccacttccacagatctggggcgccctccgtcctgccccactgagggaccaggctggggtcgctgcgttgctgtgccgcagagatccactctgtccgtggagtggagctgctggttctcccaggtggattttgctggaattctcccatgtcatcaccccaccaccgtcacttctgtacctgcatcaagaaaacctgcttgttcacaaaagtcatcgcaacttcagagcgaacggccacatctccccacctctcacccccaccctctcccctgccaggctggggcttcctcaggcatgggtgtccacagcactggccccctctccccagcctcagctgctgtccgcctgatctgtcttgggctgtaggctagaatgcccgggctggtgcccaccaggggctggggagaaggaggggtggcatgatgaggaaggcagcatccgtccgtccctctcccagacctctcctcttccagtgtccccggggaagggcagatgacactcccttccccctaagccaaccgcactgaaggagtggggagaagagcatacgccaggagcctcctgcctcaaagtgctcccctaagtcttcttcctcctgtgctgacctcagggtggtctgacccttccctcggtgtgggggatgtggccctctcaggtgcccctacttgctttctgcttccttctggtgaagtccacctccaacattaacctgcccaccccacccccgtcatccctggagaattccagctttgtcgtatctcagagagggaatctaattgtttttggggggcaaaagaaagcaacgtttaggtatcacttctacttggaccgcatgcctttttatagccaaatttctgtgtatttcgtaaatggatttcgcgttaatggatatttatgtaataactagacttctcagattattgtgagaagggtcaggttggaaggggtgtaggaagaggggtgaggggtagtttttttctgttctagtttttttttttttttttgtcatctctgaggtggaccttgtcacctgtggttattggggccaaggcggactcagctccggggagaagggcctctctgccatttcggtcccaaggtgagctgacacaggcgttccttttgggactgtggaagcatcagatgccagcactgactcaggaacagcaagtcagggcagagaggaggagggaggctgtcaggatggaaatacctggacttttctttgcttccctcgcaaactggggtcttctctaccgaacttcccaggatttcatctcaccatatctgtgtgccgcccccagcaccccccacccacctctggggggcccgtgagcgtgtgtcttcattgcctctctccccttggcgtctgatgaccacagcaaagcactgggaatttctactcttcatgcctcatcctgcagcctcgggttcgcattctctctttcttttcctctttccctctttccctgggattgactctgagtggaataccttggcacatccactaggatctactgtctgcactgttttctttgcatgactttatacgcagtaagtatgttgaaaacaaacaaaaagaagaaaacactcaacaaaaccaatctacatgttttggactaaaaaaaaaaatagaggttgtattctcagtgtccgactcggaattatgttgctgcctctctgtgcttttggcctctgtgtggccgtgttttgccagcatgagatactgtcccctctggaggattttaggggaggaagagccacgtccccagggattggaggaggctccggtacccttgaccctcctgggtgttggttggagcagaactggtgaggatgtttgatccgagattttctgagctctccccgatcaccagctgtctgctgggttcttttctcaagtcctgctgcccaggcccaggtgagacaggcaacgccaggtctgcaggccaggagagatgctgcccaggcctcctggtttccaagctggtccatcactggcctctgtccttggcagagaccttgctgcccaggcccaggggcaggctcttggcctgccccaggcccagagggcttcccagtaaggcccagtgatcccattatcccaggggcaaaaccacctgtccccttttgagctgccagttccctacagccatccccagtcaagggtgagggtgtggccttcaccaggggctgctgtaattaccgagcaaggtctgagctcttcttcagcctcagttccctcattggttaaaagggttctttgttcccatccagccgatgaaggagcaaacgtctggctatgtgaagcctaatttacctgcaggaactggcagggatagtcactggctggactcctgtttacttctagacctggtcaggctccatcccctcccccacctgcccctgattcccctcgtcggtgcctgtcaactgcttttcagcagtggactgcaggggaaagagcagtgatttggggtgagtaggcttcaattcccagctctgaccagacttgctgtgtgaccttgggcaagttcctttccctctttggagcttggtttccctgccagaggaaactgagctggaggagcctgaggtcctgcctttcattggctgacacacctcctgtccactgtgtcactctccaagtgccagagaagtggaggcagatcgctaccccaggctgagatggcccccactgtgaaggccacgcctgtgggtgggcagccacctggtgccaccacagggcaccagggatgatcctgatgcggcaggcaggggagactcacagaaaaatctgcccagagcctaccctcaccagacaaactctgtgctcctccaaaacatcctttagatgcaaaataataataataataataataaataaataaataaaaatccaaacccaagtcaaaaccttggctccagcatgaaaacacgtttacaggaaagtgttctcctgggtttgtgcccaccatggtgcgaatcctgacccaaggcctcctgtctcccttcaaagggagacccttttgggggatgagtttgccagactccccgtgctggtttctttgttactatttgtttggggttttgttttagttcttttttttttttcttttcttttttaaaaatatgtggctgtgaacttgaatgaacactgctcaaactttctgctattgggggggcgggtgggatgggaagaaggggcgtttgttttattcttggtgttttcagtgcaataaatagctacaaacttctgtgcaaaaaaaatg

SEQ ID NO: 325049 - DNA, 3841 bp, Homo sapiens
ggccagctctgctccctgcagtctgccctccggctgcgtgtggatgctgctcgtcctcgccctgtgggccctggtgccctgcctggcgttgttaaccctctactttttctcctccacaggagggaagagtgggggaaacaagaagagcgatggtgtgaaggaatcctcagagagcaccaacaccaccatcgaggatgaagacaccaaagtgcggaaacaggaaattataaaagtgacagagcagctgattgaagccataagcaatggagattttgagtcctacacgaagatgtgcgaccctggcatgacagccttcgaacctgaggccctggggaacctggttgagggcctggacttccatcgattctattttgaaaacctgtggtcccggaacagcaagcccgtgcacaccaccatcctgaatccccacatccacctgatgggcgacgagtcagcctgcatcgcctacatccgcatcacgcagtacctggacgctggcggcatcccacgcaccgcccagtcggaggagacccgtgtctggcaccgccgggacggcaaatggcagatcgtccacttccacagatctggggcgccctccgtcctgccccactgagggaccaggctggggtcgctgcgttgctgtgccgcagagatccactctgtccgtggagtggagctgctggttctcccaggtggattttgctggaattctcccatgtcatcaccccaccaccgtcacttctgtacctgcatcaagaaaacctgcttgttcacaaaagtcatcgcaacttcagagcgaacggccacatctccccacctctcacccccaccctctcccctgccaggctggggcttcctcaggcatgggtgtccacagcactggccccctctccccagcctcagctgctgtccgcctgatctgtcttgggctgtaggctagaatgcccgggctggtgcccaccaggggctggggagaaggaggggtggcatgatgaggaaggcagcatccgtccgtccctctcccagacctctcctcttccagtgtccccggggaagggcagatgacactcccttccccctaagccaaccgcactgaaggagtggggagaagagcatacgccaggagcctcctgcctcaaagtgctcccctaagtcttcttcctcctgtgctgacctcagggtggtctgacccttccctcggtgtgggggatgtggccctctcaggtgcccctacttgctttctgcttccttctggtgaagtccacctccaacattaacctgcccaccccacccccgtcatccctggagaattccagctttgtcgtatctcagagagggaatctaattgtttttggggggcaaaagaaagcaacgtttaggtatcacttctacttggaccgcatgcctttttatagccaaatttctgtgtatttcgtaaatggatttcgcgttaatggatatttatgtaataactagacttctcagattattgtgagaagggtcaggttggaaggggtgtaggaagaggggtgaggggtagtttttttctgttctagtttttttttttttttttgtcatctctgaggtggaccttgtcacctgtggttattggggccaaggcggactcagctccggggagaagggcctctctgccatttcggtcccaaggtgagctgacacaggcgttccttttgggactgtggaagcatcagatgccagcactgactcaggaacagcaagtcagggcagagaggaggagggaggctgtcaggatggaaatacctggacttttctttgcttccctcgcaaactggggtcttctctaccgaacttcccaggatttcatctcaccatatctgtgtgccgcccccagcaccccccacccacctctggggggcccgtgagcgtgtgtcttcattgcctctctccccttggcgtctgatgaccacagcaaagcactgggaatttctactcttcatgcctcatcctgcagcctcgggttcgcattctctctttcttttcctctttccctctttccctgggattgactctgagtggaataccttggcacatccactaggatctactgtctgcactgttttctttgcatgactttatacgcagtaagtatgttgaaaacaaacaaaaagaagaaaacactcaacaaaaccaatctacatgttttggactaaaaaaaaaaatagaggttgtattctcagtgtccgactcggaattatgttgctgcctctctgtgcttttggcctctgtgtggccgtgttttgccagcatgagatactgtcccctctggaggattttaggggaggaagagccacgtccccagggattggaggaggctccggtacccttgaccctcctgggtgttggttggagcagaactggtgaggatgtttgatccgagattttctgagctctccccgatcaccagctgtctgctgggttcttttctcaagtcctgctgcccaggcccaggtgagacaggcaacgccaggtctgcaggccaggagagatgctgcccaggcctcctggtttccaagctggtccatcactggcctctgtccttggcagagaccttgctgcccaggcccaggggcaggctcttggcctgccccaggcccagagggcttcccagtaaggcccagtgatcccattatcccaggggcaaaaccacctgtccccttttgagctgccagttccctacagccatccccagtcaagggtgagggtgtggccttcaccaggggctgctgtaattaccgagcaaggtctgagctcttcttcagcctcagttccctcattggttaaaagggttctttgttcccatccagccgatgaaggagcaaacgtctggctatgtgaagcctaatttacctgcaggaactggcagggatagtcactggctggactcctgtttacttctagacctggtcaggctccatcccctcccccacctgcccctgattcccctcgtcggtgcctgtcaactgcttttcagcagtggactgcaggggaaagagcagtgatttggggtgagtaggcttcaattcccagctctgaccagacttgctgtgtgaccttgggcaagttcctttccctctttggagcttggtttccctgccagaggaaactgagctggaggagcctgaggtcctgcctttcattggctgacacacctcctgtccactgtgtcactctccaagtgccagagaagtggaggcagatcgctaccccaggctgagatggcccccactgtgaaggccacgcctgtgggtgggcagccacctggtgccaccacagggcaccagggatgatcctgatgcggcaggcaggggagactcacagaaaaatctgcccagagcctaccctcaccagacaaactctgtgctcctccaaaacatcctttagatgcaaaataataataataataataataaataaataaataaaaatccaaacccaagtcaaaaccttggctccagcatgaaaacacgtttacaggaaagtgttctcctgggtttgtgcccaccatggtgcgaatcctgacccaaggcctcctgtctcccttcaaagggagacccttttgggggatgagtttgccagactccccgtgctggtttctttgttactatttgtttggggttttgttttagttcttttttttttttcttttcttttttaaaaatatgtggctgtgaacttgaatgaacactgctcaaactttctgctattgggggggcgggtgggatgggaagaaggggcgtttgttttattcttggtgttttcagtgcaataaatagctacaaacttctgtgcaaaaaaaatg

SEQ ID NO: 325050 - DNA, 3732 bp, Homo sapiens
caaccagtcagtgatatcccatactttataacttgcaagcccctggccccttcccatctactaacttcaatgatcctgtgaggtaggtgcaatcattcctatttcacaggctcaccctccaagggtccaatgagaagccgccccagtccctcttccctctggcttctttcccccaggaagatgtgcgaccctggcatgacagccttcgaacctgaggccctggggaacctggttgagggcctggacttccatcgattctattttgaaaacctgtggtcccggaacagcaagcccgtgcacaccaccatcctgaatccccacatccacctgatgggcgacgagtcagcctgcatcgcctacatccgcatcacgcagtacctggacgctggcggcatcccacgcaccgcccagtcggaggagacccgtgtctggcaccgccgggacggcaaatggcagatcgtccacttccacagatctggggcgccctccgtcctgccccactgagggaccaggctggggtcgctgcgttgctgtgccgcagagatccactctgtccgtggagtggagctgctggttctcccaggtggattttgctggaattctcccatgtcatcaccccaccaccgtcacttctgtacctgcatcaagaaaacctgcttgttcacaaaagtcatcgcaacttcagagcgaacggccacatctccccacctctcacccccaccctctcccctgccaggctggggcttcctcaggcatgggtgtccacagcactggccccctctccccagcctcagctgctgtccgcctgatctgtcttgggctgtaggctagaatgcccgggctggtgcccaccaggggctggggagaaggaggggtggcatgatgaggaaggcagcatccgtccgtccctctcccagacctctcctcttccagtgtccccggggaagggcagatgacactcccttccccctaagccaaccgcactgaaggagtggggagaagagcatacgccaggagcctcctgcctcaaagtgctcccctaagtcttcttcctcctgtgctgacctcagggtggtctgacccttccctcggtgtgggggatgtggccctctcaggtgcccctacttgctttctgcttccttctggtgaagtccacctccaacattaacctgcccaccccacccccgtcatccctggagaattccagctttgtcgtatctcagagagggaatctaattgtttttggggggcaaaagaaagcaacgtttaggtatcacttctacttggaccgcatgcctttttatagccaaatttctgtgtatttcgtaaatggatttcgcgttaatggatatttatgtaataactagacttctcagattattgtgagaagggtcaggttggaaggggtgtaggaagaggggtgaggggtagtttttttctgttctagtttttttttttttttttgtcatctctgaggtggaccttgtcacctgtggttattggggccaaggcggactcagctccggggagaagggcctctctgccatttcggtcccaaggtgagctgacacaggcgttccttttgggactgtggaagcatcagatgccagcactgactcaggaacagcaagtcagggcagagaggaggagggaggctgtcaggatggaaatacctggacttttctttgcttccctcgcaaactggggtcttctctaccgaacttcccaggatttcatctcaccatatctgtgtgccgcccccagcaccccccacccacctctggggggcccgtgagcgtgtgtcttcattgcctctctccccttggcgtctgatgaccacagcaaagcactgggaatttctactcttcatgcctcatcctgcagcctcgggttcgcattctctctttcttttcctctttccctctttccctgggattgactctgagtggaataccttggcacatccactaggatctactgtctgcactgttttctttgcatgactttatacgcagtaagtatgttgaaaacaaacaaaaagaagaaaacactcaacaaaaccaatctacatgttttggactaaaaaaaaaaatagaggttgtattctcagtgtccgactcggaattatgttgctgcctctctgtgcttttggcctctgtgtggccgtgttttgccagcatgagatactgtcccctctggaggattttaggggaggaagagccacgtccccagggattggaggaggctccggtacccttgaccctcctgggtgttggttggagcagaactggtgaggatgtttgatccgagattttctgagctctccccgatcaccagctgtctgctgggttcttttctcaagtcctgctgcccaggcccaggtgagacaggcaacgccaggtctgcaggccaggagagatgctgcccaggcctcctggtttccaagctggtccatcactggcctctgtccttggcagagaccttgctgcccaggcccaggggcaggctcttggcctgccccaggcccagagggcttcccagtaaggcccagtgatcccattatcccaggggcaaaaccacctgtccccttttgagctgccagttccctacagccatccccagtcaagggtgagggtgtggccttcaccaggggctgctgtaattaccgagcaaggtctgagctcttcttcagcctcagttccctcattggttaaaagggttctttgttcccatccagccgatgaaggagcaaacgtctggctatgtgaagcctaatttacctgcaggaactggcagggatagtcactggctggactcctgtttacttctagacctggtcaggctccatcccctcccccacctgcccctgattcccctcgtcggtgcctgtcaactgcttttcagcagtggactgcaggggaaagagcagtgatttggggtgagtaggcttcaattcccagctctgaccagacttgctgtgtgaccttgggcaagttcctttccctctttggagcttggtttccctgccagaggaaactgagctggaggagcctgaggtcctgcctttcattggctgacacacctcctgtccactgtgtcactctccaagtgccagagaagtggaggcagatcgctaccccaggctgagatggcccccactgtgaaggccacgcctgtgggtgggcagccacctggtgccaccacagggcaccagggatgatcctgatgcggcaggcaggggagactcacagaaaaatctgcccagagcctaccctcaccagacaaactctgtgctcctccaaaacatcctttagatgcaaaataataataataataataataaataaataaataaaaatccaaacccaagtcaaaaccttggctccagcatgaaaacacgtttacaggaaagtgttctcctgggtttgtgcccaccatggtgcgaatcctgacccaaggcctcctgtctcccttcaaagggagacccttttgggggatgagtttgccagactccccgtgctggtttctttgttactatttgtttggggttttgttttagttcttttttttttttcttttcttttttaaaaatatgtggctgtgaacttgaatgaacactgctcaaactttctgctattgggggggcgggtgggatgggaagaaggggcgtttgttttattcttggtgttttcagtgcaataaatagctacaaacttctgtgcaaaaaaaatg

SEQ ID NO: 325051 - DNA, 3547 bp, Homo sapiens
  misc_feature (21)..(21): n is a, c, g, or t
gcttgacgaggagagtagccntctcgctacattgcccagactggtctctgaactcctggacttccatcgattctattttgaaaacctgtggtcccggaacagcaagcccgtgcacaccaccatcctgaatccccacatccacctgatgggcgacgagtcagcctgcatcgcctacatccgcatcacgcagtacctggacgctggcggcatcccacgcaccgcccagtcggaggagacccgtgtctggcaccgccgggacggcaaatggcagatcgtccacttccacagatctggggcgccctccgtcctgccccactgagggaccaggctggggtcgctgcgttgctgtgccgcagagatccactctgtccgtggagtggagctgctggttctcccaggtggattttgctggaattctcccatgtcatcaccccaccaccgtcacttctgtacctgcatcaagaaaacctgcttgttcacaaaagtcatcgcaacttcagagcgaacggccacatctccccacctctcacccccaccctctcccctgccaggctggggcttcctcaggcatgggtgtccacagcactggccccctctccccagcctcagctgctgtccgcctgatctgtcttgggctgtaggctagaatgcccgggctggtgcccaccaggggctggggagaaggaggggtggcatgatgaggaaggcagcatccgtccgtccctctcccagacctctcctcttccagtgtccccggggaagggcagatgacactcccttccccctaagccaaccgcactgaaggagtggggagaagagcatacgccaggagcctcctgcctcaaagtgctcccctaagtcttcttcctcctgtgctgacctcagggtggtctgacccttccctcggtgtgggggatgtggccctctcaggtgcccctacttgctttctgcttccttctggtgaagtccacctccaacattaacctgcccaccccacccccgtcatccctggagaattccagctttgtcgtatctcagagagggaatctaattgtttttggggggcaaaagaaagcaacgtttaggtatcacttctacttggaccgcatgcctttttatagccaaatttctgtgtatttcgtaaatggatttcgcgttaatggatatttatgtaataactagacttctcagattattgtgagaagggtcaggttggaaggggtgtaggaagaggggtgaggggtagtttttttctgttctagtttttttttttttttttgtcatctctgaggtggaccttgtcacctgtggttattggggccaaggcggactcagctccggggagaagggcctctctgccatttcggtcccaaggtgagctgacacaggcgttccttttgggactgtggaagcatcagatgccagcactgactcaggaacagcaagtcagggcagagaggaggagggaggctgtcaggatggaaatacctggacttttctttgcttccctcgcaaactggggtcttctctaccgaacttcccaggatttcatctcaccatatctgtgtgccgcccccagcaccccccacccacctctggggggcccgtgagcgtgtgtcttcattgcctctctccccttggcgtctgatgaccacagcaaagcactgggaatttctactcttcatgcctcatcctgcagcctcgggttcgcattctctctttcttttcctctttccctctttccctgggattgactctgagtggaataccttggcacatccactaggatctactgtctgcactgttttctttgcatgactttatacgcagtaagtatgttgaaaacaaacaaaaagaagaaaacactcaacaaaaccaatctacatgttttggactaaaaaaaaaaatagaggttgtattctcagtgtccgactcggaattatgttgctgcctctctgtgcttttggcctctgtgtggccgtgttttgccagcatgagatactgtcccctctggaggattttaggggaggaagagccacgtccccagggattggaggaggctccggtacccttgaccctcctgggtgttggttggagcagaactggtgaggatgtttgatccgagattttctgagctctccccgatcaccagctgtctgctgggttcttttctcaagtcctgctgcccaggcccaggtgagacaggcaacgccaggtctgcaggccaggagagatgctgcccaggcctcctggtttccaagctggtccatcactggcctctgtccttggcagagaccttgctgcccaggcccaggggcaggctcttggcctgccccaggcccagagggcttcccagtaaggcccagtgatcccattatcccaggggcaaaaccacctgtccccttttgagctgccagttccctacagccatccccagtcaagggtgagggtgtggccttcaccaggggctgctgtaattaccgagcaaggtctgagctcttcttcagcctcagttccctcattggttaaaagggttctttgttcccatccagccgatgaaggagcaaacgtctggctatgtgaagcctaatttacctgcaggaactggcagggatagtcactggctggactcctgtttacttctagacctggtcaggctccatcccctcccccacctgcccctgattcccctcgtcggtgcctgtcaactgcttttcagcagtggactgcaggggaaagagcagtgatttggggtgagtaggcttcaattcccagctctgaccagacttgctgtgtgaccttgggcaagttcctttccctctttggagcttggtttccctgccagaggaaactgagctggaggagcctgaggtcctgcctttcattggctgacacacctcctgtccactgtgtcactctccaagtgccagagaagtggaggcagatcgctaccccaggctgagatggcccccactgtgaaggccacgcctgtgggtgggcagccacctggtgccaccacagggcaccagggatgatcctgatgcggcaggcaggggagactcacagaaaaatctgcccagagcctaccctcaccagacaaactctgtgctcctccaaaacatcctttagatgcaaaataataataataataataataaataaataaataaaaatccaaacccaagtcaaaaccttggctccagcatgaaaacacgtttacaggaaagtgttctcctgggtttgtgcccaccatggtgcgaatcctgacccaaggcctcctgtctcccttcaaagggagacccttttgggggatgagtttgccagactccccgtgctggtttctttgttactatttgtttggggttttgttttagttcttttttttttttcttttcttttttaaaaatatgtggctgtgaacttgaatgaacactgctcaaactttctgctattgggggggcgggtgggatgggaagaaggggcgtttgttttattcttggtgttttcagtgcaataaatagctacaaacttctgtgcaaaaaaaatg

SEQ ID NO: 325052 - DNA, 1402 bp, Homo sapiens
agccacagtgccctgctcagaagccccgggctcgtcagtcaaaccggttctctgtttgcactcggcagcacgggcaggcaagtggtccctaggttcgggagcagagcagcagcgcctcagtcctggtcccccagtcccaagcctcacctgcctgcccagcgccaggatggccaccatcacctgcacccgcttcacggaagagtaccagctcttcgaggaattgggcaagggagccttctcggtggtgcgaaggtgtgtgaaggtgctggctggccaggagtatgctgccaagatcatcaacacaaagaagctgtcagccagagaccatcagaagctggagcgtgaagcccgcatctgccgcctgctgaagcaccccaacatcgtccgactacatgacagcatctcagaggagggacaccactacctgatcttcgacctggtcactggtggggaactgtttgaagatatcgtggcccgggagtattacagtgaggcggatgccagtcactgtatccagcagatcctggaggctgtgctgcactgccaccagatgggggtggtgcaccgggacctgaagcctgagaatctgttgctggcctccaagctcaagggtgccgcagtgaagctggcagactttggcctggccatagaggtggagggggagcagcaggcatggtttgggtttgcagggactcctggatatctctccccagaagtgctgcggaaggacccgtacgggaagcctgtggacctgtgggcttgtggggtcatcctgtacatcctgctggttgggtaccccccgttctgggatgaggaccagcaccgcctgtaccagcagatcaaagccggcgcctatgatttcccatcgccggaatgggacactgtcaccccggaagccaaggatctgatcaataagatgctgaccattaacccatccaaacgcatcacagctgccgaagcccttaagcacccctggatctcgcaccgctccaccgtggcatcctgcatgcacagacaggagaccgtggactgcctgaagaagttcaatgccaggaggaaactgaagggagccattctcaccacgatgctggccaccaggaacttctccggagggaagagtgggggaaacaagaagagcgatggtgtgaaggaatcctcagagagcaccaacaccaccatcgaggatgaagacaccaaagtgcggaaacaggaaattataaaagtgacagagcagctgattgaagccataagcaatggagattttgagtcctacacgaagatgtgcgaccctggcatgacagccttcgaacctgaggccctggggaacctggttgagggcctggacttccatcgattctattttgaaaaccgtgagcaattccttctctctgtggtgcctgtt

SEQ ID NO: 325053 - DNA, 1399 bp, Homo sapiens
agccacagtgccctgctcagaagccccgggctcgtcagtcaaaccggttctctgtttgcactcggcagcacgggcaggcaagtggtccctaggttcgggagcagagcagcagcgcctcagtcctggtcccccagtcccaagcctcacctgcctgcccagcgccaggatggccaccatcacctgcacccgcttcacggaagagtaccagctcttcgaggaattgggcaagggagccttctcggtggtgcgaaggtgtgtgaaggtgctggctggccaggagtatgctgccaagatcatcaacacaaagaagctgtcagccagagaccatcagaagctggagcgtgaagcccgcatctgccgcctgctgaagcaccccaacatcgtccgactacatgacagcatctcagaggagggacaccactacctgatcttcgacctggtcactggtggggaactgtttgaagatatcgtggcccgggagtattacagtgaggcggatgccagtcactgtatccagcagatcctggaggctgtgctgcactgccaccagatgggggtggtgcaccgggacctgaagcctgagaatctgttgctggcctccaagctcaagggtgccgcagtgaagctggcagactttggcctggccatagaggtggagggggagcagcaggcatggtttgggtttgcagggactcctggatatctctccccagaagtgctgcggaaggacccgtacgggaagcctgtggacctgtgggcttgtggggtcatcctgtacatcctgctggttgggtaccccccgttctgggatgaggaccagcaccgcctgtaccagcagatcaaagccggcgcctatgatttcccatcgccggaatgggacactgtcaccccggaagccaaggatctgatcaataagatgctgaccattaacccatccaaacgcatcacagctgccgaagcccttaagcacccctggatctcgcaccgctccaccgtggcatcctgcatgcacagacaggagaccgtggactgcctgaagaagttcaatgccaggaggaaactgaagggagccattctcaccacgatgctggccaccaggaacttctccggagggaagagtgggggaaacaagaagagcgatggtgtgaaggaatcctcagagagcaccaacaccaccatcgaggatgaagacaccaaagtgcggaaacaggaaattataaaagtgacagagcagctgattgaagaataagggaaatggggttcacggtaaggcttccagtcggggctgtatgagtcaacgacacgaccacacgcccgactttaggcatggatgtgtcgctggtctcaccaaccacaacggtgttcgtaccacggcaggttgccgaatatgttgatacga

SEQ ID NO: 325054 - DNA, 4831 bp, Homo sapiens
agccacagtgccctgctcagaagccccgggctcgtcagtcaaaccggttctctgtttgcactcggcagcacgggcaggcaagtggtccctaggttcgggagcagagcagcagcgcctcagtcctggtcccccagtcccaagcctcacctgcctgcccagcgccaggatggccaccatcacctgcacccgcttcacggaagagtaccagctcttcgaggaattgggcaagggagccttctcggtggtgcgaaggtgtgtgaaggtgctggctggccaggagtatgctgccaagatcatcaacacaaagaagctgtcagccagagaccatcagaagctggagcgtgaagcccgcatctgccgcctgctgaagcaccccaacatcgtccgactacatgacagcatctcagaggagggacaccactacctgatcttcgacctggtcactggtggggaactgtttgaagatatcgtggcccgggagtattacagtgaggcggatgccagtcactgtatccagcagatcctggaggctgtgctgcactgccaccagatgggggtggtgcaccgggacctgaagcctgagaatctgttgctggcctccaagctcaagggtgccgcagtgaagctggcagactttggcctggccatagaggtggagggggagcagcaggcatggtttgggtttgcagggactcctggatatctctccccagaagtgctgcggaaggacccgtacgggaagcctgtggacctgtgggcttgtggggtcatcctgtacatcctgctggttgggtaccccccgttctgggatgaggaccagcaccgcctgtaccagcagatcaaagccggcgcctatgatttcccatcgccggaatgggacactgtcaccccggaagccaaggatctgatcaataagatgctgaccattaacccatccaaacgcatcacagctgccgaagcccttaagcacccctggatctcgcaccgctccaccgtggcatcctgcatgcacagacaggagaccgtggactgcctgaagaagttcaatgccaggaggaaactgaagggagccattctcaccacgatgctggccaccaggaacttctccggagggaagagtgggggaaacaagaagagcgatggtgtgaaggaatcctcagagagcaccaacaccaccatcgaggatgaagacaccaaagtgcggaaacaggaaattataaaagtgacagagcagctgattgaagccataagcaatggagattttgagtcctacacgaagatgtgcgaccctggcatgacagccttcgaacctgaggccctggggaacctggttgagggcctggacttccatcgattctattttgaaaacctgtggtcccggaacagcaagcccgtgcacaccaccatcctgaatccccacatccacctgatgggcgacgagtcagcctgcatcgcctacatccgcatcacgcagtacctggacgctggcggcatcccacgcaccgcccagtcggaggagacccgtgtctggcaccgccgggacggcaaatggcagatcgtccacttccacagatctggggcgccctccgtcctgccccactgagggaccaggctggggtcgctgcgttgctgtgccgcagagatccactctgtccgtggagtggagctgctggttctcccaggtggattttgctggaattctcccatgtcatcaccccaccaccgtcacttctgtacctgcatcaagaaaacctgcttgttcacaaaagtcatcgcaacttcagagcgaacggccacatctccccacctctcacccccaccctctcccctgccaggctggggcttcctcaggcatgggtgtccacagcactggccccctctccccagcctcagctgctgtccgcctgatctgtcttgggctgtaggctagaatgcccgggctggtgcccaccaggggctggggagaaggaggggtggcatgatgaggaaggcagcatccgtccgtccctctcccagacctctcctcttccagtgtccccggggaagggcagatgacactcccttccccctaagccaaccgcactgaaggagtggggagaagagcatacgccaggagcctcctgcctcaaagtgctcccctaagtcttcttcctcctgtgctgacctcagggtggtctgacccttccctcggtgtgggggatgtggccctctcaggtgcccctacttgctttctgcttccttctggtgaagtccacctccaacattaacctgcccaccccacccccgtcatccctggagaattccagctttgtcgtatctcagagagggaatctaattgtttttggggggcaaaagaaagcaacgtttaggtatcacttctacttggaccgcatgcctttttatagccaaatttctgtgtatttcgtaaatggatttcgcgttaatggatatttatgtaataactagacttctcagattattgtgagaagggtcaggttggaaggggtgtaggaagaggggtgaggggtagtttttttctgttctagtttttttttttttttttgtcatctctgaggtggaccttgtcacctgtggttattggggccaaggcggactcagctccggggagaagggcctctctgccatttcggtcccaaggtgagctgacacaggcgttccttttgggactgtggaagcatcagatgccagcactgactcaggaacagcaagtcagggcagagaggaggagggaggctgtcaggatggaaatacctggacttttctttgcttccctcgcaaactggggtcttctctaccgaacttcccaggatttcatctcaccatatctgtgtgccgcccccagcaccccccacccacctctggggggcccgtgagcgtgtgtcttcattgcctctctccccttggcgtctgatgaccacagcaaagcactgggaatttctactcttcatgcctcatcctgcagcctcgggttcgcattctctctttcttttcctctttccctctttccctgggattgactctgagtggaataccttggcacatccactaggatctactgtctgcactgttttctttgcatgactttatacgcagtaagtatgttgaaaacaaacaaaaagaagaaaacactcaacaaaaccaatctacatgttttggactaaaaaaaaaaatagaggttgtattctcagtgtccgactcggaattatgttgctgcctctctgtgcttttggcctctgtgtggccgtgttttgccagcatgagatactgtcccctctggaggattttaggggaggaagagccacgtccccagggattggaggaggctccggtacccttgaccctcctgggtgttggttggagcagaactggtgaggatgtttgatccgagattttctgagctctccccgatcaccagctgtctgctgggttcttttctcaagtcctgctgcccaggcccaggtgagacaggcaacgccaggtctgcaggccaggagagatgctgcccaggcctcctggtttccaagctggtccatcactggcctctgtccttggcagagaccttgctgcccaggcccaggggcaggctcttggcctgccccaggcccagagggcttcccagtaaggcccagtgatcccattatcccaggggcaaaaccacctgtccccttttgagctgccagttccctacagccatccccagtcaagggtgagggtgtggccttcaccaggggctgctgtaattaccgagcaaggtctgagctcttcttcagcctcagttccctcattggttaaaagggttctttgttcccatccagccgatgaaggagcaaacgtctggctatgtgaagcctaatttacctgcaggaactggcagggatagtcactggctggactcctgtttacttctagacctggtcaggctccatcccctcccccacctgcccctgattcccctcgtcggtgcctgtcaactgcttttcagcagtggactgcaggggaaagagcagtgatttggggtgagtaggcttcaattcccagctctgaccagacttgctgtgtgaccttgggcaagttcctttccctctttggagcttggtttccctgccagaggaaactgagctggaggagcctgaggtcctgcctttcattggctgacacacctcctgtccactgtgtcactctccaagtgccagagaagtggaggcagatcgctaccccaggctgagatggcccccactgtgaaggccacgcctgtgggtgggcagccacctggtgccaccacagggcaccagggatgatcctgatgcggcaggcaggggagactcacagaaaaatctgcccagagcctaccctcaccagacaaactctgtgctcctccaaaacatcctttagatgcaaaataataataataataataataaataaataaataaaaatccaaacccaagtcaaaaccttggctccagcatgaaaacacgtttacaggaaagtgttctcctgggtttgtgcccaccatggtgcgaatcctgacccaaggcctcctgtctcccttcaaagggagacccttttgggggatgagtttgccagactccccgtgctggtttctttgttactatttgtttggggttttgttttagttcttttttttttttcttttcttttttaaaaatatgtggctgtgaacttgaatgaacactgctcaaactttctgctattgggggggcgggtgggatgggaagaaggggcgtttgttttattcttggtgttttcagtgcaataaatagctacaaacttctgtgcaaaaaaaatg

SEQ ID NO: 325055 - DNA, 4801 bp, Homo sapiens
agccacagtgccctgctcagaagccccgggctcgtcagtcaaaccggttctctgtttgcactcggcagcacgggcaggcaagtggtccctaggttcgggagcagagcagcagcgcctcagtcctggtcccccagtcccaagcctcacctgcctgcccagcgccaggatggccaccatcacctgcacccgcttcacggaagagtaccagctcttcgaggaattgggcaagggagccttctcggtggtgcgaaggtgtgtgaaggtgctggctggccaggagtatgctgccaagatcatcaacacaaagaagctgtcagccagagaccatcagaagctggagcgtgaagcccgcatctgccgcctgctgaagcaccccaacatcgtccgactacatgacagcatctcagaggagggacaccactacctgatcttcgacctggtcactggtggggaactgtttgaagatatcgtggcccgggagtattacagtgaggcggatgccagtcactgtatccagcagatcctggaggctgtgctgcactgccaccagatgggggtggtgcaccgggacctgaagcctgagaatctgttgctggcctccaagctcaagggtgccgcagtgaagctggcagactttggcctggccatagaggtggagggggagcagcaggcatggtttgggtttgcagggactcctggatatctctccccagaagtgctgcggaaggacccgtacgggaagcctgtggacctgtgggcttgtggggtcatcctgtacatcctgctggttgggtaccccccgttctgggatgaggaccagcaccgcctgtaccagcagatcaaagccggcgcctatgatttcccatcgccggaatgggacactgtcaccccggaagccaaggatctgatcaataagatgctgaccattaacccatccaaacgcatcacagctgccgaagcccttaagcacccctggatctcgcaccgctccaccgtggcatcctgcatgcacagacaggagaccgtggactgcctgaagaagttcaatgccaggaggaaactgaagggagccattctcaccacgatgctggccaccaggaacttctccggagggaagagtgggggaaacaagaagagcgatggtgtgaaggaatcctcagagagcaccaacaccaccatcgaggatgaagacaccaaagtgcggaaacaggaaattataaaagtgacagagcagctgattgaagccataagcaatggagattttgagtcctacacgaagatgtgcgaccctggcatgacagccttcgaacctgaggccctggggaacctggttgagggcctggacttccatcgattctattttgaaaacctgtggtcccggaacagcaagcccgtgcacaccaccatcctgaatccccacatccacctgatgggcgacgagtcagcctgcatcgcctacatccgcatcacgcagtacctggacgctggcggcatcccacgcaccgcccagtcggaggagacccgtgtctggcaccgccgggacggcaaatggcagatcgtccacttccacagatctggggcgccctccgtcctgccccactgagggaccaggctggggtcgctgcgttgctgtgccgcagagatccactctgtccgtggagtggagctgctggttctcccaggtggattttgctggaattctcccatgtcatcaccccaccaccgtcacttctgtacctgcatcaagaaaacctgcttgttcacaaaagtcatcgcaacttcagagcgaacggccacatctccccacctctcacccccaccctctcccctgccaggctggggcttcctcaggcatgggtgtccacagcactggccccctctccccagcctcagctgctgtccgcctgatctgtcttgggctgtaggctagaatgcccgggctggtgcccaccaggggctggggagaaggaggggtggcatgatgaggaaggcagcatccgtccgtccctctcccagacctctcctcttccagtgtccccggggaagggcagatgacactcccttccccctaagccaaccgcactgaaggagtggggagaagagcatacgccaggagcctcctgcctcaaagtgctcccctaagtcttcttcctcctgtgctgacctcagggtggtctgacccttccctcggtgtgggggatgtggccctctcaggtgcccctacttgctttctgcttccttctggtgaagtccacctccaacattaacctgcccaccccacccccgtcatccctggagaattccagctttgtcgtatctcagagagggaatctaattgtttttggggggcaaaagaaagcaacgtttaggtatcacttctacttggaccgcatgcctttttatagccaaatttctgtgtatttcgtaaatggatttcgcgttaatggatatttatgtaataactagacttctcagattattgtgagaagggtcaggttggaaggggtgtaggaagaggggtgaggggtagtttttttctgttctagtttttttttttttttttgtcatctctgaggtggaccttgtcacctgtggttattggggccaaggcggactcagctccggggagaagggcctctctgccatttcggtcccaaggtgagctgacacaggcgttccttttgggactgtggaagcatcagatgccagcactgactcaggaacagcaagtcagggcagagaggaggagggaggctgtcaggatggaaatacctggacttttctttgcttccctcgcaaactggggtcttctctaccgaacttcccaggatttcatctcaccatatctgtgtgccgcccccagcaccccccacccacctctggggggcccgtgagcgtgtgtcttcattgcctctctccccttggcgtctgatgaccacagcaaagcactgggaatttctactcttcatgcctcatcctgcagcctcgggttcgcattctctctttcttttcctctttccctctttccctgggattgactctgagtggaataccttggcacatccactaggatctactgtctgcactgttttctttgcatgactttatacgcagtaagtatgttgaaaacaaacaaaaagaagaaaacactcaacaaaaccaatctacatgttttggactaaaaaaaaaaatagaggttgtattctcagtgtccgactcggaattatgttgctgcctctctgtgcttttggcctctgtgtggccgtgttttgccagcatgagatactgtcccctctggaggattttaggggaggaagagccacgtccccagggattggaggaggctccggtacccttgaccctcctgggtgttggttggagcagaactggtgaggatgtttgatccgagattttctgagctctccccgatcaccagctgtctgctgggttcttttctcaagtcctgctgcccaggcccaggtgagacaggcaacgccaggtctgcaggccaggagagatgctgcccaggcctcctggtttccaagctggtccatcactggcctctgtccttggcagagaccttgctgcccaggcccagagggcttcccagtaaggcccagtgatcccattatcccaggggcaaaaccacctgtccccttttgagctgccagttccctacagccatccccagtcaagggtgagggtgtggccttcaccaggggctgctgtaattaccgagcaaggtctgagctcttcttcagcctcagttccctcattggttaaaagggttctttgttcccatccagccgatgaaggagcaaacgtctggctatgtgaagcctaatttacctgcaggaactggcagggatagtcactggctggactcctgtttacttctagacctggtcaggctccatcccctcccccacctgcccctgattcccctcgtcggtgcctgtcaactgcttttcagcagtggactgcaggggaaagagcagtgatttggggtgagtaggcttcaattcccagctctgaccagacttgctgtgtgaccttgggcaagttcctttccctctttggagcttggtttccctgccagaggaaactgagctggaggagcctgaggtcctgcctttcattggctgacacacctcctgtccactgtgtcactctccaagtgccagagaagtggaggcagatcgctaccccaggctgagatggcccccactgtgaaggccacgcctgtgggtgggcagccacctggtgccaccacagggcaccagggatgatcctgatgcggcaggcaggggagactcacagaaaaatctgcccagagcctaccctcaccagacaaactctgtgctcctccaaaacatcctttagatgcaaaataataataataataataataaataaataaataaaaatccaaacccaagtcaaaaccttggctccagcatgaaaacacgtttacaggaaagtgttctcctgggtttgtgcccaccatggtgcgaatcctgacccaaggcctcctgtctcccttcaaagggagacccttttgggggatgagtttgccagactccccgtgctggtttctttgttactatttgtttggggttttgttttagttcttttttttttttcttttcttttttaaaaatatgtggctgtgaacttgaatgaacactgctcaaactttctgctattgggggggcgggtgggatgggaagaaggggcgtttgttttattcttggtgttttcagtgcaataaatagctacaaacttctgtgcaaaaaaaatg

SEQ ID NO: 325056 - DNA, 4692 bp, Homo sapiens
agccacagtgccctgctcagaagccccgggctcgtcagtcaaaccggttctctgtttgcactcggcagcacgggcaggcaagtggtccctaggttcgggagcagagcagcagcgcctcagtcctggtcccccagtcccaagcctcacctgcctgcccagcgccaggatggccaccatcacctgcacccgcttcacggaagagtaccagctcttcgaggaattgggcaagggagccttctcggtggtgcgaaggtgtgtgaaggtgctggctggccaggagtatgctgccaagatcatcaacacaaagaagctgtcagccagagaccatcagaagctggagcgtgaagcccgcatctgccgcctgctgaagcaccccaacatcgtccgactacatgacagcatctcagaggagggacaccactacctgatcttcgacctggtcactggtggggaactgtttgaagatatcgtggcccgggagtattacagtgaggcggatgccagtcactgtatccagcagatcctggaggctgtgctgcactgccaccagatgggggtggtgcaccgggacctgaagcctgagaatctgttgctggcctccaagctcaagggtgccgcagtgaagctggcagactttggcctggccatagaggtggagggggagcagcaggcatggtttgggtttgcagggactcctggatatctctccccagaagtgctgcggaaggacccgtacgggaagcctgtggacctgtgggcttgtggggtcatcctgtacatcctgctggttgggtaccccccgttctgggatgaggaccagcaccgcctgtaccagcagatcaaagccggcgcctatgatttcccatcgccggaatgggacactgtcaccccggaagccaaggatctgatcaataagatgctgaccattaacccatccaaacgcatcacagctgccgaagcccttaagcacccctggatctcgcaccgctccaccgtggcatcctgcatgcacagacaggagaccgtggactgcctgaagaagttcaatgccaggaggaaactgaagggagccattctcaccacgatgctggccaccaggaacttctccggagggaagagtgggggaaacaagaagagcgatggtgtgaaggaatcctcagagagcaccaacaccaccatcgaggatgaagacaccaaagtgcggaaacaggaaattataaaagtgacagagcagctgattgaagccataagcaatggagattttgagtcctacacgaagatgtgcgaccctggcatgacagccttcgaacctgaggccctggggaacctggttgagggcctggacttccatcgattctattttgaaaacctgtggtcccggaacagcaagcccgtgcacaccaccatcctgaatccccacatccacctgatgggcgacgagtcagcctgcatcgcctacatccgcatcacgcagtacctggacgctggcggcatcccacgcaccgcccagtcggaggagacccgtgtctggcaccgccgggacggcaaatggcagatcgtccacttccacagatctggggcgccctccgtcctgccccactgagggaccaggctggggtcgctgcgttgctgtgccgcagagatccactctgtccgtggagtggagctgctggttctcccaggtggattttgctggaattctcccatgtcatcaccccaccaccgtcacttctgtacctgcatcaagaaaacctgcttgttcacaaaagtcatcgcaacttcagagcgaacggccacatctccccacctctcacccccaccctctcccctgccaggctggggcttcctcaggcatgggtgtccacagcactggccccctctccccagcctcagctgctgtccgcctgatctgtcttgggctgtaggctagaatgcccgggctggtgcccaccaggggctggggagaaggaggggtggcatgatgaggaaggcagcatccgtccgtccctctcccagacctctcctcttccagtgtccccggggaagggcagatgacactcccttccccctaagccaaccgcactgaaggagtggggagaagagcatacgccaggagcctcctgcctcaaagtgctcccctaagtcttcttcctcctgtgctgacctcagggtggtctgacccttccctcggtgtgggggatgtggccctctcaggtgcccctacttgctttctgcttccttctggtgaagtccacctccaacattaacctgcccaccccacccccgtcatccctggagaattccagctttgtcgtatctcagagagggaatctaattgtttttggggggcaaaagaaagcaacgtttaggtatcacttctacttggaccgcatgcctttttatagccaaatttctgtgtatttcgtaaatggatttcgcgttaatggatatttatgtaataactagacttctcagattattgtgagaagggtcaggttggaaggggtgtaggaagaggggtgaggggtagtttttttctgttctagtttttttttttttttttgtcatctctgaggtggaccttgtcacctgtggttattggggccaaggcggactcagctccggggagaagggcctctctgccatttcggtcccaaggtgagctgacacaggcgttccttttgggactgtggaagcatcagatgccagcactgactcaggaacagcaagtcagggcagagaggaggagggaggctgtcaggatggaaatacctggacttttctttgcttccctcgcaaactggggtcttctctaccgaacttcccaggatttcatctcaccatatctgtgtgccgcccccatctttcttttcctctttccctctttccctgggattgactctgagtggaataccttggcacatccactaggatctactgtctgcactgttttctttgcatgactttatacgcagtaagtatgttgaaaacaaacaaaaagaagaaaacactcaacaaaaccaatctacatgttttggactaaaaaaaaaaatagaggttgtattctcagtgtccgactcggaattatgttgctgcctctctgtgcttttggcctctgtgtggccgtgttttgccagcatgagatactgtcccctctggaggattttaggggaggaagagccacgtccccagggattggaggaggctccggtacccttgaccctcctgggtgttggttggagcagaactggtgaggatgtttgatccgagattttctgagctctccccgatcaccagctgtctgctgggttcttttctcaagtcctgctgcccaggcccaggtgagacaggcaacgccaggtctgcaggccaggagagatgctgcccaggcctcctggtttccaagctggtccatcactggcctctgtccttggcagagaccttgctgcccaggcccaggggcaggctcttggcctgccccaggcccagagggcttcccagtaaggcccagtgatcccattatcccaggggcaaaaccacctgtccccttttgagctgccagttccctacagccatccccagtcaagggtgagggtgtggccttcaccaggggctgctgtaattaccgagcaaggtctgagctcttcttcagcctcagttccctcattggttaaaagggttctttgttcccatccagccgatgaaggagcaaacgtctggctatgtgaagcctaatttacctgcaggaactggcagggatagtcactggctggactcctgtttacttctagacctggtcaggctccatcccctcccccacctgcccctgattcccctcgtcggtgcctgtcaactgcttttcagcagtggactgcaggggaaagagcagtgatttggggtgagtaggcttcaattcccagctctgaccagacttgctgtgtgaccttgggcaagttcctttccctctttggagcttggtttccctgccagaggaaactgagctggaggagcctgaggtcctgcctttcattggctgacacacctcctgtccactgtgtcactctccaagtgccagagaagtggaggcagatcgctaccccaggctgagatggcccccactgtgaaggccacgcctgtgggtgggcagccacctggtgccaccacagggcaccagggatgatcctgatgcggcaggcaggggagactcacagaaaaatctgcccagagcctaccctcaccagacaaactctgtgctcctccaaaacatcctttagatgcaaaataataataataataataataaataaataaataaaaatccaaacccaagtcaaaaccttggctccagcatgaaaacacgtttacaggaaagtgttctcctgggtttgtgcccaccatggtgcgaatcctgacccaaggcctcctgtctcccttcaaagggagacccttttgggggatgagtttgccagactccccgtgctggtttctttgttactatttgtttggggttttgttttagttcttttttttttttcttttcttttttaaaaatatgtggctgtgaacttgaatgaacactgctcaaactttctgctattgggggggcgggtgggatgggaagaaggggcgtttgttttattcttggtgttttcagtgcaataaatagctacaaacttctgtgcaaaaaaaatg

SEQ ID NO: 325057 - DNA, 2308 bp, Homo sapiens
agccacagtgccctgctcagaagccccgggctcgtcagtcaaaccggttctctgtttgcactcggcagcacgggcaggcaagtggtccctaggttcgggagcagagcagcagcgcctcagtcctggtcccccagtcccaagcctcacctgcctgcccagcgccaggatggccaccatcacctgcacccgcttcacggaagagtaccagctcttcgaggaattgggcaagggagccttctcggtggtgcgaaggtgtgtgaaggtgctggctggccaggagtatgctgccaagatcatcaacacaaagaagctgtcagccagagaccatcagaagctggagcgtgaagcccgcatctgccgcctgctgaagcaccccaacatcgtccgactacatgacagcatctcagaggagggacaccactacctgatcttcgacctggtcactggtggggaactgtttgaagatatcgtggcccgggagtattacagtgaggcggatgccagtcactgtatccagcagatcctggaggctgtgctgcactgccaccagatgggggtggtgcaccgggacctgaagcctgagaatctgttgctggcctccaagctcaagggtgccgcagtgaagctggcagactttggcctggccatagaggtggagggggagcagcaggcatggtttgggtttgcagggactcctggatatctctccccagaagtgctgcggaaggacccgtacgggaagcctgtggacctgtgggcttgtggggtcatcctgtacatcctgctggttgggtaccccccgttctgggatgaggaccagcaccgcctgtaccagcagatcaaagccggcgcctatgatttcccatcgccggaatgggacactgtcaccccggaagccaaggatctgatcaataagatgctgaccattaacccatccaaacgcatcacagctgccgaagcccttaagcacccctggatctcgcaccgctccaccgtggcatcctgcatgcacagacaggagaccgtggactgcctgaagaagttcaatgccaggaggaaactgaagggagccattctcaccacgatgctggccaccaggaacttctccggagggaagagtgggggaaacaagaagagcgatggtgtgaaggaatcctcagagagcaccaacaccaccatcgaggatgaagacaccaaagtgcggaaacaggaaattataaaagtgacagagcagctgattgaagccataagcaatggagattttgagtcctacacgaagatgtgcgaccctggcatgacagccttcgaacctgaggccctggggaacctggttgagggcctggacttccatcgattctattttgaaaacctgtggtcccggaacagcaagcccgtgcacaccaccatcctgaatccccacatccacctgatgggcgacgagtcagcctgcatcgcctacatccgcatcacgcagtacctggacgctggcggcatcccacgcaccgcccagtcggaggagacccgtgtctggcaccgccgggacggcaaatggcagatcgtccacttccacagatctggggcgccctccgtcctgccccactgagggaccaggctggggtcgctgcgttgctgtgccgcagagatccactctgtccgtggagtggagctgctggttctcccaggtggattttgctggaattctcccatgtcatcaccccaccaccgtcacttctgtacctgcatcaagaaaacctgcttgttcacaaaagtcatcgcaacttcagagcgaacggccacatctccccacctctcacccccaccctctcccctgccaggctggggcttcctcaggcatgggtgtccacagcactggccccctctccccagcctcagctgctgtccgcctgatctgtcttgggctgtaggctagaatgcccgggctggtgcccaccaggggctggggagaaggaggggtggcatgatgaggaaggcagcatccgtccgtccctctcccagacctctcctcttccagtgtccccggggaagggcagatgacactcccttccccctaagccaaccgcactgaaggagtggggagaagagcatacgccaggagcctcctgcctcaaagtgctcccctaagtcttcttcctcctgtgctgacctcagggtggtctgacccttccctcggtgtgggggatgtggccctctcaggtgcccctacttgctttctgcttccttctggtgaagtccacctccaacattaacctgcccaccccaccccgtcgggtagagcgggaccgactga

SEQ ID NO: 325058 - DNA, 1628 bp, Homo sapiens
agccacagtgccctgctcagaagccccgggctcgtcagtcaaaccggttctctgtttgcactcggcagcacgggcaggcaagtggtccctaggttcgggagcagagcagcagcgcctcagtcctggtcccccagtcccaagcctcacctgcctgcccagcgccaggatggccaccatcacctgcacccgcttcacggaagagtaccagctcttcgaggaattgggcaagggagccttctcggtggtgcgaaggtgtgtgaaggtgctggctggccaggagtatgctgccaagatcatcaacacaaagaagctgtcagccagagaccatcagaagctggagcgtgaagcccgcatctgccgcctgctgaagcaccccaacatcgtccgactacatgacagcatctcagaggagggacaccactacctgatcttcgacctggtcactggtggggaactgtttgaagatatcgtggcccgggagtattacagtgaggcggatgccagtcactgtatccagcagatcctggaggctgtgctgcactgccaccagatgggggtggtgcaccgggacctgaagcctgagaatctgttgctggcctccaagctcaagggtgccgcagtgaagctggcagactttggcctggccatagaggtggagggggagcagcaggcatggtttgggtttgcagggactcctggatatctctccccagaagtgctgcggaaggacccgtacgggaagcctgtggacctgtgggcttgtggggtcatcctgtacatcctgctggttgggtaccccccgttctgggatgaggaccagcaccgcctgtaccagcagatcaaagccggcgcctatgatttcccatcgccggaatgggacactgtcaccccggaagccaaggatctgatcaataagatgctgaccattaacccatccaaacgcatcacagctgccgaagcccttaagcacccctggatctcgcaccgctccaccgtggcatcctgcatgcacagacaggagaccgtggactgcctgaagaagttcaatgccaggaggaaactgaagggagccattctcaccacgatgctggccaccaggaacttctccggagggaagagtgggggaaacaagaagagcgatggtgtgaaggaatcctcagagagcaccaacaccaccatcgaggatgaagacaccaaagtgcggaaacaggaaattataaaagtgacagagcagctgattgaagccataagcaatggagattttgagtcctacacgaagatgtgcgaccctggcatgacagccttcgaacctgaggccctggggaacctggttgagggcctggacttccatcgattctattttgaaaacctgtggtcccggaacagcaagcccgtgcacaccaccatcctgaatccccacatccacctgatgggcgacgagtcagcctgcatcgcctacatccgcatcacgcagtacctggacgctggcggcatcccacgcaccgcccagtcggaggagacccgtgtctggcaccgccgggacggcaaatggcagatcgtccacttccacagatctggggcgccctccgtcctgccccacagagagagcgtcggtaccgagctattat

SEQ ID NO: 325059 - DNA, 1477 bp, Homo sapiens
agccacagtgccctgctcagaagccccgggctcgtcagtcaaaccggttctctgtttgcactcggcagcacgggcaggcaagtggtccctaggttcgggagcagagcagcagcgcctcagtcctggtcccccagtcccaagcctcacctgcctgcccagcgccaggatggccaccatcacctgcacccgcttcacggaagagtaccagctcttcgaggaattgggcaagggagccttctcggtggtgcgaaggtgtgtgaaggtgctggctggccaggagtatgctgccaagatcatcaacacaaagaagctgtcagccagagaccatcagaagctggagcgtgaagcccgcatctgccgcctgctgaagcaccccaacatcgtccgactacatgacagcatctcagaggagggacaccactacctgatcttcgacctggtcactggtggggaactgtttgaagatatcgtggcccgggagtattacagtgaggcggatgccagtcactgtatccagcagatcctggaggctgtgctgcactgccaccagatgggggtggtgcaccgggacctgaagcctgagaatctgttgctggcctccaagctcaagggtgccgcagtgaagctggcagactttggcctggccatagaggtggagggggagcagcaggcatggtttgggtttgcagggactcctggatatctctccccagaagtgctgcggaaggacccgtacgggaagcctgtggacctgtgggcttgtggggtcatcctgtacatcctgctggttgggtaccccccgttctgggatgaggaccagcaccgcctgtaccagcagatcaaagccggcgcctatgatttcccatcgccggaatgggacactgtcaccccggaagccaaggatctgatcaataagatgctgaccattaacccatccaaacgcatcacagctgccgaagcccttaagcacccctggatctcgcaccgctccaccgtggcatcctgcatgcacagacaggagaccgtggactgcctgaagaagttcaatgccaggaggaaactgaagggagccattctcaccacgatgctggccaccaggaacttctccggagggaagagtgggggaaacaagaagagcgatggtgtgaaggaatcctcagagagcaccaacaccaccatcgaggatgaagacaccaaagtgcggaaacaggaaattataaaagtgacagagcagctgattgaagccataagcaatggagattttgagtcctacacgaagatgtgcgaccctggcatgacagccttcgaacctgaggccctggggaacctggttgagggcctggacttccatcgattctattttgaaaacctgtggtcccggaacagctatttacggtaacagcatttaggttacagctatttagtacagcattaggtacatctatttagtaacatccatttaaaaacgggcccagtt

SEQ ID NO: 325060 - DNA, 468 bp, Homo sapiens
gtgatctgcctaccatggcctcccaaattggtgggactacaggttatataatcagtatgtctgttattttacctttagctaaaatcaatgaaacagacacatttggtcctggagatgatgatgaaatccagtttgacgatattggagatgatgatgaagacattgatgatatctaaattgaaccaagtgtttttacatgacaagttctctgaggatggttctacagttgggattttggccatcatcaaccaagaagagaaattcatttagtgtgtagtttctgaaagcaaactgatttattttcattgttttaaagtatttatttctttaaaagctgaggacactgaattaccttaagttaaatgttaatactttattgttttgatgtaatggaacttaaggataaaagaccataatatttgctgttaaaataaataaacgagtgcctttcctactgtgataacgtca

SEQ ID NO: 325061 - DNA, 630 bp, Homo sapiens
aatttggttacgaccatatttatcccatttttaaaggaattacatctattttgtctgtgtccaccctcagaatataagatctgtaaccactaccacaaaaggaagtaaggacatgcaaaacttcaaaaatgttctgatatatgatatacaataacattccaaaagagcataaagatttactgataacaaaaaggaaataagaaaatctaatatacagaatactcagttcaaaacgatttacttcacagtttaccactgggagtctttatatgcagtagaatgttgtaataagagttatttttctatggatctgatgttcttttcaattacagatctaaattgaaccaagtgtttttacatgacaagttctctgaggatggttctacagttgggattttggccatcatcaaccaagaagagaaattcatttagtgtgtagtttctgaaagcaaactgatttattttcattgttttaaagtatttatttctttaaaagctgaggacactgaattaccttaagttaaatgttaatactttattgttttgatgtaatggaacttaaggataaaagaccataatatttgctgttaaaataaataaacgagtgcctttcctactgtgataacgtca

SEQ ID NO: 325062 - DNA, 381 bp, Homo sapiens
ttagaggatcccctctctaagggacgatattggagatgatgatgaagacattgatgatatctaaattgaaccaagtgtttttacatgacaagttctctgaggatggttctacagttgggattttggccatcatcaaccaagaagagaaattcatttagtgtgtagtttctgaaagcaaactgatttattttcattgttttaaagtatttatttctttaaaagctgaggacactgaattaccttaagttaaatgttaatactttattgttttgatgtaatggaacttaaggataaaagaccataatatttgctgttaaaataaataaacgagtgcctttcctactgtgataacgtcacatcgtcacttagagaggggatcct

SEQ ID NO: 325063 - DNA, 837 bp, Homo sapiens
cttttggtgacgccagagagtgcgcgtcagcagtttattagagagctctgtagccagcctcttctgcgcacccacctgctgcatcttagttcagtcggctcttagagtagtaaccgccagaaaggagtcggaagaggtctcacgaggctgtcatcaccgccatgcccaagaataaaggtaaaggaggtaaaaacaggcgcaggggtaaaaatgagaatgaatctgaaaaaagagagttggtgtttaaagaggatggacaagagtatgctcaggtaatcaaaatgttgggaaatggacgattggaagcattgtgttttgatggtgtaaagaggttatgccatatcagagggaaattgagaaaaaaggataacaaagctgatgtaattttaaagtacaatgcagatgaagctagaagcctgaaggcatatggcgagcttccagaacatgctaaaatcaatgaaacagacacatttggtcctggagatgatgatgaaatccagtttgacgatattggagatgatgatgaagacattgatgatatctaaattgaaccaagtgtttttacatgacaagttctctgaggatggttctacagttgggattttggccatcatcaaccaagaagagaaattcatttagtgtgtagtttctgaaagcaaactgatttattttcattgttttaaagtatttatttctttaaaagctgaggacactgaattaccttaagttaaatgttaatactttattgttttgatgtaatggaacttaaggataaaagaccataatatttgctgttaaaataaataaacgagtgcctttcctactgtgataacgtca

SEQ ID NO: 325064 - DNA, 585 bp, Homo sapiens
taacaaacagtatgtgggatttttttagatgtgttcaatttgaaagtaacttgtgaaacaactggtgatattttggtataagacgttttgaaagttatttgtttatttctaaggataacaaagctgatgtaattttaaagtacaatgcagatgaagctagaagcctgaaggcatatggcgagcttccagaacatgctaaaatcaatgaaacagacacatttggtcctggagatgatgatgaaatccagtttgacgatattggagatgatgatgaagacattgatgatatctaaattgaaccaagtgtttttacatgacaagttctctgaggatggttctacagttgggattttggccatcatcaaccaagaagagaaattcatttagtgtgtagtttctgaaagcaaactgatttattttcattgttttaaagtatttatttctttaaaagctgaggacactgaattaccttaagttaaatgttaatactttattgttttgatgtaatggaacttaaggataaaagaccataatatttgctgttaaaataaataaacgagtgcctttcctactgtgataacgtca

SEQ ID NO: 325065 - DNA, 874 bp, Homo sapiens
gcgagccaccgtgcctggcctagaaaagtgtattacctttttaacatcattattctttactccatttttagttttgaattgcagtgtttgaccttaaaagttttatattacaatttttttaattagtcttttattttttccaagagacttctaattaaaagggaatagtaaataaaagcactgtgcttgccttttgtgcttttattaaagtgaaatctctacaatctttcctaagctgttaatcactgtttactaatgaacataaaccacttcctaattattcagactcaagaatttttttctagagggtattggggtaggcaaagatttgaaagtaacttgtgaaacaactggtgatattttggtataagacgttttgaaagttatttgtttatttctaaggataacaaagctgatgtaattttaaagtacaatgcagatgaagctagaagcctgaaggcatatggcgagcttccagaacatgctaaaatcaatgaaacagacacatttggtcctggagatgatgatgaaatccagtttgacgatattggagatgatgatgaagacattgatgatatctaaattgaaccaagtgtttttacatgacaagttctctgaggatggttctacagttgggattttggccatcatcaaccaagaagagaaattcatttagtgtgtagtttctgaaagcaaactgatttattttcattgttttaaagtatttatttctttaaaagctgaggacactgaattaccttaagttaaatgttaatactttattgttttgatgtaatggaacttaaggataaaagaccataatatttgctgttaaaataaataaacgagtgcctttcctactgtgataacgtca

SEQ ID NO: 325066 - DNA, 1146 bp, Homo sapiens
aatttggttacgaccatatttatcccatttttaaaggaattacatctattttgtctgtgtccaccctcagaatataagatctgtaaccactaccacaaaaggaagtaaggacatgcaaaacttcaaaaatgttctgatatatgatatacaataacattccaaaagagcataaagatttactgataacaaaaaggaaataagaaaatctaatatacagaatactcagttcaaaacgatttacttcacagtttaccactgggagtctttatatgcagtagaatgttgtaataagagttatttttctatggatctgatgttcttttcaattacagatctaaattgaaccaagtgtttttacatgacaagttctctgaggatggttctacagttgggattttggccatcatcaaccaagaagagaaattcatttagtgtgtagtttctgaaagcaaactgatttattttcattgttttaaagtatttatttctttaaaagctgaggacactgaattaccttaagttaaatgttaatactttattgttttgatgtaatggaacttaaggataaaagaccataatatttgctgttaaaataaataaacgagtgcctttcctactgtgataacgtcaagtaattggatattttgaatacatttctgcctgataatcatgctgggttctaataagccctacttccacctaatctgtttacagtcttttggtatgtttcagttacttagatggtctcataaggtttctgatacaatttgaagacagaaatctgcatttagaatcagaaaacatggacatatttttcatatttatctagtcatatgtaattttatgctaacattgatagtttataaatccttttcatcctttgtgcctcggttattaaggaaaaaaaaatgtccaacatacagtttttaaagtgtggcagttttgagtagtaacttagaatgtataagattaagagttaaagaaaccgaacaataagtggcaaccaattatcttaacattggaaatactggggtgccattttgttttcaaaagttattcattgtaatccactgttttggctttcatgaacaagtaaattacagtgtataaatgaaaagcaatttcataataaattctataaactga

SEQ ID NO: 325067 - DNA, 888 bp, Homo sapiens
cttttggtgacgccagagagtgcgcgtcagcagtttattagagagctctgtagccagcctcttctgcgcacccacctgctgcatcttagttcagtcggctcttagagtagtaaccgccagaaaggagtcggaagaggtctcacgaggctgtcatcaccgccatgcccaagaataaaggtaaaggaggtaaaaacaggcgcaggggtaaaaatgagaatgaatctgaaaaaagagagttggtgtttaaagaggatggacaagagtatgctcaggtaatcaaaatgttgggaaatggacgattggaagcattgtgttttgatggtgtaaagaggttatgccatatcagagggaaattgagaaaaaaggtttggataaatacatcagacattatattggttggtctacgggactatcaggataacaaagctgatgtaattttaaagtacaatgcagatgaagctagaagcctgaaggcatatggcgagcttccagaacatgctaaaatcaatgaaacagacacatttggtcctggagatgatgatgaaatccagtttgacgatattggagatgatgatgaagacattgatgatatctaaattgaaccaagtgtttttacatgacaagttctctgaggatggttctacagttgggattttggccatcatcaaccaagaagagaaattcatttagtgtgtagtttctgaaagcaaactgatttattttcattgttttaaagtatttatttctttaaaagctgaggacactgaattaccttaagttaaatgttaatactttattgttttgatgtaatggaacttaaggataaaagaccataatatttgctgttaaaataaataaacgagtgcctttcctactgtgataacgtca

SEQ ID NO: 325068 - DNA, 1404 bp, Homo sapiens
cttttggtgacgccagagagtgcgcgtcagcagtttattagagagctctgtagccagcctcttctgcgcacccacctgctgcatcttagttcagtcggctcttagagtagtaaccgccagaaaggagtcggaagaggtctcacgaggctgtcatcaccgccatgcccaagaataaaggtaaaggaggtaaaaacaggcgcaggggtaaaaatgagaatgaatctgaaaaaagagagttggtgtttaaagaggatggacaagagtatgctcaggtaatcaaaatgttgggaaatggacgattggaagcattgtgttttgatggtgtaaagaggttatgccatatcagagggaaattgagaaaaaaggtttggataaatacatcagacattatattggttggtctacgggactatcaggataacaaagctgatgtaattttaaagtacaatgcagatgaagctagaagcctgaaggcatatggcgagcttccagaacatgctaaaatcaatgaaacagacacatttggtcctggagatgatgatgaaatccagtttgacgatattggagatgatgatgaagacattgatgatatctaaattgaaccaagtgtttttacatgacaagttctctgaggatggttctacagttgggattttggccatcatcaaccaagaagagaaattcatttagtgtgtagtttctgaaagcaaactgatttattttcattgttttaaagtatttatttctttaaaagctgaggacactgaattaccttaagttaaatgttaatactttattgttttgatgtaatggaacttaaggataaaagaccataatatttgctgttaaaataaataaacgagtgcctttcctactgtgataacgtcaagtaattggatattttgaatacatttctgcctgataatcatgctgggttctaataagccctacttccacctaatctgtttacagtcttttggtatgtttcagttacttagatggtctcataaggtttctgatacaatttgaagacagaaatctgcatttagaatcagaaaacatggacatatttttcatatttatctagtcatatgtaattttatgctaacattgatagtttataaatccttttcatcctttgtgcctcggttattaaggaaaaaaaaatgtccaacatacagtttttaaagtgtggcagttttgagtagtaacttagaatgtataagattaagagttaaagaaaccgaacaataagtggcaaccaattatcttaacattggaaatactggggtgccattttgttttcaaaagttattcattgtaatccactgttttggctttcatgaacaagtaaattacagtgtataaatgaaaagcaatttcataataaattctataaactga

SEQ ID NO: 325069 - DNA, 6392 bp, Homo sapiens
gtcgagcagaaggatccttaaagatcttcatttctgctccatattggctgattaacaaaacagggttgccactgatcttcagacaggacaatgccaagacagatgctgcaggccagtttgaggagcatgagctggcccgtagcctgagtcctctcttattctgctatgctgacaaagagcagccaaacctctgcacgatgagaatcggaagggggattcatccagaaggcatgccgggctggtgtcagggcttctccctggatggtggtagtggtgtccgagctttgaaagtcatccagcaaggaaaccgcccagggctgatctataacattggtattgatgtcaagaaaggccgaggtcgatacattgatacctgcatggtcatctttgccccccgttacctgttagataataaatcatctcacaagcttgcatttgcacagagggaatttgccaggggacagggaacagccaatcccgaaggttacatttccacccttcctggttccagtgtggtgttccactggcctcggaatgactatgatcagctattgtgtgtcagactgatggacgttcccaattgtatttggtctggaggctttgaagtcaacaagaataattccttccatatcaacatgagggataccttgggaaaatgcttcttcctacgagtggaaattactctccgaggagctacgtataggatctcatttagtgacacagatcagttacctcctcctttccgaattgacaacttttctaaggtcccggttgtctttactcagcatggcgtagctgaacccaggctccggactgaagtgaagcccatgacttcattggattatgcctgggacgaacccaccttgccaccttttatcactctgactgttaaaggggcagggtcctctgagatcaactgcaacatgaatgatttccaggataatcggcagctttattatgaaaatttcatttacattgctgctacatatacattctctggcttgcaggagggaacaggcaggcctgtggcttccaacaaggccattacctgtgcggagctcgttttggatgtctcacccaagacacaaagagtcattttaaaaaagaaggaaccaggaaagcgttctcagctgtggaggatgacaggaacaggaatgctggcccatgagggctcctcagttcctcacaatcccaataagccctcagccgcccgctccaccgaggggtctgccatcttagatattgctggtctcgctgcagtgactgacaacagatacgagccactgatgctgagaaagcctgaccgcaggcgaagcacaactcagacgtggagtttccgagaaggaaaactgacctgtgggttacatgggttggtcgtccaggccaaaggaggactttctggtttgtttgatggagctgaagttgttcttggtcctgacacttccatggagcttttggggccagttccacctgaacaacaatttattaatcaaaaaatgagacctggttctggaatgttatccatcagagtcatcccagatggaccaactagagcactccagataacagatttctgccaccggaaaagcagccgttcatatgaagtggatgaacttcctgtcaccgaacaagagctgcagaaattaaagaatccagatacagagcaggaattggaagtgcttgtgaggttagaaggtggaattgggttgtccttaattaataaagtcccagaagaactggtctttgcaagtcttacaggaatcaatgtgcactatacacagctggcaaccagtcacatgcttgaactcagcatacaggatgtacaggtggacaatcagctcattggtaccacgcagcccttcatgctctatgtgactcccctgagcaatgagaatgaggtcatcgagaccggcccagctgtgcaagtcaacgcagtgaagttccccagtaagagtgcactgaccaacatctacaagcatctgatgatcacagctcagagattcacagtgcaaattgaggagaaactgctcctcaagctgctaagtttctttggctacgatcaagcagaatcagaggtggaaaaatatgatgaaaacctccatgaaaagacagctgagcaaggtggaacaccaattcgatactactttgaaaatctcaaaatcagcattcctcagatcaagctaagtgtgttcacctccaacaagctcccattggatcttaaggccctaaaaagcaccttggggtttcctttgatacggtttgaagacgctgtgattaatctagatccattcactcgggtacatccctatgagaccaaggagttcatcatcaatgatatcctcaaacatttccaggaggaactcctcagccaggcagctcgaatcctgggatcagtggattttcttggcaatcctatggggcttttgaatgatgtttctgaaggggttactggactgataaaatatggaaatgtcgggggcctcatcagaaatgttacacacggagtatcaaactctgctgccaagtttgctggaacattatcagatggcttagggaagacgatggacaatcggcatcagtcagagcgggagtacatcaggtaccatgcagccacaagtggtgaacaccttgtagccggcatccatggcctggctcatggtatcattggtggactgaccagtgttataacttcgacagtggaaggtgtgaaaacagaagggggtgtcagcggtttcatatctggccttggaaaagggcttgttggcactgtaaccaagccagtggcaggcgccctggattttgcatcagaaacagcccaggcggtgagagacacagccacactcagcggccccaggactcaagcacagagggttcggaaaccgcgttgctgcacggggccccaggggctgcttccccgatattctgagagccaggcggaaggacaggagcagctcttcaaactcacagacaacatacaggacgaattcttcatcgctgtggagaacattgacagctactgcgtgctcatctcctccaaagctgtttacttcctgaaaagtggagactacgtggatcgagaagccattttcctagaagtcaaatacgatgacctctaccactgccttgtctccaaagaccatgggaaggtgtatgtgcaggtgaccaagaaagccgtgagcacgagcagtggagtgtccatccccggcccctcccaccagaagcccatggtccatgtgaaatctgaggtccttgctgtcaagttgtcacaagaaataaactacgcaaagagcctctactatgaacagcagcttatgttaagactcagcgaaaaccgagagcagctggagctggactcctgaagccccgctgctgagatgggcgctcccgacacagcgcagacccaccaggaggaaagaggcccagctctcagctgacgatggaggcagaaccggagtcgggtttggggaagttgtcaaggaatgagggaaagtaaatcctcatgaggaaaagtacaaatggaaatcgtattaatttgtgaggcagggagttattttagattatgggaaataatttttaaaggtattggttaaataacgtttaaaaacatgtactgagatgaatctaatttttagattgccctgtattttgttaacatgtatatatgtacaacagtgtgtttgtaaatatataggaacgtttctgaacagggtctgtgctatgtgtaaaggtttgttaactgtaaagtaatataaagttatattggatcttctattgcactaattctagatgtctaattcaggatactgtctatagaaaggcattcttaaaagttaaagaatgttacgtcttagttttggagactaaagtattcccagtaaagtgggttgaggtgagggctgtggtcctgaaagggacgcctttgacatcgtggctgtccagttgggctgtgagctgtggcacccaggactggcgctggcccttcagaaggatctaggagaggggcttgggagcccacttttaatttctcacccccattttacaaagagtgcttagattcttacaaattatgatgtaagttatccatttggctttttcctaactagtcttaccaaacttagggggaaacctgtgctccattaccacatgggtgcaagtcagcattgtaagttttctcaggttattattattagagaggttggaaacattggtaaactctgttgattgagaaggaaaaaaaaagtcccattgaactgttgcaacaaatcagaaatccacataaaagtgctctcctgcctgggcagcaacaaccaagaacaaagccccgggactgttttctttttaataaagccacaggcaggcatcgtagctccacagcccgaggggacacaggatggaaaccccaggatgagaagggagcagggagagttccagaaagggggatgaaataggagtattaaaaagctgcgttggtaagtttttcatggaaccaagatttgacaaaggcatctcttatccttggttttaaattcctgctgggagcaaggcctggtatgagcgccctgggtcttgtttttggtgtttcgcttttctgtaaggattaagcagatagggagaagggaaaaggggcctcactttagaatgaatgagtcaccttgtgatttttaaatttttattttaataaagctaatcaatttctacaaccttgtcacatgtagctgagtctgggatgactcagtggatcagtggatgcgtggaaggttttggtgtttataactcatgacccaaatccttccaagacacaaatgaagctaatcttcttcccctccctttcctctcccacttcccctctgtgtctgtgtctgtgtgtgtgtgtgtgtgtgtgtgtgtgtgcgcgcgcgcgcgtgcatgcagagaggaaggaagggagctttagcacaagtagctacatagtgttcaaggatcagctttcttgaactccgaggcttggttgcctttgctgaactccaagttagtggattgcagaagtggaaacttggctttcgcggcactgggtgagttttagtttgtgtgtgtcttgctggggggtggtgatgattgtctcagcactcacgcactgcacaagatggcagcaggatacagcactgcacaagatggcagctcctctgcagcttcctcctcagcctccctccttgcacccccacaggtttggcttgtggtttttgtcatcagtaacctactgcctgagatcatgatctcttaaaagatgagactctcggaagggttgattgtatgcgtcagtgagccttctatcaccttctggaacaaagtcacttgaaatctcttgatgagattaaggagtttagtgttactaagaaaatctgctttgggccgcagcagtgctgggtgttctcagacctgactgaggaagttagctgcgggctgccctgtgggctgggtgcttcaggaggaatccagagaagtgttcagatgccccccttgggctcctttctaattttaatcagctctttaaatagctgcccatctcctgtgattgcacaaccaagcactttgacatttgcaccttaggagaggcagatgttaaaatggaatccaaagaccacctagggcggggctgggtgggagatgggagggccaactgcgagctgctccacttctcagctctcccctgccctgcagccctgggccagacaaggccagaaggtttcaggggcatttgacatcccctcctggttctcaccaggaaaacatccaaagctttggaggaaacaggccctgcccctggctccttaaatgccccgtctctttgtaaactgatattcagccagcaatgcctaagactttgttaagatcatttctactgcttttctttctgcttcaaacacacagttcgtctctgaggaaagtaaaataaatggaataagagtaaattgggtaaggagatatccaaagctacccagtcccttgacccagcacagttggccgacccgtgtcactccctggctgtcgctgcttctctgtgctcactgaagggtgagccaggccagtgcttccccagcccctgggcctggtcactacacagtggaaaacagacaagcggccccttccccaaatcccaagagtgtcttgctgcttggtgggtgctcatcgcaatgttctgaaggctccagggccactttgtttgtaagtatgatctgggcctcaaaataccatagtagctgcttgataaaattctaaaaatatctggttctctattatgtaaacactattacagtcaccagtgtgtgaagactcttgagtctggttctcatatcagagtcatcatttttcttcctgtggaataaaatgccttgtggacttcccaaaaaaaatct

SEQ ID NO: 325070 - DNA, 2154 bp, Homo sapiens
acagatgcagccacacttgaggtgccactgaagctatgtgaagagcctgctacccttcaaacagaccaggcccaagcaaggtgccaagccatgtgagagtgcccagtccactgtgtaaatgtgacggcctttgatggtagtgtttgaaaagatacttagtagaaagttgcagagacccgggagcagccatttcacaaaagaaggcaaaaatacctttgagaagaaaggaatgtctgcctctgcactatgtatttgcttgtttgtttctccaaataccatctgttgcagactggggtgcatgacattttaggactcaagcacagagggttcggaaaccgcgttgctgcacggggccccaggggctgcttccccgatattctgagagccaggcggaaggacaggagcagctcttcaaactcacagacaacatacaggacgaattcttcatcgctgtggagaacattgacagctactgcgtgctcatctcctccaaagctgtttacttcctgaaaagtggagactacgtggatcgagaagccattttcctagaagtcaaatacgatgacctctaccactgccttgtctccaaagaccatgggaaggtgtatgtgcaggtgaccaagaaagccgtgagcacgagcagtggagtgtccatccccggcccctcccaccagaagcccatggtccatgtgaaatctgaggtccttgctgtcaagttgtcacaagaaataaactacgcaaagagcctctactatgaacagcagcttatgttaagactcagcgaaaaccgagagcagctggagctggactcctgaagccccgctgctgagatgggcgctcccgacacagcgcagacccaccaggaggaaagaggcccagctctcagctgacgatggaggcagaaccggagtcgggtttggggaagttgtcaaggaatgagggaaagtaaatcctcatgaggaaaagtacaaatggaaatcgtattaatttgtgaggcagggagttattttagattatgggaaataatttttaaaggtattggttaaataacgtttaaaaacatgtactgagatgaatctaatttttagattgccctgtattttgttaacatgtatatatgtacaacagtgtgtttgtaaatatataggaacgtttctgaacagggtctgtgctatgtgtaaaggtttgttaactgtaaagtaatataaagttatattggatcttctattgcactaattctagatgtctaattcaggatactgtctatagaaaggcattcttaaaagttaaagaatgttacgtcttagttttggagactaaagtattcccagtaaagtgggttgaggtgagggctgtggtcctgaaagggacgcctttgacatcgtggctgtccagttgggctgtgagctgtggcacccaggactggcgctggcccttcagaaggatctaggagaggggcttgggagcccacttttaatttctcacccccattttacaaagagtgcttagattcttacaaattatgatgtaagttatccatttggctttttcctaactagtcttaccaaacttagggggaaacctgtgctccattaccacatgggtgcaagtcagcattgtaagttttctcaggttattattattagagaggttggaaacattggtaaactctgttgattgagaaggaaaaaaaaagtcccattgaactgttgcaacaaatcagaaatccacataaaagtgctctcctgcctgggcagcaacaaccaagaacaaagccccgggactgttttctttttaataaagccacaggcaggcatcgtagctccacagcccgaggggacacaggatggaaaccccaggatgagaagggagcagggagagttccagaaagggggatgaaataggagtattaaaaagctgcgttggtaagtttttcatggaaccaagatttgacaaaggcatctcttatccttggttttaaattcctgctgggagcaaggcctggtatgagcgccctgggtcttgtttttggtgtttcgcttttctgtaaggattaagcagatagggagaagggaaaaggggcctcactttagaatgaatgagtcaccttgtgatttttaaatttttattttaataaagctaatcaatttctac

SEQ ID NO: 325071 - DNA, 4586 bp, Homo sapiens
cggcccgggttactgcactgatcaacatctacaagcatctgatgatcacagctcagagattcacagtgcaaattgaggagaaactgctcctcaagctgctaagtttctttggctacgatcaagcagaatcagatttagaatttaagctttaagagtatttgggatcaagagcaagatcctgtctgtttaatgctgtgttttccactttgggttggaacgccagtgtttatttgtattcagacagccacttgggagcctgcctgccagaggtggaaaaatatgatgaaaacctccatgaaaagacagctgagcaaggtggaacaccaattcgatactactttgaaaatctcaaaatcagcattcctcagatcaagctaagtgtgttcacctccaacaagctcccattggatcttaaggccctaaaaagcaccttggggtttcctttgatacggtttgaagacgctgtgattaatctagatccattcactcgggtacatccctatgagaccaaggagttcatcatcaatgatatcctcaaacatttccaggaggaactcctcagccaggcagctcgaatcctgggatcagtggattttcttggcaatcctatggggcttttgaatgatgtttctgaaggggttactggactgataaaatatggaaatgtcgggggcctcatcagaaatgttacacacggagtatcaaactctgctgccaagtttgctggaacattatcagatggcttagggaagacgatggacaatcggcatcagtcagagcgggagtacatcaggtaccatgcagccacaagtggtgaacaccttgtagccggcatccatggcctggctcatggtatcattggtggactgaccagtgttataacttcgacagtggaaggtgtgaaaacagaagggggtgtcagcggtttcatatctggccttggaaaagggcttgttggcactgtaaccaagccagtggcaggcgccctggattttgcatcagaaacagcccaggcggtgagagacacagccacactcagcggccccaggactcaagcacagagggttcggaaaccgcgttgctgcacggggccccaggggctgcttccccgatattctgagagccaggcggaaggacaggagcagctcttcaaactcacagacaacatacaggacgaattcttcatcgctgtggagaacattgacagctactgcgtgctcatctcctccaaagctgtttacttcctgaaaagtggagactacgtggatcgagaagccattttcctagaagtcaaatacgatgacctctaccactgccttgtctccaaagaccatgggaaggtgtatgtgcaggtgaccaagaaagccgtgagcacgagcagtggagtgtccatccccggcccctcccaccagaagcccatggtccatgtgaaatctgaggtccttgctgtcaagttgtcacaagaaataaactacgcaaagagcctctactatgaacagcagcttatgttaagactcagcgaaaaccgagagcagctggagctggactcctgaagccccgctgctgagatgggcgctcccgacacagcgcagacccaccaggaggaaagaggcccagctctcagctgacgatggaggcagaaccggagtcgggtttggggaagttgtcaaggaatgagggaaagtaaatcctcatgaggaaaagtacaaatggaaatcgtattaatttgtgaggcagggagttattttagattatgggaaataatttttaaaggtattggttaaataacgtttaaaaacatgtactgagatgaatctaatttttagattgccctgtattttgttaacatgtatatatgtacaacagtgtgtttgtaaatatataggaacgtttctgaacagggtctgtgctatgtgtaaaggtttgttaactgtaaagtaatataaagttatattggatcttctattgcactaattctagatgtctaattcaggatactgtctatagaaaggcattcttaaaagttaaagaatgttacgtcttagttttggagactaaagtattcccagtaaagtgggttgaggtgagggctgtggtcctgaaagggacgcctttgacatcgtggctgtccagttgggctgtgagctgtggcacccaggactggcgctggcccttcagaaggatctaggagaggggcttgggagcccacttttaatttctcacccccattttacaaagagtgcttagattcttacaaattatgatgtaagttatccatttggctttttcctaactagtcttaccaaacttagggggaaacctgtgctccattaccacatgggtgcaagtcagcattgtaagttttctcaggttattattattagagaggttggaaacattggtaaactctgttgattgagaaggaaaaaaaaagtcccattgaactgttgcaacaaatcagaaatccacataaaagtgctctcctgcctgggcagcaacaaccaagaacaaagccccgggactgttttctttttaataaagccacaggcaggcatcgtagctccacagcccgaggggacacaggatggaaaccccaggatgagaagggagcagggagagttccagaaagggggatgaaataggagtattaaaaagctgcgttggtaagtttttcatggaaccaagatttgacaaaggcatctcttatccttggttttaaattcctgctgggagcaaggcctggtatgagcgccctgggtcttgtttttggtgtttcgcttttctgtaaggattaagcagatagggagaagggaaaaggggcctcactttagaatgaatgagtcaccttgtgatttttaaatttttattttaataaagctaatcaatttctacaaccttgtcacatgtagctgagtctgggatgactcagtggatcagtggatgcgtggaaggttttggtgtttataactcatgacccaaatccttccaagacacaaatgaagctaatcttcttcccctccctttcctctcccacttcccctctgtgtctgtgtctgtgtgtgtgtgtgtgtgtgtgtgtgtgtgcgcgcgcgcgcgtgcatgcagagaggaaggaagggagctttagcacaagtagctacatagtgttcaaggatcagctttcttgaactccgaggcttggttgcctttgctgaactccaagttagtggattgcagaagtggaaacttggctttcgcggcactgggtgagttttagtttgtgtgtgtcttgctggggggtggtgatgattgtctcagcactcacgcactgcacaagatggcagcaggatacagcactgcacaagatggcagctcctctgcagcttcctcctcagcctccctccttgcacccccacaggtttggcttgtggtttttgtcatcagtaacctactgcctgagatcatgatctcttaaaagatgagactctcggaagggttgattgtatgcgtcagtgagccttctatcaccttctggaacaaagtcacttgaaatctcttgatgagattaaggagtttagtgttactaagaaaatctgctttgggccgcagcagtgctgggtgttctcagacctgactgaggaagttagctgcgggctgccctgtgggctgggtgcttcaggaggaatccagagaagtgttcagatgccccccttgggctcctttctaattttaatcagctctttaaatagctgcccatctcctgtgattgcacaaccaagcactttgacatttgcaccttaggagaggcagatgttaaaatggaatccaaagaccacctagggcggggctgggtgggagatgggagggccaactgcgagctgctccacttctcagctctcccctgccctgcagccctgggccagacaaggccagaaggtttcaggggcatttgacatcccctcctggttctcaccaggaaaacatccaaagctttggaggaaacaggccctgcccctggctccttaaatgccccgtctctttgtaaactgatattcagccagcaatgcctaagactttgttaagatcatttctactgcttttctttctgcttcaaacacacagttcgtctctgaggaaagtaaaataaatggaataagagtaaattgggtaaggagatatccaaagctacccagtcccttgacccagcacagttggccgacccgtgtcactccctggctgtcgctgcttctctgtgctcactgaagggtgagccaggccagtgcttccccagcccctgggcctggtcactacacagtggaaaacagacaagcggccccttccccaaatcccaagagtgtcttgctgcttggtgggtgctcatcgcaatgttctgaaggctccagggccactttgtttgtaagtatgatctgggcctcaaaataccatagtagctgcttgataaaattctaaaaatatctggttctctattatgtaaacactattacagtcaccagtgtgtgaagactcttgagtctggttctcatatcagagtcatcatttttcttcctgtggaataaaatgccttgtggacttcccaaaaaaaatct

SEQ ID NO: 325072 - DNA, 3313 bp, Homo sapiens
agcaggagcagccctggccatcactgtttctttgacgtgtacatcccatcctgagatgcagctgggctgggagccgccacctgggtggatctgattcctggatttccccatcctggggacaggtgacccatcctgttctcctccttaggtccatgtgaaatctgaggtccttgctgtcaagttgtcacaagaaataaactacgcaaagagcctctactatgaacagcagcttatgttaagactcagcgaaaaccgagagcagctggagctggactcctgaagccccgctgctgagatgggcgctcccgacacagcgcagacccaccaggaggaaagaggcccagctctcagctgacgatggaggcagaaccggagtcgggtttggggaagttgtcaaggaatgagggaaagtaaatcctcatgaggaaaagtacaaatggaaatcgtattaatttgtgaggcagggagttattttagattatgggaaataatttttaaaggtattggttaaataacgtttaaaaacatgtactgagatgaatctaatttttagattgccctgtattttgttaacatgtatatatgtacaacagtgtgtttgtaaatatataggaacgtttctgaacagggtctgtgctatgtgtaaaggtttgttaactgtaaagtaatataaagttatattggatcttctattgcactaattctagatgtctaattcaggatactgtctatagaaaggcattcttaaaagttaaagaatgttacgtcttagttttggagactaaagtattcccagtaaagtgggttgaggtgagggctgtggtcctgaaagggacgcctttgacatcgtggctgtccagttgggctgtgagctgtggcacccaggactggcgctggcccttcagaaggatctaggagaggggcttgggagcccacttttaatttctcacccccattttacaaagagtgcttagattcttacaaattatgatgtaagttatccatttggctttttcctaactagtcttaccaaacttagggggaaacctgtgctccattaccacatgggtgcaagtcagcattgtaagttttctcaggttattattattagagaggttggaaacattggtaaactctgttgattgagaaggaaaaaaaaagtcccattgaactgttgcaacaaatcagaaatccacataaaagtgctctcctgcctgggcagcaacaaccaagaacaaagccccgggactgttttctttttaataaagccacaggcaggcatcgtagctccacagcccgaggggacacaggatggaaaccccaggatgagaagggagcagggagagttccagaaagggggatgaaataggagtattaaaaagctgcgttggtaagtttttcatggaaccaagatttgacaaaggcatctcttatccttggttttaaattcctgctgggagcaaggcctggtatgagcgccctgggtcttgtttttggtgtttcgcttttctgtaaggattaagcagatagggagaagggaaaaggggcctcactttagaatgaatgagtcaccttgtgatttttaaatttttattttaataaagctaatcaatttctacaaccttgtcacatgtagctgagtctgggatgactcagtggatcagtggatgcgtggaaggttttggtgtttataactcatgacccaaatccttccaagacacaaatgaagctaatcttcttcccctccctttcctctcccacttcccctctgtgtctgtgtctgtgtgtgtgtgtgtgtgtgtgtgtgtgtgcgcgcgcgcgcgtgcatgcagagaggaaggaagggagctttagcacaagtagctacatagtgttcaaggatcagctttcttgaactccgaggcttggttgcctttgctgaactccaagttagtggattgcagaagtggaaacttggctttcgcggcactgggtgagttttagtttgtgtgtgtcttgctggggggtggtgatgattgtctcagcactcacgcactgcacaagatggcagcaggatacagcactgcacaagatggcagctcctctgcagcttcctcctcagcctccctccttgcacccccacaggtttggcttgtggtttttgtcatcagtaacctactgcctgagatcatgatctcttaaaagatgagactctcggaagggttgattgtatgcgtcagtgagccttctatcaccttctggaacaaagtcacttgaaatctcttgatgagattaaggagtttagtgttactaagaaaatctgctttgggccgcagcagtgctgggtgttctcagacctgactgaggaagttagctgcgggctgccctgtgggctgggtgcttcaggaggaatccagagaagtgttcagatgccccccttgggctcctttctaattttaatcagctctttaaatagctgcccatctcctgtgattgcacaaccaagcactttgacatttgcaccttaggagaggcagatgttaaaatggaatccaaagaccacctagggcggggctgggtgggagatgggagggccaactgcgagctgctccacttctcagctctcccctgccctgcagccctgggccagacaaggccagaaggtttcaggggcatttgacatcccctcctggttctcaccaggaaaacatccaaagctttggaggaaacaggccctgcccctggctccttaaatgccccgtctctttgtaaactgatattcagccagcaatgcctaagactttgttaagatcatttctactgcttttctttctgcttcaaacacacagttcgtctctgaggaaagtaaaataaatggaataagagtaaattgggtaaggagatatccaaagctacccagtcccttgacccagcacagttggccgacccgtgtcactccctggctgtcgctgcttctctgtgctcactgaagggtgagccaggccagtgcttccccagcccctgggcctggtcactacacagtggaaaacagacaagcggccccttccccaaatcccaagagtgtcttgctgcttggtgggtgctcatcgcaatgttctgaaggctccagggccactttgtttgtaagtatgatctgggcctcaaaataccatagtagctgcttgataaaattctaaaaatatctggttctctattatgtaaacactattacagtcaccagtgtgtgaagactcttgagtctggttctcatatcagagtcatcatttttcttcctgtggaataaaatgccttgtggacttcccaaaaaaaatct

SEQ ID NO: 325073 - DNA, 5128 bp, Homo sapiens
  misc_feature (5045)..(5046): n is a, c, g, or t
gctcggagcttctcgggaagctccgcctcccagggataccttgggaaaatgcttcttcctacgagtggaaattactctccgaggagctacgtataggatctcatttagtgacacagatcagttacctcctcctttccgaattgacaacttttctaaggtcccggttgtctttactcagcatggcgtagctgaacccaggctccggactgaagtgaagcccatgacttcattggattatgcctgggacgaacccaccttgccaccttttatcactctgactgttaaaggggcagggtcctctgagatcaactgcaacatgaatgatttccaggataatcggcagctttattatgaaaatttcatttacattgctgctacatatacattctctggcttgcaggagggaacaggcaggcctgtggcttccaacaaggccattacctgtgcggagctcgttttggatgtctcacccaagacacaaagagtcattttaaaaaagaaggaaccaggaaagcgttctcagctgtggaggatgacaggaacaggaatgctggcccatgagggctcctcagttcctcacaatcccaataagccctcagccgcccgctccaccgaggggtctgccatcttagatattgctggtctcgctgcagtgactgacaacagatacgagccactgatgctgagaaagcctgaccgcaggcgaagcacaactcagacgtggagtttccgagaaggaaaactgacctgtgggttacatgggttggtcgtccaggccaaaggaggactttctggtttgtttgatggagctgaagttgttcttggtcctgacacttccatggagcttttggggccagttccacctgaacaacaatttattaatcaaaaaatgagacctggttctggaatgttatccatcagagtcatcccagatggaccaactagagcactccagataacagatttctgccaccggaaaagcagccgttcatatgaagtggatgaacttcctgtcaccgaacaagagctgcagaaattaaagaatccagatacagagcaggaattggaagtgcttgtgaggttagaaggtggaattgggttgtccttaattaataaagtcccagaagaactggtctttgcaagtcttacaggaatcaatgtgcactatacacagctggcaaccagtcacatgcttgaactcagcatacaggatgtacaggtggacaatcagctcattggtaccacgcagcccttcatgctctatgtgactcccctgagcaatgagaatgaggtcatcgagaccggcccagctgtgcaagtcaacgcagtgaagttccccagtaagagtgcactgaccaacatctacaagcatctgatgatcacagctcagagattcacagtgcaaattgaggagaaactgctcctcaagctgctaagtttctttggctacgatcaagcagaatcagaggtggaaaaatatgatgaaaacctccatgaaaagacagctgagcaaggtggaacaccaattcgatactactttgaaaatctcaaaatcagcattcctcagatcaagctaagtgtgttcacctccaacaagctcccattggatcttaaggccctaaaaagcaccttggggtttcctttgatacggtttgaagacgctgtgattaatctagatccattcactcgggtacatccctatgagaccaaggagttcatcatcaatgatatcctcaaacatttccaggaggaactcctcagccaggcagctcgaatcctgggatcagtggattttcttggcaatcctatggggcttttgaatgatgtttctgaaggggttactggactgataaaatatggaaatgtcgggggcctcatcagaaatgttacacacggagtatcaaactctgctgccaagtttgctggaacattatcagatggcttagggaagacgatggacaatcggcatcagtcagagcgggagtacatcaggtaccatgcagccacaagtggtgaacaccttgtagccggcatccatggcctggctcatggtatcattggtggactgaccagtgttataacttcgacagtggaaggtgtgaaaacagaagggggtgtcagcggtttcatatctggccttggaaaagggcttgttggcactgtaaccaagccagtggcaggcgccctggattttgcatcagaaacagcccaggcggtgagagacacagccacactcagcggccccaggactcaagcacagagggttcggaaaccgcgttgctgcacggggccccaggggctgcttccccgatattctgagagccaggcggaaggacaggagcagctcttcaaactcacagacaacatacaggacgaattcttcatcgctgtggagaacattgacagctactgcgtgctcatctcctccaaagctgtttacttcctgaaaagtggagactacgtggatcgagaagccattttcctagaagtcaaatacgatgacctctaccactgccttgtctccaaagaccatgggaaggtgtatgtgcaggtgaccaagaaagccgtgagcacgagcagtggagtgtccatccccggcccctcccaccagaagcccatggtccatgtgaaatctgaggtccttgctgtcaagttgtcacaagaaataaactacgcaaagagcctctactatgaacagcagcttatgttaagactcagcgaaaaccgagagcagctggagctggactcctgaagccccgctgctgagatgggcgctcccgacacagcgcagacccaccaggaggaaagaggcccagctctcagctgacgatggaggcagaaccggagtcgggtttggggaagttgtcaaggaatgagggaaagtaaatcctcatgaggaaaagtacaaatggaaatcgtattaatttgtgaggcagggagttattttagattatgggaaataatttttaaaggtattggttaaataacgtttaaaaacatgtactgagatgaatctaatttttagattgccctgtattttgttaacatgtatatatgtacaacagtgtgtttgtaaatatataggaacgtttctgaacagggtctgtgctatgtgtaaaggtttgttaactgtaaagtaatataaagttatattggatcttctattgcactaattctagatgtctaattcaggatactgtctatagaaaggcattcttaaaagttaaagaatgttacgtcttagttttggagactaaagtattcccagtaaagtgggttgaggtgagggctgtggtcctgaaagggacgcctttgacatcgtggctgtccagttgggctgtgagctgtggcacccaggactggcgctggcccttcagaaggatctaggagaggggcttgggagcccacttttaatttctcacccccattttacaaagagtgcttagattcttacaaattatgatgtaagttatccatttggctttttcctaactagtcttaccaaacttagggggaaacctgtgctccattaccacatgggtgcaagtcagcattgtaagttttctcaggttattattattagagaggttggaaacattggtaaactctgttgattgagaaggaaaaaaaaagtcccattgaactgttgcaacaaatcagaaatccacataaaagtgctctcctgcctgggcagcaacaaccaagaacaaagccccgggactgttttctttttaataaagccacaggcaggcatcgtagctccacagcccgaggggacacaggatggaaaccccaggatgagaagggagcagggagagttccagaaagggggatgaaataggagtattaaaaagctgcgttggtaagtttttcatggaaccaagatttgacaaaggcatctcttatccttggttttaaattcctgctgggagcaaggcctggtatgagcgccctgggtcttgtttttggtgtttcgcttttctgtaaggattaagcagatagggagaagggaaaaggggcctcactttagaatgaatgagtcaccttgtgatttttaaatttttattttaataaagctaatcaatttctacaaccttgtcacatgtagctgagtctgggatgactcagtggatcagtggatgcgtggaaggttttggtgtttataactcatgacccaaatccttccaagacacaaatgaagctaatcttcttcccctccctttcctctcccacttcccctctgtgtctgtgtctgtgtgtgtgtgtgtgtgtgtgtgtgtgtgcgcgcgcgcgcgtgcatgcagagaggaaggaagggagctttagcacaagtagctacatagtgttcaaggatcagctttcttgaactccgaggcttggttgcctttgctgaactccaagttagtggattgcagaagtggaaacttggctttcgcggcactgggtgagttttagtttgtgtgtgtcttgctggggggtggtgatgattgtctcagcactcacgcactgcacaagatggcagcaggatacagcactgcacaagatggcagctcctctgcagcttcctcctcagcctccctccttgcacccccacaggtttggcttgtggtttttgtcatcagtaacctactgcctgagatcatgatctcttaaaagatgagactctcggaagggttgattgtatgcgtcagtgagccttctatcaccttctggaacaaagtcacttgaaatctcttgatgagattaaggagtttagtgttactaagaaaatctgctttgggccgcagcagtgctgggtgttctcagacctgactgaggaagttagctgcgggctgccctgtgggctgggtgcttcaggaggaatccagagaagtgttcagatgccccccttgggctcctttctaattttaatcagctctttaaatagctgcccatctcctgtgattgcacaaccaagcactttgacatttgcaccttaggagaggcagatgttaaaatggaatccaaagaccacctagggcggggctgggtgggacaaatttgannaaggaatgattggtttcaaatgatgggggaaagaagtaagttctgttttgttttgatataataataggttttaattggctat

SEQ ID NO: 325074 - DNA, 3162 bp, Homo sapiens
gctcggagcttctcgggaagctccgcctcccagggataccttgggaaaatgcttcttcctacgagtggaaattactctccgaggagctacgtataggatctcatttagtgacacagatcagttacctcctcctttccgaattgacaacttttctaaggtcccggttgtctttactcagcatggcgtagctgaacccaggctccggactgaagtgaagcccatgacttcattggattatgcctgggacgaacccaccttgccaccttttatcactctgactgttaaaggggcagggtcctctgagatcaactgcaacatgaatgatttccaggataatcggcagctttattatgaaaatttcatttacattgctgctacatatacattctctggcttgcaggagggaacaggcaggcctgtggcttccaacaaggccattacctgtgcggagctcgttttggatgtctcacccaagacacaaagagtcattttaaaaaagaaggaaccaggaaagcgttctcagctgtggaggatgacaggaacaggaatgctggcccatgagggctcctcagttcctcacaatcccaataagccctcagccgcccgctccaccgaggggtctgccatcttagatattgctggtctcgctgcagtgactgacaacagatacgagccactgatgctgagaaagcctgaccgcaggcgaagcacaactcagacgtggagtttccgagaaggaaaactgacctgtgggttacatgggttggtcgtccaggccaaaggaggactttctggtttgtttgatggagctgaagttgttcttggtcctgacacttccatggagcttttggggccagttccacctgaacaacaatttattaatcaaaaaatgagacctggttctggaatgttatccatcagagtcatcccagatggaccaactagagcactccagataacagatttctgccaccggaaaagcagccgttcatatgaagtggatgaacttcctgtcaccgaacaagagctgcagaaattaaagaatccagatacagagcaggaattggaagtgcttgtgaggttagaaggtggaattgggttgtccttaattaataaagtcccagaagaactggtctttgcaagtcttacaggaatcaatgtgcactatacacagctggcaaccagtcacatgcttgaactcagcatacaggatgtacaggtggacaatcagctcattggtaccacgcagcccttcatgctctatgtgactcccctgagcaatgagaatgaggtcatcgagaccggcccagctgtgcaagtcaacgcagtgaagttccccagtaagagtgcactgaccaacatctacaagcatctgatgatcacagctcagagattcacagtgcaaattgaggagaaactgctcctcaagctgctaagtttctttggctacgatcaagcagaatcagaggtggaaaaatatgatgaaaacctccatgaaaagacagctgagcaaggtggaacaccaattcgatactactttgaaaatctcaaaatcagcattcctcagatcaagctaagtgtgttcacctccaacaagctcccattggatcttaaggccctaaaaagcaccttggggtttcctttgatacggtttgaagacgctgtgattaatctagatccattcactcgggtacatccctatgagaccaaggagttcatcatcaatgatatcctcaaacatttccaggaggaactcctcagccaggcagctcgaatcctgggatcagtggattttcttggcaatcctatggggcttttgaatgatgtttctgaaggggttactggactgataaaatatggaaatgtcgggggcctcatcagaaatgttacacacggagtatcaaactctgctgccaagtttgctggaacattatcagatggcttagggaagacgatggacaatcggcatcagtcagagcgggagtacatcaggtaccatgcagccacaagtggtgaacaccttgtagccggcatccatggcctggctcatggtatcattggtggactgaccagtgttataacttcgacagtggaaggtgtgaaaacagaagggggtgtcagcggtttcatatctggccttggaaaagggcttgttggcactgtaaccaagccagtggcaggcgccctggattttgcatcagaaacagcccaggcggtgagagacacagccacactcagcggccccaggactcaagcacagagggttcggaaaccgcgttgctgcacggggccccaggggctgcttccccgatattctgagagccaggcggaaggacaggagcagctcttcaaactcacagacaacatacaggacgaattcttcatcgctgtggagaacattgacagctactgcgtgctcatctcctccaaagctgtttacttcctgaaaagtggagactacgtggatcgagaagccattttcctagaagtcaaatacgatgacctctaccactgccttgtctccaaagaccatgggaaggtgtatgtgcaggtgaccaagaaagccgtgagcacgagcagtggagtgtccatccccggcccctcccaccagaagcccatggtccatgtgaaatctgaggtccttgctgtcaagttgtcacaagaaataaactacgcaaagagcctctactatgaacagcagcttatgttaagactcagcgaaaaccgagagcagctggagctggactcctgaagccccgctgctgagatgggcgctcccgacacagcgcagacccaccaggaggaaagaggcccagctctcagctgacgatggaggcagaaccggagtcgggtttggggaagttgtcaaggaatgagggaaagtaaatcctcatgaggaaaagtacaaatggaaatcgtattaatttgtgaggcagggagttattttagattatgggaaataatttttaaaggtattggttaaataacgtttaaaaacatgtactgagatgaatctaatttttagattgccctgtattttgttaacatgtatatatgtacaacagtgtgtttgtaaatatataggaacgtttctgaacagggtctgtgctatgtgtaaaggtttgttaactgtaaagtaatataaagttatattggatcttc

SEQ ID NO: 325075 - DNA, 2594 bp, Homo sapiens
  misc_feature (2580)..(2580): n is a, c, g, or t
gctcggagcttctcgggaagctccgcctcccagggataccttgggaaaatgcttcttcctacgagtggaaattactctccgaggagctacgtataggatctcatttagtgacacagatcagttacctcctcctttccgaattgacaacttttctaaggtcccggttgtctttactcagcatggcgtagctgaacccaggctccggactgaagtgaagcccatgacttcattggattatgcctgggacgaacccaccttgccaccttttatcactctgactgttaaaggggcagggtcctctgagatcaactgcaacatgaatgatttccaggataatcggcagctttattatgaaaatttcatttacattgctgctacatatacattctctggcttgcaggagggaacaggcaggcctgtggcttccaacaaggccattacctgtgcggagctcgttttggatgtctcacccaagacacaaagagtcattttaaaaaagaaggaaccaggaaagcgttctcagctgtggaggatgacaggaacaggaatgctggcccatgagggctcctcagttcctcacaatcccaataagccctcagccgcccgctccaccgaggggtctgccatcttagatattgctggtctcgctgcagtgactgacaacagatacgagccactgatgctgagaaagcctgaccgcaggcgaagcacaactcagacgtggagtttccgagaaggaaaactgacctgtgggttacatgggttggtcgtccaggccaaaggaggactttctggtttgtttgatggagctgaagttgttcttggtcctgacacttccatggagcttttggggccagttccacctgaacaacaatttattaatcaaaaaatgagacctggttctggaatgttatccatcagagtcatcccagatggaccaactagagcactccagataacagatttctgccaccggaaaagcagccgttcatatgaagtggatgaacttcctgtcaccgaacaagagctgcagaaattaaagaatccagatacagagcaggaattggaagtgcttgtgaggttagaaggtggaattgggttgtccttaattaataaagtcccagaagaactggtctttgcaagtcttacaggaatcaatgtgcactatacacagctggcaaccagtcacatgcttgaactcagcatacaggatgtacaggtggacaatcagctcattggtaccacgcagcccttcatgctctatgtgactcccctgagcaatgagaatgaggtcatcgagaccggcccagctgtgcaagtcaacgcagtgaagttccccagtaagagtgcactgaccaacatctacaagcatctgatgatcacagctcagagattcacagtgcaaattgaggagaaactgctcctcaagctgctaagtttctttggctacgatcaagcagaatcagaggtggaaaaatatgatgaaaacctccatgaaaagacagctgagcaaggtggaacaccaattcgatactactttgaaaatctcaaaatcagcattcctcagatcaagctaagtgtgttcacctccaacaagctcccattggatcttaaggccctaaaaagcaccttggggtttcctttgatacggtttgaagacgctgtgattaatctagatccattcactcgggtacatccctatgagaccaaggagttcatcatcaatgatatcctcaaacatttccaggaggaactcctcagccaggcagctcgaatcctgggatcagtggattttcttggcaatcctatggggcttttgaatgatgtttctgaaggggttactggactgataaaatatggaaatgtcgggggcctcatcagaaatgttacacacggagtatcaaactctgctgccaagtttgctggaacattatcagatggcttagggaagacgatggacaatcggcatcagtcagagcgggagtacatcaggtaccatgcagccacaagtggtgaacaccttgtagccggcatccatggcctggctcatggtatcattggtggactgaccagtgttataacttcgacagtggaaggtgtgaaaacagaagggggtgtcagcggtttcatatctggccttggaaaagggcttgttggcactgtaaccaagccagtggcaggcgccctggattttgcatcagaaacagcccaggcggtgagagacacagccacactcagcggccccaggactcaagcacagagggttcggaaaccgcgttgctgcacggggccccaggggctgcttccccgatattctgagagccaggcggaaggacaggagcagctcttcaaactcacagacaacatacaggacgaattcttcatcgctgtggagaacattgacagctactgcgtgctcatctcctccaaagctgtttacttcctgaaaagtggagactacgtggatcgagaagccattttcctagaagtcaaatacgatgacctctaccactgccttgtctccaaagaccatgggaaggtgtatgtgcaggtgaccaacaagcgcctgggaatcctctngagcgcccgcagca

SEQ ID NO: 325076 - DNA, 715 bp, Homo sapiens
tgaggtgccactgaagctatgtgaagagcctgctacccttcaaacagaccaggcccaagcaaggtgccaagccatgtgagagtgcccagtccactgtgtaaatgtgacggcctttgatggtagtgtttgaaaagatacttagtagaaagttgcagagacccgggagcagccatttcacaaaagaaggcaaaaatacctttgagaagaaaggaatgtctgcctctgcactatgtatttgcttgtttgtttctccaaataccatctgttgcagactggggtgcatgacattttaggtaagtagcagatgaagatttatgaagctgggccctgaggtttcctctaaaatatttcttcaccttttaagtcaagacccaaaagtggggagagaagtaggagttggcagaacttgaaatatttaaactaatttagcaaagctcaggagtgttggagcttatctcgttatttaagttagataaggaggaaggggaatttgaaggataatgatagatcagtgtttaagaatacagccatcaggactgataatgttctggaatcccgggaccctcggattgtgcacgtagatgtaaattccatttgctctgagaacttttgaaaaagaaagtttttggttgatttcacagaaaagatttatggtgggcatatttgactttttcagtaaaaatagccccaaaacaccacccaaaatctgttaaga

SEQ ID NO: 325077 - DNA, 591 bp, Homo sapiens
gcatcagtcagagcgggagtacatcaggtaccatgcagccacaagtggtgaacaccttgtagccggcatccatggcctggctcatggtaagtcatgggtgacatcaggctctgctgctgctggtcctcagaggcgcctttgtatcaatctgattgcagctataaaaaaagaaaggtgggctgggcgcggtggctcatgcttgtaatcccagcattttgggaggcctaggagagtggatcatgaggtcaggagtttgagaccagcctggccaacacagtgaaaccccgcctctactaagaatacaaaaattaggccaggcacagtggctcaatcctgtaatcccagcattttgggaggtcgaggcgggtggatcatttgaggtcaggagtttgagaccagtctggccaacatggtggaaccccatctctatcaaaaatacgaaaattagacaggcgtggtggtacatgcctgtagtcccagctactcgggaggctgaggcaggagaattgctcgaaccctggaggcagaggttgcaatgagctgagatcgtgccactgcactccagcctggcaacagagcaagactccaatt

SEQ ID NO: 325078 - DNA, 5785 bp, Homo sapiens
gctcggagcttctcgggaagctccgcctcccagggataccttgggaaaatgcttcttcctacgagtggaaattactctccgaggagctacgtataggatctcatttagtgacacagatcagttacctcctcctttccgaattgacaacttttctaaggtcccggttgtctttactcagcatggcgtagctgaacccaggctccggactgaagtgaagcccatgacttcattggattatgcctgggacgaacccaccttgccaccttttatcactctgactgttaaaggggcagggtcctctgagatcaactgcaacatgaatgatttccaggataatcggcagctttattatgaaaatttcatttacattgctgctacatatacattctctggcttgcaggagggaacaggcaggcctgtggcttccaacaaggccattacctgtgcggagctcgttttggatgtctcacccaagacacaaagagtcattttaaaaaagaaggaaccaggaaagcgttctcagctgtggaggatgacaggaacaggaatgctggcccatgagggctcctcagttcctcacaatcccaataagccctcagccgcccgctccaccgaggggtctgccatcttagatattgctggtctcgctgcagtgactgacaacagatacgagccactgatgctgagaaagcctgaccgcaggcgaagcacaactcagacgtggagtttccgagaaggaaaactgacctgtgggttacatgggttggtcgtccaggccaaaggaggactttctggtttgtttgatggagctgaagttgttcttggtcctgacacttccatggagcttttggggccagttccacctgaacaacaatttattaatcaaaaaatgagacctggttctggaatgttatccatcagagtcatcccagatggaccaactagagcactccagataacagatttctgccaccggaaaagcagccgttcatatgaagtggatgaacttcctgtcaccgaacaagagctgcagaaattaaagaatccagatacagagcaggaattggaagtgcttgtgaggttagaaggtggaattgggttgtccttaattaataaagtcccagaagaactggtctttgcaagtcttacaggaatcaatgtgcactatacacagctggcaaccagtcacatgcttgaactcagcatacaggatgtacaggtggacaatcagctcattggtaccacgcagcccttcatgctctatgtgactcccctgagcaatgagaatgaggtcatcgagaccggcccagctgtgcaagtcaacgcagtgaagttccccagtaagagtgcactgaccaacatctacaagcatctgatgatcacagctcagagattcacagtgcaaattgaggagaaactgctcctcaagctgctaagtttctttggctacgatcaagcagaatcagaggtggaaaaatatgatgaaaacctccatgaaaagacagctgagcaaggtggaacaccaattcgatactactttgaaaatctcaaaatcagcattcctcagatcaagctaagtgtgttcacctccaacaagctcccattggatcttaaggccctaaaaagcaccttggggtttcctttgatacggtttgaagacgctgtgattaatctagatccattcactcgggtacatccctatgagaccaaggagttcatcatcaatgatatcctcaaacatttccaggaggaactcctcagccaggcagctcgaatcctgggatcagtggattttcttggcaatcctatggggcttttgaatgatgtttctgaaggggttactggactgataaaatatggaaatgtcgggggcctcatcagaaatgttacacacggagtatcaaactctgctgccaagtttgctggaacattatcagatggcttagggaagacgatggacaatcggcatcagtcagagcgggagtacatcaggtaccatgcagccacaagtggtgaacaccttgtagccggcatccatggcctggctcatggtatcattggtggactgaccagtgttataacttcgacagtggaaggtgtgaaaacagaagggggtgtcagcggtttcatatctggccttggaaaagggcttgttggcactgtaaccaagccagtggcaggcgccctggattttgcatcagaaacagcccaggcggtgagagacacagccacactcagcggccccaggactcaagcacagagggttcggaaaccgcgttgctgcacggggccccaggggctgcttccccgatattctgagagccaggcggaaggacaggagcagctcttcaaactcacagacaacatacaggacgaattcttcatcgctgtggagaacattgacagctactgcgtgctcatctcctccaaagctgtttacttcctgaaaagtggagactacgtggatcgagaagccattttcctagaagtcaaatacgatgacctctaccactgccttgtctccaaagaccatgggaaggtgtatgtgcaggtgaccaagaaagccgtgagcacgagcagtggagtgtccatccccggcccctcccaccagaagcccatggtccatgtgaaatctgaggtccttgctgtcaagttgtcacaagaaataaactacgcaaagagcctctactatgaacagcagcttatgttaagactcagcgaaaaccgagagcagctggagctggactcctgaagccccgctgctgagatgggcgctcccgacacagcgcagacccaccaggaggaaagaggcccagctctcagctgacgatggaggcagaaccggagtcgggtttggggaagttgtcaaggaatgagggaaagtaaatcctcatgaggaaaagtacaaatggaaatcgtattaatttgtgaggcagggagttattttagattatgggaaataatttttaaaggtattggttaaataacgtttaaaaacatgtactgagatgaatctaatttttagattgccctgtattttgttaacatgtatatatgtacaacagtgtgtttgtaaatatataggaacgtttctgaacagggtctgtgctatgtgtaaaggtttgttaactgtaaagtaatataaagttatattggatcttctattgcactaattctagatgtctaattcaggatactgtctatagaaaggcattcttaaaagttaaagaatgttacgtcttagttttggagactaaagtattcccagtaaagtgggttgaggtgagggctgtggtcctgaaagggacgcctttgacatcgtggctgtccagttgggctgtgagctgtggcacccaggactggcgctggcccttcagaaggatctaggagaggggcttgggagcccacttttaatttctcacccccattttacaaagagtgcttagattcttacaaattatgatgtaagttatccatttggctttttcctaactagtcttaccaaacttagggggaaacctgtgctccattaccacatgggtgcaagtcagcattgtaagttttctcaggttattattattagagaggttggaaacattggtaaactctgttgattgagaaggaaaaaaaaagtcccattgaactgttgcaacaaatcagaaatccacataaaagtgctctcctgcctgggcagcaacaaccaagaacaaagccccgggactgttttctttttaataaagccacaggcaggcatcgtagctccacagcccgaggggacacaggatggaaaccccaggatgagaagggagcagggagagttccagaaagggggatgaaataggagtattaaaaagctgcgttggtaagtttttcatggaaccaagatttgacaaaggcatctcttatccttggttttaaattcctgctgggagcaaggcctggtatgagcgccctgggtcttgtttttggtgtttcgcttttctgtaaggattaagcagatagggagaagggaaaaggggcctcactttagaatgaatgagtcaccttgtgatttttaaatttttattttaataaagctaatcaatttctacaaccttgtcacatgtagctgagtctgggatgactcagtggatcagtggatgcgtggaaggttttggtgtttataactcatgacccaaatccttccaagacacaaatgaagctaatcttcttcccctccctttcctctcccacttcccctctgtgtctgtgtctgtgtgtgtgtgtgtgtgtgtgtgtgtgtgcgcgcgcgcgcgtgcatgcagagaggaaggaagggagctttagcacaagtagctacatagtgttcaaggatcagctttcttgaactccgaggcttggttgcctttgctgaactccaagttagtggattgcagaagtggaaacttggctttcgcggcactgggtgagttttagtttgtgtgtgtcttgctggggggtggtgatgattgtctcagcactcacgcactgcacaagatggcagcaggatacagcactgcacaagatggcagctcctctgcagcttcctcctcagcctccctccttgcacccccacaggtttggcttgtggtttttgtcatcagtaacctactgcctgagatcatgatctcttaaaagatgagactctcggaagggttgattgtatgcgtcagtgagccttctatcaccttctggaacaaagtcacttgaaatctcttgatgagattaaggagtttagtgttactaagaaaatctgctttgggccgcagcagtgctgggtgttctcagacctgactgaggaagttagctgcgggctgccctgtgggctgggtgcttcaggaggaatccagagaagtgttcagatgccccccttgggctcctttctaattttaatcagctctttaaatagctgcccatctcctgtgattgcacaaccaagcactttgacatttgcaccttaggagaggcagatgttaaaatggaatccaaagaccacctagggcggggctgggtgggagatgggagggccaactgcgagctgctccacttctcagctctcccctgccctgcagccctgggccagacaaggccagaaggtttcaggggcatttgacatcccctcctggttctcaccaggaaaacatccaaagctttggaggaaacaggccctgcccctggctccttaaatgccccgtctctttgtaaactgatattcagccagcaatgcctaagactttgttaagatcatttctactgcttttctttctgcttcaaacacacagttcgtctctgaggaaagtaaaataaatggaataagagtaaattgggtaaggagatatccaaagctacccagtcccttgacccagcacagttggccgacccgtgtcactccctggctgtcgctgcttctctgtgctcactgaagggtgagccaggccagtgcttccccagcccctgggcctggtcactacacagtggaaaacagacaagcggccccttccccaaatcccaagagtgtcttgctgcttggtgggtgctcatcgcaatgttctgaaggctccagggccactttgtttgtaagtatgatctgggcctcaaaataccatagtagctgcttgataaaattctaaaaatatctggttctctattatgtaaacactattacagtcaccagtgtgtgaagactcttgagtctggttctcatatcagagtcatcatttttcttcctgtggaataaaatgccttgtggacttcccaaaaaaaatct

SEQ ID NO: 325079 - DNA, 3885 bp, Homo sapiens
ctttaaatcagaatttctttatctctagcatctgatgatcacagctcagagattcacagtgcaaattgaggagaaactgctcctcaagctgctaagtttctttggctacgatcaagcagaatcagaggtggaaaaatatgatgaaaacctccatgaaaagacagctgagcaaggtggaacaccaattcgatactactttgaaaatctcaaaatcagcattcctcagatcaagctaagtgtgttcacctccaacaagctcccattggatcttaaggccctaaaaagcaccttggggtttcctttgatacggtttgaagacgctgtgattaatctagatccattcactcgggtacatccctatgagaccaaggagttcatcatcaatgatatcctcaaacatttccaggaggatattctgagagccaggcggaaggacaggagcagctcttcaaactcacagacaacatacaggacgaattcttcatcgctgtggagaacattgacagctactgcgtgctcatctcctccaaagctgtttacttcctgaaaagtggagactacgtggatcgagaagccattttcctagaagtcaaatacgatgacctctaccactgccttgtctccaaagaccatgggaaggtgtatgtgcaggtgaccaagaaagccgtgagcacgagcagtggagtgtccatccccggcccctcccaccagaagcccatggtccatgtgaaatctgaggtccttgctgtcaagttgtcacaagaaataaactacgcaaagagcctctactatgaacagcagcttatgttaagactcagcgaaaaccgagagcagctggagctggactcctgaagccccgctgctgagatgggcgctcccgacacagcgcagacccaccaggaggaaagaggcccagctctcagctgacgatggaggcagaaccggagtcgggtttggggaagttgtcaaggaatgagggaaagtaaatcctcatgaggaaaagtacaaatggaaatcgtattaatttgtgaggcagggagttattttagattatgggaaataatttttaaaggtattggttaaataacgtttaaaaacatgtactgagatgaatctaatttttagattgccctgtattttgttaacatgtatatatgtacaacagtgtgtttgtaaatatataggaacgtttctgaacagggtctgtgctatgtgtaaaggtttgttaactgtaaagtaatataaagttatattggatcttctattgcactaattctagatgtctaattcaggatactgtctatagaaaggcattcttaaaagttaaagaatgttacgtcttagttttggagactaaagtattcccagtaaagtgggttgaggtgagggctgtggtcctgaaagggacgcctttgacatcgtggctgtccagttgggctgtgagctgtggcacccaggactggcgctggcccttcagaaggatctaggagaggggcttgggagcccacttttaatttctcacccccattttacaaagagtgcttagattcttacaaattatgatgtaagttatccatttggctttttcctaactagtcttaccaaacttagggggaaacctgtgctccattaccacatgggtgcaagtcagcattgtaagttttctcaggttattattattagagaggttggaaacattggtaaactctgttgattgagaaggaaaaaaaaagtcccattgaactgttgcaacaaatcagaaatccacataaaagtgctctcctgcctgggcagcaacaaccaagaacaaagccccgggactgttttctttttaataaagccacaggcaggcatcgtagctccacagcccgaggggacacaggatggaaaccccaggatgagaagggagcagggagagttccagaaagggggatgaaataggagtattaaaaagctgcgttggtaagtttttcatggaaccaagatttgacaaaggcatctcttatccttggttttaaattcctgctgggagcaaggcctggtatgagcgccctgggtcttgtttttggtgtttcgcttttctgtaaggattaagcagatagggagaagggaaaaggggcctcactttagaatgaatgagtcaccttgtgatttttaaatttttattttaataaagctaatcaatttctacaaccttgtcacatgtagctgagtctgggatgactcagtggatcagtggatgcgtggaaggttttggtgtttataactcatgacccaaatccttccaagacacaaatgaagctaatcttcttcccctccctttcctctcccacttcccctctgtgtctgtgtctgtgtgtgtgtgtgtgtgtgtgtgtgtgtgcgcgcgcgcgcgtgcatgcagagaggaaggaagggagctttagcacaagtagctacatagtgttcaaggatcagctttcttgaactccgaggcttggttgcctttgctgaactccaagttagtggattgcagaagtggaaacttggctttcgcggcactgggtgagttttagtttgtgtgtgtcttgctggggggtggtgatgattgtctcagcactcacgcactgcacaagatggcagcaggatacagcactgcacaagatggcagctcctctgcagcttcctcctcagcctccctccttgcacccccacaggtttggcttgtggtttttgtcatcagtaacctactgcctgagatcatgatctcttaaaagatgagactctcggaagggttgattgtatgcgtcagtgagccttctatcaccttctggaacaaagtcacttgaaatctcttgatgagattaaggagtttagtgttactaagaaaatctgctttgggccgcagcagtgctgggtgttctcagacctgactgaggaagttagctgcgggctgccctgtgggctgggtgcttcaggaggaatccagagaagtgttcagatgccccccttgggctcctttctaattttaatcagctctttaaatagctgcccatctcctgtgattgcacaaccaagcactttgacatttgcaccttaggagaggcagatgttaaaatggaatccaaagaccacctagggcggggctgggtgggagatgggagggccaactgcgagctgctccacttctcagctctcccctgccctgcagccctgggccagacaaggccagaaggtttcaggggcatttgacatcccctcctggttctcaccaggaaaacatccaaagctttggaggaaacaggccctgcccctggctccttaaatgccccgtctctttgtaaactgatattcagccagcaatgcctaagactttgttaagatcatttctactgcttttctttctgcttcaaacacacagttcgtctctgaggaaagtaaaataaatggaataagagtaaattgggtaaggagatatccaaagctacccagtcccttgacccagcacagttggccgacccgtgtcactccctggctgtcgctgcttctctgtgctcactgaagggtgagccaggccagtgcttccccagcccctgggcctggtcactacacagtggaaaacagacaagcggccccttccccaaatcccaagagtgtcttgctgcttggtgggtgctcatcgcaatgttctgaaggctccagggccactttgtttgtaagtatgatctgggcctcaaaataccatagtagctgcttgataaaattctaaaaatatctggttctctattatgtaaacactattacagtcaccagtgtgtgaagactcttgagtctggttctcatatcagagtcatcatttttcttcctgtggaataaaatgccttgtggacttcccaaaaaaaatct

SEQ ID NO: 325080 - DNA, 4863 bp, Homo sapiens
gctcggagcttctcgggaagctccgcctcccagggataccttgggaaaatgcttcttcctacgagtggaaattactctccgaggagctacgtataggatctcatttagtgacacagatcagttacctcctcctttccgaattgacaacttttctaaggtcccggttgtctttactcagcatggcgtagctgaacccaggctccggactgaagtgaagcccatgacttcattggattatgcctgggacgaacccaccttgccaccttttatcactctgactgttaaaggggcagggtcctctgagatcaactgcaacatgaatgatttccaggataatcggcagctttattatgaaaatttcatttacattgctgctacatatacattctctggcttgcaggagggaacaggcaggcctgtggcttccaacaaggccattacctgtgcggagctcgttttggatgtctcacccaagacacaaagagtcattttaaaaaagaaggaaccaggaaagcgttctcagctgtggaggatgacaggaacaggaatgctggcccatgagggctcctcagttcctcacaatcccaataagccctcagccgcccgctccaccgaggggtctgccatcttagatattgctggtctcgctgcagtgactgacaacagatacgagccactgatgctgagaaagcctgaccgcaggcgaagcacaactcagacgtggagtttccgagaaggaaaactgacctgtgggttacatgggttggtcgtccaggccaaaggaggactttctggtttgtttgatggagctgaagttgttcttggtcctgacacttccatggagcttttggggccagttccacctgaacaacaatttattaatcaaaaaatgagacctggttctggaatgttatccatcagagtcatcccagatggaccaactagagcactccagataacagatttctgccaccggaaaagcagccgttcatatgaagtggatgaacttcctgtcaccgaacaagagctgcagaaattaaagaatccagatacagagcaggaattggaagtgcttgtgaggttagaaggtggaattgggttgtccttaattaataaagtcccagaagaactggtctttgcaagtcttacaggaatcaatgtgcactatacacagctggcaaccagtcacatgcttgaactcagcatacaggatgtacaggtggacaatcagctcattggtaccacgcagcccttcatgctctatgtgactcccctgagcaatgagaatgaggtcatcgagaccggcccagctgtgcaagtcaacgcagtgaagttccccagtaagagtgcactgaccaacatctacaagcatctgatgatcacagctcagagattcacagtgcaaattgaggagaaactgctcctcaagctgctaagtttctttggctacgatcaagcagaatcagaggtggaaaaatatgatgaaaacctccatgaaaagacagctgagcaaggtggaacaccaattcgatactactttgaaaatctcaaaatcagcattcctcagatcaagctaagtgtgttcacctccaacaagctcccattggatcttaaggccctaaaaagcaccttggggtttcctttgatacggtttgaagacgctgtgattaatctagatccattcactcgggtacatccctatgagaccaaggagttcatcatcaatgatatcctcaaacatttccaggaggaactcctcagccaggcagctcgaatcctgggatcagtggattttcttggcaatcctatggggcttttgaatgatgtttctgaaggggttactggactgataaaatatggaaatgtcgggggcctcatcagaaatgttacacacggagtatcaaactctgctgccaagtttgctggaacattatcagatggcttagggaagacgatggacaatcggcatcagtcagagcgggagtacatcaggtaccatgcagccacaagtggtgaacaccttgtagccggcatccatggcctggctcatggtatcattggtggactgaccagtgttataacttcgacagtggaaggtgtgaaaacagaagggggtgtcagcggtttcatatctggccttggaaaagggcttgttggcactgtaaccaagccagtggcaggcgccctggattttgcatcagaaacagcccaggcggtgagagacacagccacactcagcggccccaggactcaagcacagagggttcggaaaccgcgttgctgcacggggccccaggggctgcttccccgatattctgagagccaggcggaaggacaggagcagctcttcaaactcacagacaacatacaggacgaattcttcatcgctgtggagaacattgacagctactgcgtgctcatctcctccaaagctgtttacttcctgaaaagtggagactacgtggatcgagaagccattttcctagaagtcaaatacgatgacctctaccactgccttgtctccaaagaccatgggaaggtgtatgtgcaggtgaccaagaaagccgtgagcacgagcagtggagtgtccatccccggcccctcccaccagaagcccatggtccatgtgaaatctgaggtccttgctgtcaagttgtcacaagaaataaactacgcaaagagcctctactatgaacagcagcttatgttaagactcagcgaaaaccgagagcagctggagctggactcctgaagccccgctgctgagatgggcgctcccgacacagcgcagacccaccaggaggaaagaggcccagctctcagctgacgatggaggcagaaccggagtcgggtttggggaagttgtcaaggaatgagggaaagtaaatcctcatgaggaaaagtacaaatggaaatcgtattaatttgtgaggcagggagttattttagattatgggaaataatttttaaaggtattggttaaataacgtttaaaaacatgtactgagatgaatctaatttttagattgccctgtattttgttaacatgtatatatgtacaacagtgtgtttgtaaatatataggaacgtttctgaacagggtctgtgctatgtgtaaaggtttgttaactgtaaagtaatataaagttatattggatcttctattgcactaattctagatgtctaattcaggatactgtctatagaaaggcattcttaaaagttaaagaatgttacgtcttagttttggagactaaagtattcccagtaaagtgggttgaggtgagggctgtggtcctgaaagggacgcctttgacatcgtggctgtccagttgggctgtgagctgtggcacccaggactggcgctggcccttcagaaggatctaggagaggggcttgggagcccacttttaatttctcacccccattttacaaagagtgcttagattcttacaaattatgatgtaagttatccatttggctttttcctaactagtcttaccaaacttagggggaaacctgtgctccattaccacatgggtgcaagtcagcattgtaagttttctcaggttattattattagagaggttggaaacattggtaaactctgttgattgagaaggaaaaaaaaagtcccattgaactgttgcaacaaatcagaaatccacataaaagtgctctcctgcctgggcagcaacaaccaagaacaaagccccgggactgttttctttttaataaagccacaggcaggcatcgtagctccacagcccgaggggacacaggatggaaaccccaggatgagaagggagcagggagagttccagaaagggggatgaaataggagtattaaaaagctgcgttggtaagtttttcatggaaccaagatttgacaaaggcatctcttatccttggttttaaattcctgctgggagcaaggcctggtatgagcgccctgggtcttgtttttggtgtttcgcttttctgtaaggattaagcagatagggagaagggaaaaggggcctcactttagaatgaatgagtcaccttgtgatttttaaatttttattttaataaagctaatcaatttctacaaccttgtcacatgtagctgagtctgggatgactcagtggatcagtggatgcgtggaaggttttggtgtttataactcatgacccaaatccttccaagacacaaatgaagctaatcttcttcccctccctttcctctcccacttcccctctgtgtctgtgtctgtgtgtgtgtgtgtgtgtgtgtgtgtgtgcgcgcgcgcgcgtgcatgcagagaggaaggaagggagctttagcacaagtagctacatagtgttcaaggatcagctttcttgaactccgaggcttggttgcctttgctgaactccaagttagtggattgcagaagtggaaacttggctttcgcggcactgggtgagttttagtttgtgtgtgtcttgctggggggtggtgatgattgtctcagcactcacgcactgcacaagatggcagcaggatacagcactgcacaagatggcagctcctctgcagcttcctcctcagcctccctccttgcacccccacaggtttggcttgtggtttttgtcatcagtaacctactgcctgagatcatgatctcttaaaagatgagactctcggaagggttgattgtatgcgtcagtgagccttctatcaccttctggaacaaagtcacttgaaatctcttgatgagattaaggagtttagtgttactaagaaaatctgctttgggccgcgcgagtttgaccatcagagcaatgcaaatcaaaaccacagtgaaataccatctaacaccagtcagaatgactattatt

SEQ ID NO: 325081 - DNA, 2381 bp, Homo sapiens
gttgtggttggtgtgcgggtttcggttggaggactcgttggggaggtggcctgcgcttgtagagactgcatccccgagacgatggcggagggagataatcgcagcaccaacctgctggctgcagagactgcaagtctggaagaacagctgcaaggatggggagaagtgatgctgatggctgataaagtcctccgatgggaaagagcctggtttccacctgccatcatgggtgtggtttctttggtgtttctgattatctactatctagatccatctgttctgtccggcgtttcctgttttgttatgtttttgtgcttggctgactaccttgttcccattctagcgcctagaatttttggctccaataaatggaccactgaacaacagcaaagattccatgaaatttgcagcaatctagtaaaaactcgacgcagagctgtgggttggtggaaacgcctcttcacactaaaggaagaaaaacctaagatgtacttcatgaccatgatcgtttcccttgctgcggttgcttgggtgggacaacaagtccacaacctgcttctcacctacctgatagtgacttccttactattgcttcctggactaaaccaacatggaatcattttgaagtacattggaatggccaagagggagataaacaaacttctcaaacaaaaagaaaagaaaaacgaatgattcatctgctttaatcagtgtgattaatgcagcacccattgccccgggaaccgtttctgctgtactatctggatactaaaatgttacggaagtagctctttgttctccctcactctgcccttagttaatagaaattcagactcgccaagtaaggcttcgtgcatagtgtcttcatgtcgcgtatagttgagcgcgttcttagcagttggcttcatggacaactcattagtgttttgacttttcttacccagcgttaattgaattcttgcttttagacaacttcctttttgtagtggtgaaccttgccctttagtacagttcaagtgaatctggataattgttcatctttgctttagcttagataccatgtagtggtctgtggctacaggaagctggttctgtctgcttccacagtctgcttaaaaaactgtctgacttcgtgaatatagagaccaagtttaccacttctgatgaagagaccaattaagattcattcctcattctgtttctttccagtgggagaagagtccccatgaaataagatgaaactgattccatgcactagtacatgtaggcttctcccttgtgcaaagcttagcaatttgtaggaaactttgatctttttgtccaagaaaaggaatgtctgacaggcttaagctttcgtccccttgcacttagactcgaagttagtaaatccttaaaggctttttaatagcagacttccaaaagattgcatttaggatttctagcatgcttttaatttcagattttcagctgacattagctatagtatacagtaggttaagactcatgtctatgactttcactctaagactggcaaaaggacagcagtcttctatgtttagtcaatattcatttcagtagaagataatcttatctaatttttgagaccagaataagccttttaaggtaaacctcaaaattatcattttatggtaatactgaccattttagtcccctaggtttgacatgggagatagtgactacactggtgtctgacttttttcctagagatttctccctgaaaaatacaagggctgttggtgagagcagacttgaggtgatgatagttggcctctggtctacaaagatttcataactccttggaaagcttcttataatcattcttaacttcttggtagctagaaatttagagtagttgaaatctttaggaatgaacttctgagggccaaaaaatgtgactgacgggaacaattcttaaactgattaactagctgtaatatagttttgtgaatttattgcactgatgttgtaccttgtggtatatctgtccctattaaataagtgttgttttctcctctttaatattgctgtgaacagtggtgcccattgtagcatatgtttgatttttttttattatttcataagaaaactacgttaattttaccttactttcattgtaaataagcctgtcttcctatctggattttttgtgtgcatacatattctactgattaactacttttgcagttttaatcctgtattatttcttctactttgttttgtgtaaaaggggaaaaaataaaaaaagctggaatcttaaaaaaacaacaacacacacaaaaacaaacacatttttgggcgcatgtggcccacagaaagcttagaaccactcgtggcggcgggggcccctgtgggaagaacag

SEQ ID NO: 325082 - DNA, 2284 bp, Homo sapiens
gttgtggttggtgtgcgggtttcggttggaggactcgttggggaggtggcctgcgcttgtagagactgcatccccgagacgatggcggagggagataatcgcagcaccaacctgctggctgcagagactgcaagtctggaagaacagctgcaaggatggggagaagtgatgctgatggctgataaagtcctccgatgggaaagagcctggtttccacctgccatcatgggtgtggtttctttggtgtttctgattatctactatctagatccatctgttctgtccggcgtttcctgttttgttatgtttttgtgcttggctgactaccttgttcccattctagcgcctagaatttttggctccaataaatggaccactgaacaacagcaaagattccatgaaatttgcagcaatctagtaaaaactcgacgcagagctgtgggttggtggaaacgcctcttcacactaaaggaagaaaaacctaagatgtacttcatgaccatgatcgtttcccttgctgcggttgcttgggtgggacaacaagtccacaacctgcttctcacctacctgatagtgacttccttactattgcttcctggactaaaccaacatggaatcattttgaagtacattggaatggccaagagggagataaacaaacttctcaaacaaaaagaaaagaaaaacgaatgattcatctgctttaatcagtgtgattaatgcagcacccattgccccgggaaccgtttctgctgtactatctggatactaaaatgttacggaagtagctctttgttctccctcactctgcccttagttaatagaaattcagactcgccaagtaaggcttcgtgcatagtgtcttcatgtcgcgtatagttgagcgcgttcttagcagttggcttcatggacaactcattagtgttttgacttttcttacccagcgttaattgaattcttgcttttagacaacttcctttttgtagtggtgaaccttgccctttagtacagttcaagtgaatctggataattgttcatctttgctttagcttagataccatgtagtggtctgtggctacaggaagctggttctgtctgcttccacagtctgcttaaaaaactgtctgacttcgtgaatatagagaccaagtttaccacttctgatgaagagaccaattaagattcattcctcattctgtttctttccagtgggagaagagtccccatgaaataagatgaaactgattccatgcactagtacatgtaggcttctcccttgtgcaaagcttagcaatttgtaggaaactttgatctttttgtccaagaaaaggaatgtctgacaggcttaagctttcgtccccttgcacttagactcgaagttagtaaatccttaaaggctttttaatagcagacttccaaaagattgcatttaggatttctagcatgcttttaatttcagattttcagctgacattagctatagtatacagtaggttaagactcatgtctatgactttcactctaagactggcaaaaggacagcagtcttctatgtttagtcaatattcatttcagtagaagataatcttatctaatttttgagaccagaataagccttttaaggtaaacctcaaaattatcattttatggtaatactgaccattttagtcccctaggtttgacatgggagatagtgactacactggtgtctgacttttttcctagagatttctccctgaaaaatacaagggctgttggtgagagcagacttgaggtgatgatagttggcctctggtctacaaagatttcataactccttggaaagcttcttataatcattcttaacttcttggtagctagaaatttagagtagttgaaatctttaggaatgaacttctgagggccaaaaaatgtgactgacgggaacaattcttaaactgattaactagctgtaatatagttttgtgaatttattgcactgatgttgtaccttgtggtatatctgtccctattaaataagtgttgttttctcctctttaatattgctgtgaacagtggtgcccattgtagcatatgtttgatttttttttattatttcataagaaaactacgttaattttaccttactttcattgtaaataagcctgtcttcctatctggattttttgtgtgcatacatattctactgattaactacttttgcagttttaatcctgtattatttcttctactttgttttgtgtaaaaggggactgaagctgtctttgggagccgttgcattccg

SEQ ID NO: 325083 - DNA, 600 bp, Homo sapiens
actcgctattcatcggcacctcgctattcatcggcacttcgctattcatcggcacctcgctattcatcggcacttcgctattcatcggcacccttgaggtgatgatagttggcctctggtctacaaagatttcataactccttggaaagcttcttataatcattcttaacttcttggtagctagaaatttagagtagttgaaatctttaggaatgaacttctgagggccaaaaaatgtgactgacgggaacaattcttaaactgattaactagctgtaatatagttttgtgaatttattgcactgatgttgtaccttgtggtatatctgtccctattaaataagtgttgttttctcctctttaatattgctgtgaacagtggtgcccattgtagcatatgtttgatttttttttattatttcataagaaaactacgttaattttaccttactttcattgtaaataagcctgtcttcctatctggattttttgtgtgcatacatattctactgattaactacttttgcagttttaatcctgtattatttcttctactttgttttgtgtaaaaggggaaaaaataaaaaaagctggaatctt

SEQ ID NO: 325084 - DNA, 2328 bp, Homo sapiens
gttgtggttggtgtgcgggtttcggttggaggactcgttggggaggtggcctgcgcttgtagagactgcatccccgagacgatggcggagggagataatcgcagcaccaacctgctggctgcagagactgcaagtctggaagaacagctgcaaggatggggagaagtgatgctgatggctgataaagtcctccgatgggaaagagcctggtttccacctgccatcatgggtgtggtttctttggtgtttctgattatctactatctagatccatctgttctgtccggcgtttcctgttttgttatgtttttgtgcttggctgactaccttgttcccattctagcgcctagaatttttggctccaataaatggaccactgaacaacagcaaagattccatgaaatttgcagcaatctagtaaaaactcgacgcagagctgtgggttggtggaaacgcctcttcacactaaaggaagaaaaacctaagatgtacttcatgaccatgatcgtttcccttgctgcggttgcttgggtgggacaacaagtccacaacctgcttctcacctacctgatagtgacttccttactattgcttcctggactaaaccaacatggaatcattttgaagtacattggaatggccaagagggagataaacaaacttctcaaacaaaaagaaaagaaaaacgaatgattcatctgctttaatcagtgtgattaatgcagcacccattgccccgggaaccgtttctgctgtactatctggatactaaaatgttacggaagtagctctttgttctccctcactctgcccttagttaatagaaattcagactcgccaagtaaggcttcgtgcatagtgtcttcatgtcgcgtatagttgagcgcgttcttagcagttggcttcatggacaactcattagtgttttgacttttcttacccagcgttaattgaattcttgcttttagacaacttcctttttgtagtggtgaaccttgccctttagtacagttcaagtgaatctggataattgttcatctttgctttagcttagataccatgtagtggtctgtggctacaggaagctggttctgtctgcttccacagtctgcttaaaaaactgtctgacttcgtgaatatagagaccaagtttaccacttctgatgaagagaccaattaagattcattcctcattctgtttctttccagtgggagaagagtccccatgaaataagatgaaactgattccatgcactagtacatgtaggcttctcccttgtgcaaagcttagcaatttgtaggaaactttgatctttttgtccaagaaaaggaatgtctgacaggcttaagctttcgtccccttgcacttagactcgaagttagtaaatccttaaaggctttttaatagcagacttccaaaagattgcatttaggatttctagcatgcttttaatttcagattttcagctgacattagctatagtatacagtaggttaagactcatgtctatgactttcactctaagactggcaaaaggacagcagtcttctatgtttagtcaatattcatttcagtagaagataatcttatctaatttttgagaccagaataagccttttaaggtaaacctcaaaattatcattttatggtaatactgaccattttagtcccctaggtttgacatgggagatagtgactacactggtgtctgacttttttcctagagatttctccctgaaaaatacaagggctgttggtgagagcagacttgaggtgatgatagttggcctctggtctacaaagatttcataactccttggaaagcttcttataatcattcttaacttcttggtagctagaaatttagagtagttgaaatctttaggaatgaacttctgagggccaattttgtgaatttattgcactgatgttgtaccttgtggtatatctgtccctattaaataagtgttgttttctcctctttaatattgctgtgaacagtggtgcccattgtagcatatgtttgatttttttttattatttcataagaaaactacgttaattttaccttactttcattgtaaataagcctgtcttcctatctggattttttgtgtgcatacatattctactgattaactacttttgcagttttaatcctgtattatttcttctactttgttttgtgtaaaaggggaaaaaataaaaaaagctggaatcttaaaaaaacaacaacacacacaaaaacaaacacatttttgggcgcatgtggcccacagaaagcttagaaccactcgtggcggcgggggcccctgtgggaagaacag

SEQ ID NO: 325085 - DNA, 2276 bp, Homo sapiens
gttgtggttggtgtgcgggtttcggttggaggactcgttggggaggtggcctgcgcttgtagagactgcatccccgagacgatggcggagggagataatcgcagcaccaacctgctggctgcagagactgcaagtctggaagaacagctgcaaggatggggagaagtgatgctgatggctgataaagtcctccgatgggaaagagcctggtttccacctgccatcatgggtgtggtttctttggtgtttctgattatctactatctagatccatctgttctgtccggcgtttcctgttttgttatgtttttgtgcttggctgactaccttgttcccattctagcgcctagaatttttggctccaataaatggaccactgaacaacagcaaagattccatgaaatttgcagcaatctagtaaaaactcgacgcagagctgtgggttggtggaaacgcctcttcacactaaaggaagaaaaacctaagatgtacttcatgaccatgatcgtttcccttgctgcggttgcttgggtgggacaacaagtccacaacctgcttctcacctacctgatagtgacttccttactattgcttcctggactaaaccaacatggaatcattttgaagtacattggaatggccaagagggagataaacaaacttctcaaacaaaaagaaaagaaaaacgaatgattcatctgctttaatcagtgtgattaatgcagcacccattgccccgggaaccgtttctgctgtactatctggatactaaaatgttacggaagtagctctttgttctccctcactctgcccttagttaatagaaattcagactcgccaagtaaggcttcgtgcatagtgtcttcatgtcgcgtatagttgagcgcgttcttagcagttggcttcatggacaactcattagtgttttgacttttcttacccagcgttaattgaattcttgcttttagacaacttcctttttgtagtggtgaaccttgccctttagtacagttcaagtgaatctggataattgttcatctttgctttagcttagataccatgtagtggtctgtggctacaggaagctggttctgtctgcttccacagtctgcttaaaaaactgtctgacttcgtgaatatagagaccaagtttaccacttctgatgaagagaccaattaagattcattcctcattctgtttctttccagtgggagaagagtccccatgaaataagatgaaactgattccatgcactagtacatgtaggcttctcccttgtgcaaagcttagcaatttgtaggaaactttgatctttttgtccaagaaaaggaatgtctgacaggcttaagctttcgtccccttgcacttagactcgaagttagtaaatccttaaaggctttttaatagcagacttccaaaagattgcatttaggatttctagcatgcttttaatttcagattttcagctgacattagctatagtatacagtaggttaagactcatgtctatgactttcactctaagactggcaaaaggacagcagtcttctatgtttagtcaatattcatttcagtagaagataatcttatctaatttttgagaccagaataagccttttaaggtaaacctcaaaattatcattttatggtaatactgaccattttagtcccctaggtttgacatgggagatagtgactacactggtgtctgacttttttcctagagatttctccctgaaaaatacaagggctgttggtgagagcagacttgaggtgatgatagttggcctctggtctacaaagatttcataactccttggaaagcttcttataatcattcttaacttcttggtagctagaaatttagagtagttgaaatctttaggaatgaacttctgagggccaaaaaatgtgactgacgggaacaattcttaaactgattaactagctgtaatatagttttgtgaatttattgcactgatgttgtaccttgtggtatatctgtccctattaaataagtgttgttttctcctctttaatattgctgtgaacagtggtgcccattgtagcatatgtttgatttttttttattatttcataagaaaactacgttaattttaccttactttcattgtaaataagcctgtcttcctatctggattttttgtgtgcatacatattctactgattaactacttttgcagttttaatcctgtattatttcttctactttgttttgtgtaaaaggggaaaaaataaaaaaagctggaatctt

SEQ ID NO: 325086 - DNA, 914 bp, Homo sapiens
  misc_feature (822)..(822): n is a, c, g, or t
  misc_feature (846)..(846): n is a, c, g, or t
  misc_feature (855)..(855): n is a, c, g, or t
  misc_feature (898)..(898): n is a, c, g, or t
gttgtggttggtgtgcgggtttcggttggaggactcgttggggaggtggcctgcgcttgtagagactgcatccccgagacgatggcggagggagataatcgcagcaccaacctgctggctgcagagactgcaagtctggaagaacagctgcaaggatggggagaagtgatgctgatggctgataaagtcctccgatgggaaagagcctggtttccacctgccatcatgggtgtggtttctttggtgtttctgattatctactatctagatccatctgttctgtccggcgtttcctgttttgttatgtttttgtgcttggctgactaccttgttcccattctagcgcctagaatttttggctccaataaatggaccactgaacaacagcaaagattccatgaaatttgcagcaatctagtaaaaactcgacgcagagctgtgggttggtggaaacgcctcttcacactaaaggaagaaaaacctaagatgtacttcatgaccatgatcgtttcccttgctgcggttgcttgggtgggacaacaagtccacaacctgcttctcacctacctgatagtgacttccttactattgcttcctggactaaaccaacatggaatcattttgaagtacattggaatggccaagagggagataaacaaacttctcaaacaaaaagaaaagaaaaacgaatgattcatctgctttaatcagtgtgattaatgcagcacccattgccccgggaaccgtttctgctgtactatctggatactaaaatgttacggaagtagctctttgttctccctcactctgcccttagttaantagggaattccaaactccccccanttaagggcntccctggccataaattgttcttccatgttcccgttataatttnaaacccccttccttaa

SEQ ID NO: 325087 - DNA, 2191 bp, Homo sapiens
gttgtggttggtgtgcgggtttcggttggaggactcgttggggaggtggcctgcgcttgtagagactgcatccccgagacgatggcggagggagataatcgcagcaccaacctgctggctgcagagactgcaagtctggaagaacagctgcaaggatggggagaagtgatgctgatggctgataaagtcctccgatgggaaagagcctggtttccacctgccatcatgggtgtggtttctttggtgtttctgattatctactatctagatccatctgttctgtccggcgtttcctgttttgttatgtttttgtgcttggctgactaccttgttcccattctagcgcctagaatttttggctccaataaatggaccactgaacaacagcaaagattccatgaaatttgcagcaatctagtaaaaactcgacgcagagctgtgggttggtggaaacgcctcttcacactaaaggaagaaaaacctaagatgtacttcatgaccatgatcgtttcccttgctgcggttgcttgggtgggacaacaagtccacaacctgcttctcacctacctgatagtgacttccttactattgcttcctggactaaaccaacatggaatcattttgaagtacattggaatggccaagagggagataaacaaacttctcaaacaaaaagaaaagaaaaacgaatgattcatctgctttaatcagtgtgattaatgcagcacccattgccccgggaaccgtttctgctgtactatctggatactaaaatgttacggaagtagctctttgttctccctcactctgcccttagttaatagaaattcagactcgccaagtaaggcttcgtgcatagtgtcttcatgtcgcgtatagttgagcgcgttcttagcagttggcttcatggacaactcattagtgttttgacttttcttacccagcgttaattgaattcttgcttttagacaacttcctttttgtagtggtgaaccttgccctttagtacagttcaagtgaatctggataattgttcatctttgctttagcttagataccatgtagtggtctgtggctacaggaagctggttctgtctgcttccacagtctgcttaaaaaactgtctgacttcgtgaatatagagaccaagtttaccacttctgatgaagagaccaattaagattcattcctcattctgtttctttccagtgggagaagagtccccatgaaataagatgaaactgattccatgcactagtacatgtaggcttctcccttgtgcaaagcttagcaatttgtaggaaactttgatctttttgtccaagaaaaggaatgtctgacaggcttaagctttcgtccccttgcacttagactcgaagttagtaaatccttaaaggctttttaatagcagacttccaaaagattgcatttaggatttctagcatgcttttaatttcagattttcagctgacattagctatagtatacagtaggttaagactcatgtctatgactttcactctaagactggcaaaaggacagcagtcttctatgtttagtcaatattcatttcagtagaagataatcttatctaatttttgagaccagaataagccttttaaggtaaacctcaaaattatcattttatggtaatactgaccattttagtcccctaggtttgacatgggagatagtgactacactggtgtctgacttttttcctagagatttctccctgaaaaatacaagggctgttggtgagagcagacttgaggtgatgatagttggcctctggtctacaaagatttcataactccttggaaagcttcttataatcattcttaacttcttggtagctagaaatttagagtagttgaaatctttaggaatgaacttctgagggccaaaaaatgtgactgacgggaacaattcttaaactgattaactagctgtaatatagttttgtgaatttattgcactgatgttgtaccttgtggtatatctgtccctattaaataagtgttgttttctcctctttaatattgctgtgaacagtggtgcccattgttcacagcaatattaaataagtgttgttttctcctctttaatattgctgtgaacagtggtgcccattgtagcatatgtttgattttttttcttatgaaataataaaaaactagttctagatcgc

SEQ ID NO: 325088 - DNA, 1259 bp, Homo sapiens
agtcactagcagaaaacaccaaatcaaccataggtccaagaacaattgtctctggacggcagctatgcgactcaccgtgctgtgtgctgtgtgcctgctgcctggcagcctggccctgccgctgcctcaggaggcgggaggcatgagtgagctacagtgggaacaggctcaggactatctcaagagattttatctctatgactcagaaacaaaaaatgccaacagtttagaagccaaactcaaggagatgcaaaaattctttggcctacctataactggaatgttaaactcccgcgtcatagaaataatgcagaagcccagatgtggagtgccagatgttgcagaatactcactatttccaaatagcccaaaatggacttccaaagtggtcacctacaggatcgtatcatatactcgagacttaccgcatattacagtggatcgattagtgtcaaaggctttaaacatgtggggcaaagagatccccctgcatttcaggaaagttgtatggggaactgctgacatcatgattggctttgcgcgaggagctcatggggactcctacccatttgatgggccaggaaacacgctggctcatgcctttgcgcctgggacaggtctcggaggagatgctcacttcgatgaggatgaacgctggacggatggtagcagtctagggattaacttcctgtatgctgcaactcatgaacttggccattctttgggtatgggacattcctctgatcctaatgcagtgatgtatccaacctatggaaatggagatccccaaaattttaaactttcccaggatgatattaaaggcattcagaaactatatggaaagagaagtaattcaagaaagaaatagaaacttcaggcagaacatccattcattcattcattggattgtatatcattgttgcacaatcagaattgataagcactgttcctccactccatttagcaattatgtcacccttttttattgcagttggtttttgaatgtctttcactccttttaaggataaactcctttatggtgtgactgtgtcttattcatctatacttgcagtgggtagatgtcaataaatgttacatacacaaataaataaaatgtttattccatggtaaatttaaaaaaaaaaaaaaaaaaaaacaaaggggggggggaaaaaatacccggggggcaaattaggggaccggtttttgtaaaggggccaaagggaggaaaaaaaaggagggggggaaaaaggggggga

SEQ ID NO: 325089 - DNA, 750 bp, Homo sapiens
agcactgtgagtcgcatagctgccgtccagagaccattgttcttggacctatggttgatttggtgtcaaaggctttaaacatgtggggcaaagagatccccctgcatttcaggaaagttgtatggggaactgctgacatcatgattggctttgcgcgaggagctcatggggactcctacccatttgatgggccaggaaacacgctggctcatgcctttgcgcctgggacaggtctcggaggagatgctcacttcgatgaggatgaacgctggacggatggtagcagtctagggattaacttcctgtatgctgcaactcatgaacttggccattctttgggtatgggacattcctctgatcctaatgcagtgatgtatccaacctatggaaatggagatccccaaaattttaaactttcccaggatgatattaaaggcattcagaaactatatggaaagagaagtaattcaagaaagaaatagaaacttcaggcagaacatccattcattcattcattggattgtatatcattgttgcacaatcagaattgataagcactgttcctccactccatttagcaattatgtcacccttttttattgcagttggtttttgaatgtctttcactccttttaaggataaactcctttatggtgtgactgtgtcttattcatctatacttgcagtgggtagatgtcaataaatgttacatacacaaataaataaaatgtttattccatggtaaattta

SEQ ID NO: 325090 - DNA, 681 bp, Homo sapiens
ttaggttgtggaaacaccgctaccctggatttcaaggcaaagtcgtagttgggtgtaactgctgacatcatgatcaggctttgcgcgaggtagctcatggggactcctacccatttgatgggccaggaaacacgctggctcatgcctttgcgcctgggacaggtctcggaggagatgctcacttcgatgaggatgaacgctggacggatggtagcagtctagggattaacttcctgtatgctgcaactcatgaacttggccattctttgggtatgggacattcctctgatcctaatgcagtgatgtatccaacctatggaaatggagatccccaaaattttaaactttcccaggatgatattaaaggcattcagaaactatatggaaagagaagtaattcaagaaagaaatagaaacttcaggcagaacatccattcattcattcattggattgtatatcattgttgcacaatcagaattgataagcactgttcctccactccatttagcaattatgtcacccttttttattgcagttggtttttgaatgtctttcactccttttaaggataaactcctttatggtgtgactgtgtcttattcatctatacttgcagtgggtagatgtcaataaatgttacatacacaaataaataaaatgtttattccatggtaaattta

SEQ ID NO: 325091 - DNA, 731 bp, Homo sapiens
ctagaggatcctcggaggagcaatagagatttcgattttgtttcaagttttacctatgtgaaatatgtgtagtggatacacagacagtaagaattgatcgtttggggaagatgcaggatataccaaaagggttctgcttatttatgatggcatccactatgatccacttcagcgtaacttccctgatccagatacacctcctctgaccattttctcctctctgcgtttcaaacgcagagaggatgaacgctggacggatggtagcagtctagggattaacttcctgtatgctgcaactcatgaacttggccattctttgggtatgggacattcctctgatcctaatgcagtgatgtatccaacctatggaaatggagatccccaaaattttaaactttcccaggatgatattaaaggcattcagaaactatatggaaagagaagtaattcaagaaagaaatagaaacttcaggcagaacatccattcattcattcattggattgtatatcattgttgcacaatcagaattgataagcactgttcctccactccatttagcaattatgtcacccttttttattgcagttggtttttgaatgtctttcactccttttaaggataaactcctttatggtgtgactgtgtcttattcatctatacttgcagtgggtagatgtcaataaatgttacatacacaaataaataaaatgtttattccatggtaaattta

SEQ ID NO: 325092 - DNA, 1136 bp, Homo sapiens
agtcactagcagaaaacaccaaatcaaccataggtccaagaacaattgtctctggacggcagctatgcgactcaccgtgctgtgtgctgtgtgcctgctgcctggcagcctggccctgccgctgcctcaggaggcgggaggcatgagtgagctacagtgggaacaggctcaggactatctcaagagattttatctctatgactcagaaacaaaaaatgccaacagtttagaagccaaactcaaggagatgcaaaaattctttggcctacctataactggaatgttaaactcccgcgtcatagaaataatgcagaagcccagatgtggagtgccagatgttgcagaatactcactatttccaaatagcccaaaatggacttccaaagtggtcacctacaggatcgtatcatatactcgagacttaccgcatattacagtggatcgattagtgtcaaaggctttaaacatgtggggcaaagagatccccctgcatttcaggaaagttgtatggggaactgctgacatcatgattggctttgcgcgaggagctcatggggactcctacccatttgatgggccaggaaacacgctggctcatgcctttgcgcctgggacaggtctcggaggagatgctcacttcgatgaggatgaacgctggacggatggtagcagtctagggattaacttcctgtatgctgcaactcatgaacttggccattctttgggtatgggacattcctctgatcctaatgcagtgatgtatccaacctatggaaatggagatccccaaaattttaaactttcccaggatgatattaaaggcattcagaaactatatggaaagagaagtaattcaagaaagaaatagaaacttcaggcagaacatccattcattcattcattggattgtatatcattgttgcacaatcagaattgataagcactgttcctccactccatttagcaattatgtcacccttttttattgcagttggtttttgaatgtctttcactccttttaaggataaactcctttatggtgtgactgtgtcttattcatctatacttgcagtgggtagatgtcaataaatgttacatacacaaataaataaaatgtttattccatggtaaattta

SEQ ID NO: 325093 - DNA, 1121 bp, Homo sapiens
  misc_feature (1105)..(1106): n is a, c, g, or t
agtcactagcagaaaacaccaaatcaaccataggtccaagaacaattgtctctggacggcagctatgcgactcaccgtgctgtgtgctgtgtgcctgctgcctggcagcctggccctgccgctgcctcaggaggcgggaggcatgagtgagctacagtgggaacaggctcaggactatctcaagagattttatctctatgactcagaaacaaaaaatgccaacagtttagaagccaaactcaaggagatgcaaaaattctttggcctacctataactggaatgttaaactcccgcgtcatagaaataatgcagaagcccagatgtggagtgccagatgttgcagaatactcactatttccaaatagcccaaaatggacttccaaagtggtcacctacaggatcgtatcatatactcgagacttaccgcatattacagtggatcgattagtgtcaaaggctttaaacatgtggggcaaagagatccccctgcatttcaggaaagttgtatggggaactgctgacatcatgattggctttgcgcgaggagctcatggggactcctacccatttgatgggccaggaaacacgctggctcatgcctttgcgcctgggacaggtctcggaggagatgctcacttcgatgaggatgaacgctggacggatggtagcagtctagggattaacttcctgtatgctgcaactcatgaacttggccattctttgggtatgggacattcctctgatcctaatgcagtgatgtatccaacctatggaaatggagatccccaaaattttaaactttcccaggatgatattaaaggcattcagaaactatatggaaagagaagtaattcaagaaagaaatagaaacttcaggcagaacatccattcattcattcattggattgtatatcattgttgcacaatcagaattgataagcactgttcctccactccatttagcaattatgtcacccttttttattgcagttggtttttgaatgtctttcactccttttaaggataaactcctttatggtgtgactgtgtcttattcatctatacttgcagtgggtagatgtcaataaatgttacatacgcccnngtagcaggtcagcct

SEQ ID NO: 325094 - DNA, 1082 bp, Homo sapiens
agtcactagcagaaaacaccaaatcaaccataggtccaagaacaattgtctctggacggcagctatgcgactcaccgtgctgtgtgctgtgtgcctgctgcctggcagcctggccctgccgctgcctcaggaggcgggaggcatgagtgagctacagtgggaacaggctcaggactatctcaagagattttatctctatgactcagaaacaaaaaatgccaacagtttagaagccaaactcaaggagatgcaaaaattctttggcctacctataactggaatgttaaactcccgcgtcatagaaataatgcagaagcccagatgtggagtgccagatgttgcagaatactcactatttccaaatagcccaaaatggacttccaaagtggtcacctacaggatcgtatcatatactcgagacttaccgcatattacagtggatcgattagtgtcaaaggctttaaacatgtggggcaaagagatccccctgcatttcaggaaagttgtatggggaactgctgacatcatgattggctttgcgcgaggagctcatggggactcctacccatttgatgggccaggaaacacgctggctcatgcctttgcgcctgggacaggtctcggaggagatgctcacttcgatgaggatgaacgctggacggatggtagcagtctagggattaacttcctgtatgctgcaactcatgaacttggccattctttgggtatgggacattcctctgatcctaatgcagatgatattaaaggcattcagaaactatatggaaagagaagtaattcaagaaagaaatagaaacttcaggcagaacatccattcattcattcattggattgtatatcattgttgcacaatcagaattgataagcactgttcctccactccatttagcaattatgtcacccttttttattgcagttggtttttgaatgtctttcactccttttaaggataaactcctttatggtgtgactgtgtcttattcatctatacttgcagtgggtagatgtcaataaatgttacatacacaaataaataaaatgtttattccatggtaaattta

SEQ ID NO: 325095 - DNA, 271 bp, Homo sapiens
gaaggaaggaaggaaggaaggaaggaaggaaggaaggaaggaagagagggagggaggaaggaaggaggaaggaaggaagagagggagggaggaaggaagagaggaagggagagaggaagaaagggagggaaggataaaggaaagaactagttttaacttcaaaatttattccttgcaaaaaatagacataaccagttaagataattcattttttttttttgagacagaatcttgctctgccgcccaggctggactgcagtggatgtcgacg

SEQ ID NO: 325096 - DNA, 485 bp, Homo sapiens
tgcattttgtccaattctttgttcaaaatgccaagaacctggaggactcatcgtcaaggccctccttcaccagtaacagaaggagaaaaaacaacaatggaatttaccacagcttaaggaccaaatcttcacctgagtttcaagaaccttgtaagcctcaaagattctcattattggaaatcagagtaaaactcgttttcaaataataataatatggtacttcttgctcccaaggtttagggagcaaaaacttgttcattaaatacataaattattcttagtacactgtaaaaggctttctgtctgagtatggcgtgggttttatctgtacatgaaaacaaccttacaacttcagagatttgaaatggacaaactgaagtgttttctcttgtgatcaaaaaaaaaaaaagagtaaaatggcaccattatggtgtatatcaaaaataaaaaaaatttctgtcaacttgtatagaataaattatata

SEQ ID NO: 325097 - DNA, 959 bp, Homo sapiens
ctgaattgtacatcatcttggtgattattccttgtcagtccacagaaagcatcttcactgttttcctcagccgtaatggtagacggagtgactttaagcaaatgtagatataaaggctcatcgtggagaagtttccacagctagggtgatgggtcaagctgaactgatgaacaagaatggagtgggatagaagattctgcatccactggggctcccaaaccatttgcacagatcattttgcccgtggctgggtctggacttcataagaagcttcttctggggtaggtgagagtggatgaccaggactccaccaccctgccgagtcctctcatttccatttggcttccccaggctccctcaacctcctggtgcggtcccggaacaaaggggctctggacacgcacgcctggtctctcagtggcaataagggcaatgtgtggcagcaggcccatgtgcccatcagccccagtgggcccttccagattatttttgagggggttcgaggcccgggctacctgggggatattgccatagatgacgtcacactgaagaagggggagtgtccccggaagcagacggatcccaataaagtggtggtgatgccgggcagtggagccccctgccagtccagcccacagctgtgggggcccatggccatcttcctcttggcgttgcagagatgatgagagctgtgtggccacccccccaaccttgcccccggcacaccaaagtgtccacattgtaccaaagactgacccccgccagctggggtgcccaggggcagggccggcccgccagggagggggcctgcattggctgcaaggatgagcagagaacaaggacagaggccaggcactgaggccctggagacagctgttccacttgcacacacgcacacactcatgctcacacacacagagatatattaaagcacaagtttctatctgaaaaaaaagcac

SEQ ID NO: 325098 - DNA, 456 bp, Homo sapiens
agtaacagtgccgacctgcctgccacttcctgcccctgccagagctgaccagagccctggcctgtctcctctttctcccctgttgcagtggtggtgatgccgggcagtggagccccctgccagtccagcccacagctgtgggggcccatggccatcttcctcttggcgttgcagagatgatgagagctgtgtggccacccccccaaccttgcccccggcacaccaaagtgtccacattgtaccaaagactgacccccgccagctggggtgcccaggggcagggccggcccgccagggagggggcctgcattggctgcaaggatgagcagagaacaaggacagaggccaggcactgaggccctggagacagctgttccacttgcacacacgcacacactcatgctcacacacacagagatatattaaagcacaagtttctatctgaaaaaaaagcac

SEQ ID NO: 325099 - DNA, 436 bp, Homo sapiens
ctgaattgtacatcatcttggtgattattccttgtcagtccacagaaagcatcttcactgttttcctcagccgtaatggtagacggagtgactttaagcaaatgtagatataaaggctcatcgtggagaagtttccacagctagggtgatgggtcaagctgaactgatgaacaagaatggagtgggatagaagattctgcatccactggggctcccaaaccatttgcacagatcattttgcccgtggctgggtctggacttcataagaagcttcttctggggtaggtgagagtggatgaccaggactccaccaccctgccgagtcctctcatttccatttggcttccccaggtaggacaaccagttcatttgggtttactcccatctttcctaattttagcactggctatgttttatgtggtgaataaagctagcc

SEQ ID NO: 325100 - DNA, 961 bp, Homo sapiens
  misc_feature (50)..(50): n is a, c, g, or t
aggctcccgagtacgccacgtggcgccacgtggacagagcccgtcaactnctccgaacctttcagacaacacctgccactttgaggatgagaagatctgtggctatacccaggacctgacagacaactttgactggacgcggcagaatgccctcacccagaaccccaaacgctcccccaacactggtccccccaccgacataagtggcacccctgagggctactacatgttcatcgagacatcgaggcctcgggagctgggggaccgtgcaaggttagtgagtcccctctacaatgccagcgccaagttctactgtgtctccttcttctaccacatgtacgggaaacacatcggctccctcaacctcctggtgcggtcccggaacaaaggggctctggacacgcacgcctggtctctcagtggcaataagggcaatgtgtggcagcaggcccatgtgcccatcagccccagtgggcccttccagattatttttgagggggttcgaggcccgggctacctgggggatattgccatagatgacgtcacactgaagaagggggagtgtccccggaagcagacggatcccaataaagtggtggtgatgccgggcagtggagccccctgccagtccagcccacagctgtgggggcccatggccatcttcctcttggcgttgcagagatgatgagagctgtgtggccacccccccaaccttgcccccggcacaccaaagtgtccacattgtaccaaagactgacccccgccagctggggtgcccaggggcagggccggcccgccagggagggggcctgcattggctgcaaggatgagcagagaacaaggacagaggccaggcactgaggccctggagacagctgttccacttgcacacacgcacacactcatgctcacacacacagagatatattaaagcacaagtttctatctgaaaaaaaagcac

SEQ ID NO: 325101 - DNA, 831 bp, Homo sapiens
  misc_feature (50)..(50): n is a, c, g, or t
aggctcccgagtacgccacgtggcgccacgtggacagagcccgtcaactnctccgaacctttcagacaacacctgccactttgaggatgagaagatctgtggctatacccaggacctgacagacaactttgactggacgcggcagaatgccctcacccagaaccccaaacgctcccccaacactggtccccccaccgacataagtggcacccctgagggctactacatgttcatcgagacatcgaggcctcgggagctgggggaccgtgcaaggttagtgagtcccctctacaatgccagcgccaagttctactgtgtctccttcttctaccacatgtacgggaaacacatcggctccctcaacctcctggtgcggtcccggaacaaaggggctctggacacgcacgcctggtctctcagtggcaataagggcaatgtgtggcagcaggcccatgtgcccatcagccccagtgggcccttccagattatttttgagggggttcgaggcccgggctacctgggggatattgccatagatgacgtcacactgaagaagggggagtgtccccggaagcagacggatcccaataaaggtgcaagacgggaaggaggtgggggagctgaatctggagggagctgtgcgtggcgggggttcctgtctgttgagggagggtgtttgggtctgaataggggttcagaatgtctgagtgatgggaatcatgtggctctgactgtgtgaaggtgtgccccacactcactcaggctgtgtacttgtgtaaacaatgagaagcctggcccccaccctcgtgatgagcatactgacctgttcac

SEQ ID NO: 325102 - DNA, 456 bp, Homo sapiens
tatgaaagtaaagttgctgaaatggggctacgtccctgatgcccttgcaggaagaggtatctactgtgcaggctatgtggaggtctaaacactagacagaggatagtgtctcctgctggctggcccaagcctatagctgatgataggtaacatctttttgagtgccacctggagttagtgccaggtaccttgtgattttttcatggattatttcatttaactcttataacatcccagtgatttgctggagccagctgtagtatctctgctcttcgacacaatgctaagatgtgcaaacccacctccagtattggattattttaccagagatcctcaaattggttcacactttgcactatgctttaataacatactaagaaacaaagctgttggttctccccaccctagcccaacactttttagcacatatcattctccccttgcctgttgcccaga

SEQ ID NO: 325103 - DNA, 268 bp, Homo sapiens
taccctgacttcaccactatgcatatatacatctaagaaaatttctcgtgtgccccataaatttgtacaagaaccaatcatataagagacattcagtaaatagttaccaaataaattataagcacacaaatttacaaaaagaactgcagctactgggaggggtgacgtgctagtcccacccacttgggaggctaaggtgggaggatcagttgagcccaggaattcaaggctgaagtgagccatgattgcaccacagcactccagccca

SEQ ID NO: 325104 - DNA, 238 bp, Homo sapiens
gctcactagaatgtcacaacataagggcaggaatttattttctcctgttgtatccccaatacctagaatagtgcctagagtatagcagatactcagcagacatttgctaaatgacttgaattcccaactaatctaaaaatcacacatgcgcgcgcgcgcacacacacacacacacacacacacacacacacacacacaaaatatcacaggaagaggactaccttaggaaaaggattga

SEQ ID NO: 325105 - DNA, 3693 bp, Homo sapiens
gacatcgaggttttgagaggctaactctcccaaaaaggaccatgggtagcaacaagagcaagcccaaggatgccagccagcggcgccgcagcctggagcccgccgagaacgtgcacggcgctggcgggggcgctttccccgcctcgcagacccccagcaagccagcctcggccgacggccaccgcggccccagcgcggccttcgcccccgcggccgccgagcccaagctgttcggaggcttcaactcctcggacaccgtcacctccccgcagagggcgggcccgctggccggtggagtgaccacctttgtggccctctatgactatgagtctaggacggagacagacctgtccttcaagaaaggcgagcggctccagattgtcaacaacacagagggagactggtggctggcccactcgctcagcacaggacagacaggctacatccccagcaactacgtggcgccctccgactccatccaggctgaggagtggtattttggcaagatcaccagacgggagtcagagcggttactgctcaatgcagagaacccgagagggaccttcctcgtgcgagaaagtgagaccacgaaaggtgcctactgcctctcagtgtctgacttcgacaacgccaagggcctcaacgtgaagcactacaagatccgcaagctggacagcggcggcttctacatcacctcccgcacccagttcaacagcctgcagcagctggtggcctactactccaaacacgccgatggcctgtgccaccgcctcaccaccgtgtgccccacgtccaagccgcagactcagggcctggccaaggatgcctgggagatccctcgggagtcgctgcggctggaggtcaagctgggccagggctgctttggcgaggtgtggatggggacctggaacggtaccaccagggtggccatcaaaaccctgaagcctggcacgatgtctccagaggccttcctgcaggaggcccaggtcatgaagaagctgaggcatgagaagctggtgcagttgtatgctgtggtttcagaggagcccatttacatcgtcacggagtacatgagcaaggggagtttgctggactttctcaagggggagacaggcaagtacctgcggctgcctcagctggtggacatggctgctcagatcgcctcaggcatggcgtacgtggagcggatgaactacgtccaccgggaccttcgtgcagccaacatcctggtgggagagaacctggtgtgcaaagtggccgactttgggctggctcggctcattgaagacaatgagtacacggcgcggcaaggtgccaaattccccatcaagtggacggctccagaagctgccctctatggccgcttcaccatcaagtcggacgtgtggtccttcgggatcctgctgactgagctcaccacaaagggacgggtgccctaccctgggatggtgaaccgcgaggtgctggaccaggtggagcggggctaccggatgccctgcccgccggagtgtcccgagtccctgcacgacctcatgtgccagtgctggcggaaggagcctgaggagcggcccaccttcgagtacctgcaggccttcctggaggactacttcacgtccaccgagccccagtaccagcccggggagaacctctaggcacaggcgggcccagaccggcttctcggcttggatcctgggctgggtggcccctgtctcggggcttgccccactctgcctgcctgctgttggtcctctctctgtggggctgaattgccaggggcgaggcccttcctctttggtggcatggaaggggcttctggacctagggtggcctgagagggcggtgggtatgcgagaccagcacggtgactctgtccagctcccgctgtggccgcacgcctctccctgcactccctcctggagctctgtgggtctctggaagaggaaccaggagaagggctggggccggggctgagggtgcccttttccagcctcagcctactccgctcactgaactccttccccacttctgtgccacccccggtctatgtcgagagctggccaaagagcctttccaaagaggagcgatgggcccctggccccgcctgcctgccaccctgccccttgccatccattctggaaacacctgtaggcagaggctgccgagacagaccctctgccgctgcttccaggctgggcagcacaaggccttgcctggcctgatgatggtgggtgggtgggatgagtaccccctcaaaccctgccctccttagacctgagggacccttcgagatcatcacttccttgcccccatttcacccatggggagacagttgagagcggggatgtgacatgcccaaggccacggagcagttcagagtggaggcgggcttggaacccggtgctccctctgtcatcctcaggaaccaacaattcgtcggaggcatcatggaaagactgggacagcccaggaaacaaggggtctgaggatgcattcgagatggcagattcccactgccgctgcccgctcagcccagctgttgggaacagcatggaggcagatgtggggctgagctggggaatcagggtaaaaggtgcaggtgtggagagagaggcttcaatcggcttgtgggtgatgtttgaccttcagagccagccggctatgaaagggagcgagcccctcggctctggaggcaatcaagcagacatagaagagccaagagtccaggaggccctggtcctggcctccttccccgtactttgtcccgtggcatttcaattcctggccctgttctcctccccaagtcggcaccctttaactcatgaggagggaaaagagtgcctaagcgggggtgaaagaggacgtgttacccactgccatgcaccaggactggctgtgtaaccttgggtggcccctgctgtctctctgggctgcagagtctgccccacatgtggccatggcctctgcaactgctcagctctggtccaggccctgtggcaggacacacatggtgagcctagccctgggacatcaggagactgggctctggctctgttcggcctttgggtgtgtggtggattctccctgggcctcagtgtgcccatctgtaaaggggcagctgacagtttgtggcatcttgccaagggtccctgtgtgtgtgtatgtgtgtgcatgtgtgcgtgtctccatgtgcgtccatatttaacatgtaaaaatgtcccccccgctccgtcccccaaacatgttgtacatttcaccatggccccctcatcatagcaataacattcccactgccaggggttcttgagccagccaggccctgccagtggggaaggaggccaagcagtgcctgcctatgaaatttcaacttttcctttcatacgtctttattacccaagtcttctcccgtccattccagtcaaatctgggctcactcaccccagcgagctctcaaatccctctccaactgcctaaggccctttgtgtaaggtgtcttaatactgtccttttttttttttaacagtgttttgtagatttcagatgactatgcagaggcctgggggacccctggctctgggccgggcctggggctccgaaattccaaggcccagacttgcggggggtgggggggtatccagaattggttgtaaatactttgcatattgtctgattaaacacaaacagacctcagaattg

SEQ ID NO: 325106 - DNA, 4101 bp, Homo sapiens
caaacaagtgcggccatttcaccagcccaggctggcttctgctgttgactggctgtggcacctcaagcagcccctttcccctctagcctcagtttatcaccgcaagagctaccattcatctagcacaacctgaccatcctcacactggtcagttccaaccttcccaggaatcttctgtggccatgttcactccggttttacagaacagagaacagaagctcagagaagtgaagcaacttgcccagctatgagagacagagccaggatttgaaaccagatgaggacgctgaggcccagagagggaaagccacttgcctagggacacacagcggggagaggtggagcagggcctctatttcgagacccctgactccacacctggtgtttgtgccaagaccccaggctgcctcccaggtcctctgggacagcccctgccttctaccaggaccatgggtagcaacaagagcaagcccaaggatgccagccagcggcgccgcagcctggagcccgccgagaacgtgcacggcgctggcgggggcgctttccccgcctcgcagacccccagcaagccagcctcggccgacggccaccgcggccccagcgcggccttcgcccccgcggccgccgagcccaagctgttcggaggcttcaactcctcggacaccgtcacctccccgcagagggcgggcccgctggccggtggagtgaccacctttgtggccctctatgactatgagtctaggacggagacagacctgtccttcaagaaaggcgagcggctccagattgtcaacaacacagagggagactggtggctggcccactcgctcagcacaggacagacaggctacatccccagcaactacgtggcgccctccgactccatccaggctgaggagtggtattttggcaagatcaccagacgggagtcagagcggttactgctcaatgcagagaacccgagagggaccttcctcgtgcgagaaagtgagaccacgaaaggtgcctactgcctctcagtgtctgacttcgacaacgccaagggcctcaacgtgaagcactacaagatccgcaagctggacagcggcggcttctacatcacctcccgcacccagttcaacagcctgcagcagctggtggcctactactccaaacacgccgatggcctgtgccaccgcctcaccaccgtgtgccccacgtccaagccgcagactcagggcctggccaaggatgcctgggagatccctcgggagtcgctgcggctggaggtcaagctgggccagggctgctttggcgaggtgtggatggggacctggaacggtaccaccagggtggccatcaaaaccctgaagcctggcacgatgtctccagaggccttcctgcaggaggcccaggtcatgaagaagctgaggcatgagaagctggtgcagttgtatgctgtggtttcagaggagcccatttacatcgtcacggagtacatgagcaaggggagtttgctggactttctcaagggggagacaggcaagtacctgcggctgcctcagctggtggacatggctgctcagatcgcctcaggcatggcgtacgtggagcggatgaactacgtccaccgggaccttcgtgcagccaacatcctggtgggagagaacctggtgtgcaaagtggccgactttgggctggctcggctcattgaagacaatgagtacacggcgcggcaaggtgccaaattccccatcaagtggacggctccagaagctgccctctatggccgcttcaccatcaagtcggacgtgtggtccttcgggatcctgctgactgagctcaccacaaagggacgggtgccctaccctgggatggtgaaccgcgaggtgctggaccaggtggagcggggctaccggatgccctgcccgccggagtgtcccgagtccctgcacgacctcatgtgccagtgctggcggaaggagcctgaggagcggcccaccttcgagtacctgcaggccttcctggaggactacttcacgtccaccgagccccagtaccagcccggggagaacctctaggcacaggcgggcccagaccggcttctcggcttggatcctgggctgggtggcccctgtctcggggcttgccccactctgcctgcctgctgttggtcctctctctgtggggctgaattgccaggggcgaggcccttcctctttggtggcatggaaggggcttctggacctagggtggcctgagagggcggtgggtatgcgagaccagcacggtgactctgtccagctcccgctgtggccgcacgcctctccctgcactccctcctggagctctgtgggtctctggaagaggaaccaggagaagggctggggccggggctgagggtgcccttttccagcctcagcctactccgctcactgaactccttccccacttctgtgccacccccggtctatgtcgagagctggccaaagagcctttccaaagaggagcgatgggcccctggccccgcctgcctgccaccctgccccttgccatccattctggaaacacctgtaggcagaggctgccgagacagaccctctgccgctgcttccaggctgggcagcacaaggccttgcctggcctgatgatggtgggtgggtgggatgagtaccccctcaaaccctgccctccttagacctgagggacccttcgagatcatcacttccttgcccccatttcacccatggggagacagttgagagcggggatgtgacatgcccaaggccacggagcagttcagagtggaggcgggcttggaacccggtgctccctctgtcatcctcaggaaccaacaattcgtcggaggcatcatggaaagactgggacagcccaggaaacaaggggtctgaggatgcattcgagatggcagattcccactgccgctgcccgctcagcccagctgttgggaacagcatggaggcagatgtggggctgagctggggaatcagggtaaaaggtgcaggtgtggagagagaggcttcaatcggcttgtgggtgatgtttgaccttcagagccagccggctatgaaagggagcgagcccctcggctctggaggcaatcaagcagacatagaagagccaagagtccaggaggccctggtcctggcctccttccccgtactttgtcccgtggcatttcaattcctggccctgttctcctccccaagtcggcaccctttaactcatgaggagggaaaagagtgcctaagcgggggtgaaagaggacgtgttacccactgccatgcaccaggactggctgtgtaaccttgggtggcccctgctgtctctctgggctgcagagtctgccccacatgtggccatggcctctgcaactgctcagctctggtccaggccctgtggcaggacacacatggtgagcctagccctgggacatcaggagactgggctctggctctgttcggcctttgggtgtgtggtggattctccctgggcctcagtgtgcccatctgtaaaggggcagctgacagtttgtggcatcttgccaagggtccctgtgtgtgtgtatgtgtgtgcatgtgtgcgtgtctccatgtgcgtccatatttaacatgtaaaaatgtcccccccgctccgtcccccaaacatgttgtacatttcaccatggccccctcatcatagcaataacattcccactgccaggggttcttgagccagccaggccctgccagtggggaaggaggccaagcagtgcctgcctatgaaatttcaacttttcctttcatacgtctttattacccaagtcttctcccgtccattccagtcaaatctgggctcactcaccccagcgagctctcaaatccctctccaactgcctaaggccctttgtgtaaggtgtcttaatactgtccttttttttttttaacagtgttttgtagatttcagatgactatgcagaggcctgggggacccctggctctgggccgggcctggggctccgaaattccaaggcccagacttgcggggggtgggggggtatccagaattggttgtaaatactttgcatattgtctgattaaacacaaacagacctcagaattg

SEQ ID NO: 325107 - DNA, 4063 bp, Homo sapiens
tcctcctcctccctttctctctcgatctgtctctcccggcccggaatccattccggcctgggagccggagcggccaggccgccgtctgcccgtcccgctggacgtcccgcggtccgccctcccgtgcgtccgtctgccggtgagcccgcccgcccgccggcccagaacagagaacagaagctcagagaagtgaagcaacttgcccagctatgagagacagagccaggatttgaaaccagatgaggacgctgaggcccagagagggaaagccacttgcctagggacacacagcggggagaggtggagcagggcctctatttcgagacccctgactccacacctggtgtttgtgccaagaccccaggctgcctcccaggtcctctgggacagcccctgccttctaccaggaccatgggtagcaacaagagcaagcccaaggatgccagccagcggcgccgcagcctggagcccgccgagaacgtgcacggcgctggcgggggcgctttccccgcctcgcagacccccagcaagccagcctcggccgacggccaccgcggccccagcgcggccttcgcccccgcggccgccgagcccaagctgttcggaggcttcaactcctcggacaccgtcacctccccgcagagggcgggcccgctggccggtggagtgaccacctttgtggccctctatgactatgagtctaggacggagacagacctgtccttcaagaaaggcgagcggctccagattgtcaacaacacagagggagactggtggctggcccactcgctcagcacaggacagacaggctacatccccagcaactacgtggcgccctccgactccatccaggctgaggagtggtattttggcaagatcaccagacgggagtcagagcggttactgctcaatgcagagaacccgagagggaccttcctcgtgcgagaaagtgagaccacgaaaggtgcctactgcctctcagtgtctgacttcgacaacgccaagggcctcaacgtgaagcactacaagatccgcaagctggacagcggcggcttctacatcacctcccgcacccagttcaacagcctgcagcagctggtggcctactactccaaacacgccgatggcctgtgccaccgcctcaccaccgtgtgccccacgtccaagccgcagactcagggcctggccaaggatgcctgggagatccctcgggagtcgctgcggctggaggtcaagctgggccagggctgctttggcgaggtgtggatggggacctggaacggtaccaccagggtggccatcaaaaccctgaagcctggcacgatgtctccagaggccttcctgcaggaggcccaggtcatgaagaagctgaggcatgagaagctggtgcagttgtatgctgtggtttcagaggagcccatttacatcgtcacggagtacatgagcaaggggagtttgctggactttctcaagggggagacaggcaagtacctgcggctgcctcagctggtggacatggctgctcagatcgcctcaggcatggcgtacgtggagcggatgaactacgtccaccgggaccttcgtgcagccaacatcctggtgggagagaacctggtgtgcaaagtggccgactttgggctggctcggctcattgaagacaatgagtacacggcgcggcaaggtgccaaattccccatcaagtggacggctccagaagctgccctctatggccgcttcaccatcaagtcggacgtgtggtccttcgggatcctgctgactgagctcaccacaaagggacgggtgccctaccctgggatggtgaaccgcgaggtgctggaccaggtggagcggggctaccggatgccctgcccgccggagtgtcccgagtccctgcacgacctcatgtgccagtgctggcggaaggagcctgaggagcggcccaccttcgagtacctgcaggccttcctggaggactacttcacgtccaccgagccccagtaccagcccggggagaacctctaggcacaggcgggcccagaccggcttctcggcttggatcctgggctgggtggcccctgtctcggggcttgccccactctgcctgcctgctgttggtcctctctctgtggggctgaattgccaggggcgaggcccttcctctttggtggcatggaaggggcttctggacctagggtggcctgagagggcggtgggtatgcgagaccagcacggtgactctgtccagctcccgctgtggccgcacgcctctccctgcactccctcctggagctctgtgggtctctggaagaggaaccaggagaagggctggggccggggctgagggtgcccttttccagcctcagcctactccgctcactgaactccttccccacttctgtgccacccccggtctatgtcgagagctggccaaagagcctttccaaagaggagcgatgggcccctggccccgcctgcctgccaccctgccccttgccatccattctggaaacacctgtaggcagaggctgccgagacagaccctctgccgctgcttccaggctgggcagcacaaggccttgcctggcctgatgatggtgggtgggtgggatgagtaccccctcaaaccctgccctccttagacctgagggacccttcgagatcatcacttccttgcccccatttcacccatggggagacagttgagagcggggatgtgacatgcccaaggccacggagcagttcagagtggaggcgggcttggaacccggtgctccctctgtcatcctcaggaaccaacaattcgtcggaggcatcatggaaagactgggacagcccaggaaacaaggggtctgaggatgcattcgagatggcagattcccactgccgctgcccgctcagcccagctgttgggaacagcatggaggcagatgtggggctgagctggggaatcagggtaaaaggtgcaggtgtggagagagaggcttcaatcggcttgtgggtgatgtttgaccttcagagccagccggctatgaaagggagcgagcccctcggctctggaggcaatcaagcagacatagaagagccaagagtccaggaggccctggtcctggcctccttccccgtactttgtcccgtggcatttcaattcctggccctgttctcctccccaagtcggcaccctttaactcatgaggagggaaaagagtgcctaagcgggggtgaaagaggacgtgttacccactgccatgcaccaggactggctgtgtaaccttgggtggcccctgctgtctctctgggctgcagagtctgccccacatgtggccatggcctctgcaactgctcagctctggtccaggccctgtggcaggacacacatggtgagcctagccctgggacatcaggagactgggctctggctctgttcggcctttgggtgtgtggtggattctccctgggcctcagtgtgcccatctgtaaaggggcagctgacagtttgtggcatcttgccaagggtccctgtgtgtgtgtatgtgtgtgcatgtgtgcgtgtctccatgtgcgtccatatttaacatgtaaaaatgtcccccccgctccgtcccccaaacatgttgtacatttcaccatggccccctcatcatagcaataacattcccactgccaggggttcttgagccagccaggccctgccagtggggaaggaggccaagcagtgcctgcctatgaaatttcaacttttcctttcatacgtctttattacccaagtcttctcccgtccattccagtcaaatctgggctcactcaccccagcgagctctcaaatccctctccaactgcctaaggccctttgtgtaaggtgtcttaatactgtccttttttttttttaacagtgttttgtagatttcagatgactatgcagaggcctgggggacccctggctctgggccgggcctggggctccgaaattccaaggcccagacttgcggggggtgggggggtatccagaattggttgtaaatactttgcatattgtctgattaaacacaaacagacctcagaattg

SEQ ID NO: 325108 - DNA, 4692 bp, Homo sapiens
caaacaagtgcggccatttcaccagcccaggctggcttctgctgttgactggctgtggcacctcaagcagcccctttcccctctagcctcagtttatcaccgcaagagctaccattcatctagcacaacctgaccatcctcacactggtcagttccaaccttcccaggaatcttctgtggccatgttcactccggttttacagaacagagaacagaagctcagagaagtgaagcaacttgcccagctatgagagacagagccaggatttgaaaccagatgaggacgctgaggcccagagagggaaagccacttgcctagggacacacagcggggagaggtggagcagggcctctatttcgagacccctgactccacacctggtgtttgtgccaagaccccaggctgcctcccaggtcctctgggacagcccctgccttctaccaggaccatgggtagcaacaagagcaagcccaaggatgccagccagcggcgccgcagcctggagcccgccgagaacgtgcacggcgctggcgggggcgctttccccgcctcgcagacccccagcaagccagcctcggccgacggccaccgcggccccagcgcggccttcgcccccgcggccgccgagcccaagctgttcggaggcttcaactcctcggacaccgtcacctccccgcagagggcgggcccgctggccggtggagtgaccacctttgtggccctctatgactatgagtctaggacggagacagacctgtccttcaagaaaggcgagcggctccagattgtcaacaacacagagggagactggtggctggcccactcgctcagcacaggacagacaggctacatccccagcaactacgtggcgccctccgactccatccaggctgaggagtggtattttggcaagatcaccagacgggagtcagagcggttactgctcaatgcagagaacccgagagggaccttcctcgtgcgagaaagtgagaccacgaaaggtgcctactgcctctcagtgtctgacttcgacaacgccaagggcctcaacgtgaagcactacaagatccgcaagctggacagcggcggcttctacatcacctcccgcacccagttcaacagcctgcagcagctggtggcctactactccaaacacgccgatggcctgtgccaccgcctcaccaccgtgtgccccacgtccaagccgcagactcagggcctggccaaggatgcctgggagatccctcgggagtcgctgcggctggaggtcaagctgggccagggctgctttggcgaggtgtggatggggacctggaacggtaccaccagggtggccatcaaaaccctgaagcctggcacgatgtctccagaggccttcctgcaggaggcccaggtcatgaagaagctgaggcatgagaagctggtgcagttgtatgctgtggtttcagaggagcccatttacatcgtcacggagtacatgagcaaggggagtttgctggactttctcaagggggagacaggcaagtacctgcggctgcctcagctggtggacatggctgctcagatcgcctcaggcatggcgtacgtggagcggatgaactacgtccaccgggaccttcgtgcagccaacatcctggtgggagagaacctggtgtgcaaagtggccgactttgggctggctcggctcattgaagacaatgagtacacggcgcggcaaggtgccaaattccccatcaagtggacggctccagaagctgccctctatggccgcttcaccatcaagtcggacgtgtggtccttcgggatcctgctgactgagctcaccacaaagggacgggtgccctaccctgggatggtgaaccgcgaggtgctggaccaggtggagcggggctaccggatgccctgcccgccggagtgtcccgagtccctgcacgacctcatgtgccagtgctggcggaaggagcctgaggagcggcccaccttcgagtacctgcaggccttcctggaggactacttcacgtccaccgagccccagtaccagcccggggagaacctctaggcacaggcgggcccagaccggcttctcggcttggatcctgggctgggtggcccctgtctcggggcttgccccactctgcctgcctgctgttggtcctctctctgtggggctgaattgccaggggcgaggcccttcctctttggtggcatggaaggggcttctggacctagggtggcctgagagggcggtgggtatgcgagaccagcacggtgactctgtccagctcccgctgtggccgcacgcctctccctgcactccctcctggagctctgtgggtctctggaagaggaaccaggagaagggctggggccggggctgagggtgcccttttccagcctcagcctactccgctcactgaactccttccccacttctgtgccacccccggtctatgtcgagagctggccaaagagcctttccaaagaggagcgatgggcccctggccccgcctgcctgccaccctgccccttgccatccattctggaaacacctgtaggcagaggctgccgagacagaccctctgccgctgcttccaggctgggcagcacaaggccttgcctggcctgatgatggtgggtgggtgggatgagtaccccctcaaaccctgccctccttagacctgagggacccttcgagatcatcacttccttgcccccatttcacccatggggagacagttgagagcggggatgtgacatgcccaaggccacggagcagttcagagtggaggcgggcttggaacccggtgctccctctgtcatcctcaggaaccaacaattcgtcggaggcatcatggaaagactgggacagcccaggaaacaaggggtctgaggatgcattcgagatggcagattcccactgccgctgcccgctcagcccagctgttgggaacagcatggaggcagatgtggggctgagctggggaatcagggtaaaaggtgcaggtgtggagagagaggcttcaatcggcttgtgggtgatgtttgaccttcagagccagccggctatgaaagggagcgagcccctcggctctggaggcaatcaagcagacatagaagagccaagagtccaggaggccctggtcctggcctccttccccgtactttgtcccgtggcatttcaattcctggccctgttctcctccccaagtcggcaccctttaactcatgaggagggaaaagagtgcctaagcgggggtgaaagaggacgtgttacccactgccatgcaccaggactggctgtgtaaccttgggtggcccctgctgtctctctgggctgcagagtctgccccacatgtggccatggcctctgcaactgctcagctctggtccaggccctgtggcaggacacacatggtgagcctagccctgggacatcaggagactgggctctggctctgttcggcctttgggtgtgtggtggattctccctgggcctcagtgtgcccatctgtaaaggggcagctgacagtttgtggcatcttgccaagggtccctgtgtgtgtgtatgtgtgtgcatgtgtgcgtgtctccatgtgcgtccatatttaacatgtaaaaatgtcccccccgctccgtcccccaaacatgttgtacatttcaccatggccccctcatcatagcaataacattcccactgccaggggttcttgagccagccaggccctgccagtggggaaggaggccaagcagtgcctgcctatgaaatttcaacttttcctttcatacgtctttattacccaagtcttctcccgtccattccagtcaaatctgggctcactcaccccagcgagctctcaaatccctctccaactgcctaaggccctttgtgtaaggtgtcttaatactgtccttttttttttttaacagtgttttgtagatttcagatgactatgcagaggcctgggggacccctggctctgggccgggcctggggctccgaaattccaaggcccagacttgcggggggtgggggggtatccagaattggttgtaaatactttgcatattgtctgattaaacacaaacagacctcagaattgaaaaaaaaaaaaaaaaaaaaaaaaaaaaacaaaaaaaaaaaaaaaaaaacaaaaaaaaaaacaaaacaaaacaaaaaaaacaacaaagaggggggggcaaaaaaaaaaaacacaatgagggcgcacccacacaccacacacaaaaaagaaacaagaggacacaaaaaaagcgcataaaacacacacaacacgaccaaaaaacaaacagctagcgcaaaaacatccgccaaccgggaactctagagaaaaagccaccccctcccgggggggacgacaccatctgacacaacaccccccaagagaataacgccggagagaagacaacacacagagaatctagcgatccacacagacgcagagacaactcgtcagcacgcagaaaagatatcagccacgcaaagtatcagcatagaagaaaatataccgggggagacgcagaacacgaaccaacagcacaacaaaacatacacacagacgcaaccgcccaccaaaaacaccaaagacaacagatagacgacagcgccgacacgcaccactagcaccatgcgacaagagacctcaccgcgcatagtgctaagcaagcaccaacgg

SEQ ID NO: 325109 - DNA, 4652 bp, Homo sapiens
caaacaagtgcggccatttcaccagcccaggctggcttctgctgttgactggctgtggcacctcaagcagcccctttcccctctagcctcagtttatcaccgcaagagctaccattcatctagcacaacctgaccatcctcacactggtcagttccaaccttcccaggaatcttctgtggccatgttcactccggttttacagaacagagaacagaagctcagagaagtgaagcaacttgcccagctatgagagacagagccaggatttgaaaccagatgaggacgctgaggcccagagagggaaagccacttgcctagggacacacagcggggagaggtggagcagggcctctatttcgagacccctgactccacacctggtgtttgtgccaagaccccaggctgcctcccaggtcctctgggacagcccctgccttctaccaggaccatgggtagcaacaagagcaagcccaaggatgccagccagcggcgccgcagcctggagcccgccgagaacgtgcacggcgctggcgggggcgctttccccgcctcgcagacccccagcaagccagcctcggccgacggccaccgcggccccagcgcggccttcgcccccgcggccgccgagcccaagctgttcggaggcttcaactcctcggacaccgtcacctccccgcagagggcgggcccgctggccggtggagtgaccacctttgtggccctctatgactatgagtctaggacggagacagacctgtccttcaagaaaggcgagcggctccagattgtcaacaacacagagggagactggtggctggcccactcgctcagcacaggacagacaggctacatccccagcaactacgtggcgccctccgactccatccaggctgaggagtggtattttggcaagatcaccagacgggagtcagagcggttactgctcaatgcagagaacccgagagggaccttcctcgtgcgagaaagtgagaccacgaaaggtgcctactgcctctcagtgtctgacttcgacaacgccaagggcctcaacgtgaagcactacaagatccgcaagctggacagcggcggcttctacatcacctcccgcacccagttcaacagcctgcagcagctggtggcctactactccaaacacgccgatggcctgtgccaccgcctcaccaccgtgtgccccacgtccaagccgcagactcagggcctggccaaggatgcctgggagatccctcgggagtcgctgcggctggaggtcaagctgggccagggctgctttggcgaggtgtggatggggacctggaacggtaccaccagggtggccatcaaaaccctgaagcctggcacgatgtctccagaggccttcctgcaggaggcccaggtcatgaagaagctgaggcatgagaagctggtgcagttgtatgctgtggtttcagaggagcccatttacatcgtcacggagtacatgagcaaggggagtttgctggactttctcaagggggagacaggcaagtacctgcggctgcctcagctggtggacatggctgctcagatcgcctcaggcatggcgtacgtggagcggatgaactacgtccaccgggaccttcgtgcagccaacatcctggtgggagagaacctggtgtgcaaagtggccgactttgggctggctcggctcattgaagacaatgagtacacggcgcggcaaggtgccaaattccccatcaagtggacggctccagaagctgccctctatggccgcttcaccatcaagtcggacgtgtggtccttcgggatcctgctgactgagctcaccacaaagggacgggtgccctaccctgggatggtgaaccgcgaggtgctggaccaggtggagcggggctaccggatgccctgcccgccggagtgtcccgagtccctgcacgacctcatgtgccagtgctggcggaaggagcctgaggagcggcccaccttcgagtacctgcaggccttcctggaggactacttcacgtccaccgagccccagtaccagcccggggagaacctctaggcacaggcgggcccagaccggcttctcggcttggatcctgggctgggtggcccctgtctcggggcttgccccactctgcctgcctgctgttggtcctctctctgtggggctgaattgccaggggcgaggcccttcctctttggtggcatggaaggggcttctggacctagggtggcctgagagggcggtgggtatgcgagaccagcacggtgactctgtccagctcccgctgtggccgcacgcctctccctgcactccctcctggagctctgtgggtctctggaagaggaaccaggagaagggctggggccggggctgagggtgcccttttccagcctcagcctactccgctcactgaactccttccccacttctgtgccacccccggtctatgtcgagagctggccaaagagcctttccaaagaggagcgatgggcccctggccccgcctgcctgccaccctgccccttgccatccattctggaaacacctgtaggcagaggctgccgagacagaccctctgccgctgcttccaggctgggcagcacaaggccttgcctggcctgatgatggtgggtgggtgggatgagtaccccctcaaaccctgccctccttagacctgagggacccttcgagatcatcacttccttgcccccatttcacccatggggagacagttgagagcggggatgtgacatgcccaaggccacggagcagttcagagtggaggcgggcttggaacccggtgctccctctgtcatcctcaggaaccaacaattcgtcggaggcatcatggaaagactgggacagcccaggaaacaaggggtctgaggatgcattcgagatggcagattcccactgccgctgcccgctcagcccagctgttgggaacagcatggaggcagatgtggggctgagctggggaatcagggtaaaaggtgcaggtgtggagagagaggcttcaatcggcttgtgggtgatgtttgaccttcagagccagccggctatgaaagggagcgagcccctcggctctggaggcaatcaagcagacatagaagagccaagagtccaggaggccctggtcctggcctccttccccgtactttgtcccgtggcatttcaattcctggccctgttctcctccccaagtcggcaccctttaactcatgaggagggaaaagagtgcctaagcgggggtgaaagaggacgtgttacccactgccatgcaccaggactggctgtgtaaccttgggtggcccctgctgtctctctgggctgcagagtctgccccacatgtggccatggcctctgcaactgctcagctctggtccaggccctgtggcaggacacacatggtgagcctagccctgggacatcaggagactgggctctggctctgttcggcctttgggtgtgtggtggattctccctgggcctcagtgtgcccatctgtaaaggggcagctgacagtttgtggcatcttgccaagggtccctgtgtgtgtgtatgtgtgtgcatgtgtgcgtgtctccatgtgcgtccatatttaacatgtaaaaatgtcccccccgctccgtcccccaaacatgttgtacatttcaccatggccccctcatcatagcaataacattcccactgccaggggttcttgagccagccaggccctgccagtggggaaggaggccaagcagtgcctgcctatgaaatttcaacttttcctttcatacgtctttattacccaagtcttctcccgtccattccagtcaaatctgggctcactcaccccagcgagctctcaaatccctctccaactgcctaaggccctttgtgtaaggtgtcttaatactgtccttttttttttttaacagtgttttgtagatttcagatgactatgcagaggcctgggggacccctggctctgggccgggcctggggctccgaaattccaaggcccagacttgcggggggtgggggggtatccagaattggttgtaaatactttgcatattgtctgattaaacacaaacagacctcagaattgatctgatcaacagtttattgaacatctactgtgtgctggaaagcgagatggggcggaatgcgagaacaaactaccccttgaggggtctttgggcagcactagtagctggagggcttcaggccaaggcaggggtgacatcagattggagacagctacggcagaatgtggctgtttgtgaacatctgcacctgtgttagggggtgagcacctgggagaaggacaaggcacatcacaggacttccctgagcatgacaagttcaggactcaaatgtccgtggtggatggtagcagtgacattggggagtgggtggggctgtcaagcctgcctagaggagatcacaaatacacgacgagaataccgttgtgtgtgctcttcgtgtgtttcctaggagtgcagggcaggggtgctgggtcgatccacaaaagtcctgaaaacgctgaagaaaaatccaaagacccttcccctcctccctccttccccaccaccgaagcacacagtcttgaaggttgatttgcaaccgtctatacaaacacatttattttacacaaat

SEQ ID NO: 325110 - DNA, 4418 bp, Homo sapiens
caaacaagtgcggccatttcaccagcccaggctggcttctgctgttgactggctgtggcacctcaagcagcccctttcccctctagcctcagtttatcaccgcaagagctaccattcatctagcacaacctgaccatcctcacactggtcagttccaaccttcccaggaatcttctgtggccatgttcactccggttttacagaacagagaacagaagctcagagaagtgaagcaacttgcccagctatgagagacagagccaggatttgaaaccagatgaggacgctgaggcccagagagggaaagccacttgcctagggacacacagcggggagaggtggagcagggcctctatttcgagacccctgactccacacctggtgtttgtgccaagaccccaggctgcctcccaggtcctctgggacagcccctgccttctaccaggaccatgggtagcaacaagagcaagcccaaggatgccagccagcggcgccgcagcctggagcccgccgagaacgtgcacggcgctggcgggggcgctttccccgcctcgcagacccccagcaagccagcctcggccgacggccaccgcggccccagcgcggccttcgcccccgcggccgccgagcccaagctgttcggaggcttcaactcctcggacaccgtcacctccccgcagagggcgggcccgctggccggtggagtgaccacctttgtggccctctatgactatgagtctaggacggagacagacctgtccttcaagaaaggcgagcggctccagattgtcaacaacacagagggagactggtggctggcccactcgctcagcacaggacagacaggctacatccccagcaactacgtggcgccctccgactccatccaggctgaggagtggtattttggcaagatcaccagacgggagtcagagcggttactgctcaatgcagagaacccgagagggaccttcctcgtgcgagaaagtgagaccacgaaaggtgcctactgcctctcagtgtctgacttcgacaacgccaagggcctcaacgtgaagcactacaagatccgcaagctggacagcggcggcttctacatcacctcccgcacccagttcaacagcctgcagcagctggtggcctactactccaaacacgccgatggcctgtgccaccgcctcaccaccgtgtgccccacgtccaagccgcagactcagggcctggccaaggatgcctgggagatccctcgggagtcgctgcggctggaggtcaagctgggccagggctgctttggcgaggtgtggatggggacctggaacggtaccaccagggtggccatcaaaaccctgaagcctggcacgatgtctccagaggccttcctgcaggaggcccaggtcatgaagaagctgaggcatgagaagctggtgcagttgtatgctgtggtttcagaggagcccatttacatcgtcacggagtacatgagcaaggggagtttgctggactttctcaagggggagacaggcaagtacctgcggctgcctcagctggtggacatggctgctcagatcgcctcaggcatggcgtacgtggagcggatgaactacgtccaccgggaccttcgtgcagccaacatcctggtgggagagaacctggtgtgcaaagtggccgactttgggctggctcggctcattgaagacaatgagtacacggcgcggcaaggtgccaaattccccatcaagtggacggctccagaagctgccctctatggccgcttcaccatcaagtcggacgtgtggtccttcgggatcctgctgactgagctcaccacaaagggacgggtgccctaccctgggatggtgaaccgcgaggtgctggaccaggtggagcggggctaccggatgccctgcccgccggagtgtcccgagtccctgcacgacctcatgtgccagtgctggcggaaggagcctgaggagcggcccaccttcgagtacctgcaggccttcctggaggactacttcacgtccaccgagccccagtaccagcccggggagaacctctaggcacaggcgggcccagaccggcttctcggcttggatcctgggctgggtggcccctgtctcggggcttgccccactctgcctgcctgctgttggtcctctctctgtggggctgaattgccaggggcgaggcccttcctctttggtggcatggaaggggcttctggacctagggtggcctgagagggcggtgggtatgcgagaccagcacggtgactctgtccagctcccgctgtggccgcacgcctctccctgcactccctcctggagctctgtgggtctctggaagaggaaccaggagaagggctggggccggggctgagggtgcccttttccagcctcagcctactccgctcactgaactccttccccacttctgtgccacccccggtctatgtcgagagctggccaaagagcctttccaaagaggagcgatgggcccctggccccgcctgcctgccaccctgccccttgccatccattctggaaacacctgtaggcagaggctgccgagacagaccctctgccgctgcttccaggctgggcagcacaaggccttgcctggcctgatgatggtgggtgggtgggatgagtaccccctcaaaccctgccctccttagacctgagggacccttcgagatcatcacttccttgcccccatttcacccatggggagacagttgagagcggggatgtgacatgcccaaggccacggagcagttcagagtggaggcgggcttggaacccggtgctccctctgtcatcctcaggaaccaacaattcgtcggaggcatcatggaaagactgggacagcccaggaaacaaggggtctgaggatgcattcgagatggcagattcccactgccgctgcccgctcagcccagctgttgggaacagcatggaggcagatgtggggctgagctggggaatcagggtaaaaggtgcaggtgtggagagagaggcttcaatcggcttgtgggtgatgtttgaccttcagagccagccggctatgaaagggagcgagcccctcggctctggaggcaatcaagcagacatagaagagccaagagtccaggaggccctggtcctggcctccttccccgtactttgtcccgtggcatttcaattcctggccctgttctcctccccaagtcggcaccctttaactcatgaggagggaaaagagtgcctaagcgggggtgaaagaggacgtgttacccactgccatgcaccaggactggctgtgtaaccttgggtggcccctgctgtctctctgggctgcagagtctgccccacatgtggccatggcctctgcaactgctcagctctggtccaggccctgtggcaggacacacatggtgagcctagccctgggacatcaggagactgggctctggctctgttcggcctttgggtgtgtggtggattctccctgggcctcagtgtgcccatctgtaaaggggcagctgacagtttgtggcatcttgccaagggtccctgtgtgtgtgtatgtgtgtgcatgtgtgcgtgtctccatgtgcgtccatatttaacatgtaaaaatgtcccccccgctccaactgcctaaggccctttgtgtaaggtgtcttaatactgtccttttttttttttaacagtgttttgtagatttcagatgactatgcagaggcctgggggacccctggctctgggccgggcctggggctccgaaattccaaggcccagacttgcggggggtgggggggtatccagaattggttgtaaatactttgcatattgtctgattaaacacaaacagacctcagaattgatctgatcaacagtttattgaacatctactgtgtgctggaaagcgagatggggcggaatgcgagaacaaactaccccttgaggggtctttgggcagcactagtagctggagggcttcaggccaaggcaggggtgacatcagattggagacagctacggcagaatgtggctgtttgtgaacatctgcacctgtgttagggggtgagcacctgggagaaggacaaggcacatcacaggacttccctgagcatgacaagttcaggactcaaatgtccgtggtggatggtagcagtgacattggggagtgggtggggctgtcaagcctgcctagaggagatcacaaatacacgacgagaataccgttgtgtgtgctcttcgtgtgtttcctaggagtgcagggcaggggtgctgggtcgatccacaaaagtcctgaaaacgctgaagaaaaatccaaagacccttcccctcctccctccttccccaccaccgaagcacacagtcttgaaggttgatttgcaaccgtctatacaaacacatttattttacacaaat

SEQ ID NO: 325111 - DNA, 2169 bp, Homo sapiens
caaacaagtgcggccatttcaccagcccaggctggcttctgctgttgactggctgtggcacctcaagcagcccctttcccctctagcctcagtttatcaccgcaagagctaccattcatctagcacaacctgaccatcctcacactggtcagttccaaccttcccaggaatcttctgtggccatgttcactccggttttacagaacagagaacagaagctcagagaagtgaagcaacttgcccagctatgagagacagagccaggatttgaaaccagatgaggacgctgaggcccagagagggaaagccacttgcctagggacacacagcggggagaggtggagcagggcctctatttcgagacccctgactccacacctggtgtttgtgccaagaccccaggctgcctcccaggtcctctgggacagcccctgccttctaccaggaccatgggtagcaacaagagcaagcccaaggatgccagccagcggcgccgcagcctggagcccgccgagaacgtgcacggcgctggcgggggcgctttccccgcctcgcagacccccagcaagccagcctcggccgacggccaccgcggccccagcgcggccttcgcccccgcggccgccgagcccaagctgttcggaggcttcaactcctcggacaccgtcacctccccgcagagggcgggcccgctggccggtggagtgaccacctttgtggccctctatgactatgagtctaggacggagacagacctgtccttcaagaaaggcgagcggctccagattgtcaacaacacagagggagactggtggctggcccactcgctcagcacaggacagacaggctacatccccagcaactacgtggcgccctccgactccatccaggctgaggagtggtattttggcaagatcaccagacgggagtcagagcggttactgctcaatgcagagaacccgagagggaccttcctcgtgcgagaaagtgagaccacgaaaggtgcctactgcctctcagtgtctgacttcgacaacgccaagggcctcaacgtgaagcactacaagatccgcaagctggacagcggcggcttctacatcacctcccgcacccagttcaacagcctgcagcagctggtggcctactactccaaacacgccgatggcctgtgccaccgcctcaccaccgtgtgccccacgtccaagccgcagactcagggcctggccaaggatgcctgggagatccctcgggagtcgctgcggctggaggtcaagctgggccagggctgctttggcgaggtgtggatggggacctggaacggtaccaccagggtggccatcaaaaccctgaagcctggcacgatgtctccagaggccttcctgcaggaggcccaggtcatgaagaagctgaggcatgagaagctggtgcagttgtatgctgtggtttcagaggagcccatttacatcgtcacggagtacatgagcaagggtgagtcctgggcggccggggcagggggcaggggcactccggacagggcagggagcatgagcctcatttcctctcatgtctagaatgggcatcttcaaaggtggaatgcagtagagccaaattctctgttgcctgggccggagtgtggtggtgcaatcatagctcacttcagcctcaaccttccaggctcaagcagttctcccacctcagccacccaagtagctgggaccacaggtgtgtgtcaccaggcccagctaattttttattttttgtagagatgggaccctatgttgcccaggctggtctcgaactcttgggctcaaggagtcctcccacttccacctcccaaagtgctgggattacaggtgtgagccacagtaatttttaaactaattagttatttttcaaaattccactttttggaggtatagtttacatatgataaaatacaccccttttaagtgttcagttcagtgggttttaacaactggatttactgtgtacccctaaccataatgaagatatataacatctccatcacccagaaagttcctcatgccctttgcagacagtaccctccagccccaaacccaagcacccactgatttgctttctgtcattataaatttgttttgtttattctagaatttcatacatggaatcttttacatctgggatgca

SEQ ID NO: 325112 - DNA, 989 bp, Homo sapiens
caaacaagtgcggccatttcaccagcccaggctggcttctgctgttgactggctgtggcacctcaagcagcccctttcccctctagcctcagtttatcaccgcaagagctaccattcatctagcacaacctgaccatcctcacactggtcagttccaaccttcccaggaatcttctgtggccatgttcactccggttttacagaacagagaacagaagctcagagaagtgaagcaacttgcccagctatgagagacagagccaggatttgaaaccagatgaggacgctgaggcccagagagggaaagccacttgcctagggacacacagcggggagaggtggagcagggcctctatttcgagacccctgactccacacctggtgtttgtgccaagaccccaggctgcctcccaggtcctctgggacagcccctgccttctaccaggaccatgggtagcaacaagagcaagcccaaggatgccagccagcggcgccgcagcctggagcccgccgagaacgtgcacggcgctggcgggggcgctttccccgcctcgcagacccccagcaagccagcctcggccgacggccaccgcggccccagcgcggccttcgcccccgcggccgccgagcccaagctgttcggaggcttcaactcctcggacaccgtcacctccccgcagagggcgggcccgctggccggtggagtgaccacctttgtggccctctatgactatgagtctaggacggagacagacctgtccttcaagaaaggcgagcggctccagattgtcaacaacacagagggagactggtggctggcccactcgctcagcacaggacagacaggctacatccccagcaactacgtggcgccctccgactccatccaggctgaggagtggtattttggcaagatcaccagacgggaggtggaggttgaggtgagccaagattgtgccactacactccagcctgggaaacagagcaag

SEQ ID NO: 325113 - DNA, 357 bp, Homo sapiens
gagccccagttttttcctcagctgtcattcctcatggtgcttatctaacagagcggtcatgacaggaggtcagagctgccctgacctttctcgttcctgcaggtgccaaattccccatcaagtggacggctccagaagctgccctctatggccgcttcaccatcaagtcggacgtgtggtccttcgggatcctgctgactgagctcaccacaaagggacgggtgccctaccctggtaagaaggtcctcatggcctgtctgtggtccctgaatccctctgccctggtggccttgggcaagtcatgactcctgctgggcctgtttccccacccgtaaaacaaagaagttgagcgtctga

SEQ ID NO: 325114 - DNA, 391 bp, Homo sapiens
cggccgccgagcccaagctgttcggaggcttcaactcctcggacaccgtcacctccccgcagagggcgggcccgctggccggtcagtgcgcgggcggcgcggggtcctcgcccacctggggccacggcggggaggcggcggggctgtgtgcccggggtcgccccctctgcgcaggcccttcctctcgccaggggtagcgcccctgggtgacttgggtgtccggggggtgggggggcggccgtacacactgtgaagcgtccgcgccgccgccgctggctttggggtggagcaagcgcaaaagacacggggtgtggttaatgggttctaattggacgcttaagcccaagaagaagaagggcggcgcgggaccgggcctgttgctgccttggcg

SEQ ID NO: 325115 - DNA, 3298 bp, Homo sapiens
acttccccctcccccctcccttcctctctcctcccttttccctcctttccttgtctccttcttcttcctcttctttcccccagcccccctcctccctgtccccctctctccctgctccacgcagtgtcccactgcccgcctttctctgcagctggctggtatggagggggctgccctgaggagccccagagtaagctggaagggaggggacagaggctggtgtcatttgtctctgtagccctaggaccggtctgaaccggttgctgggagaggaggagggggcggccagatcgattgcagcaaagagggaagagagcggcagagggagctcgcggggcttgcgtgctggaacacgccgatggcctgtgccaccgcctcaccaccgtgtgccccacgtccaagccgcagactcagggcctggccaaggatgcctgggagatccctcgggagtcgctgcggctggaggtcaagctgggccagggctgctttggcgaggtgtggatggggacctggaacggtaccaccagggtggccatcaaaaccctgaagcctggcacgatgtctccagaggccttcctgcaggaggcccaggtcatgaagaagctgaggcatgagaagctggtgcagttgtatgctgtggtttcagaggagcccatttacatcgtcacggagtacatgagcaaggggagtttgctggactttctcaagggggagacaggcaagtacctgcggctgcctcagctggtggacatggctgctcagatcgcctcaggcatggcgtacgtggagcggatgaactacgtccaccgggaccttcgtgcagccaacatcctggtgggagagaacctggtgtgcaaagtggccgactttgggctggctcggctcattgaagacaatgagtacacggcgcggcaaggtgccaaattccccatcaagtggacggctccagaagctgccctctatggccgcttcaccatcaagtcggacgtgtggtccttcgggatcctgctgactgagctcaccacaaagggacgggtgccctaccctgggatggtgaaccgcgaggtgctggaccaggtggagcggggctaccggatgccctgcccgccggagtgtcccgagtccctgcacgacctcatgtgccagtgctggcggaaggagcctgaggagcggcccaccttcgagtacctgcaggccttcctggaggactacttcacgtccaccgagccccagtaccagcccggggagaacctctaggcacaggcgggcccagaccggcttctcggcttggatcctgggctgggtggcccctgtctcggggcttgccccactctgcctgcctgctgttggtcctctctctgtggggctgaattgccaggggcgaggcccttcctctttggtggcatggaaggggcttctggacctagggtggcctgagagggcggtgggtatgcgagaccagcacggtgactctgtccagctcccgctgtggccgcacgcctctccctgcactccctcctggagctctgtgggtctctggaagaggaaccaggagaagggctggggccggggctgagggtgcccttttccagcctcagcctactccgctcactgaactccttccccacttctgtgccacccccggtctatgtcgagagctggccaaagagcctttccaaagaggagcgatgggcccctggccccgcctgcctgccaccctgccccttgccatccattctggaaacacctgtaggcagaggctgccgagacagaccctctgccgctgcttccaggctgggcagcacaaggccttgcctggcctgatgatggtgggtgggtgggatgagtaccccctcaaaccctgccctccttagacctgagggacccttcgagatcatcacttccttgcccccatttcacccatggggagacagttgagagcggggatgtgacatgcccaaggccacggagcagttcagagtggaggcgggcttggaacccggtgctccctctgtcatcctcaggaaccaacaattcgtcggaggcatcatggaaagactgggacagcccaggaaacaaggggtctgaggatgcattcgagatggcagattcccactgccgctgcccgctcagcccagctgttgggaacagcatggaggcagatgtggggctgagctggggaatcagggtaaaaggtgcaggtgtggagagagaggcttcaatcggcttgtgggtgatgtttgaccttcagagccagccggctatgaaagggagcgagcccctcggctctggaggcaatcaagcagacatagaagagccaagagtccaggaggccctggtcctggcctccttccccgtactttgtcccgtggcatttcaattcctggccctgttctcctccccaagtcggcaccctttaactcatgaggagggaaaagagtgcctaagcgggggtgaaagaggacgtgttacccactgccatgcaccaggactggctgtgtaaccttgggtggcccctgctgtctctctgggctgcagagtctgccccacatgtggccatggcctctgcaactgctcagctctggtccaggccctgtggcaggacacacatggtgagcctagccctgggacatcaggagactgggctctggctctgttcggcctttgggtgtgtggtggattctccctgggcctcagtgtgcccatctgtaaaggggcagctgacagtttgtggcatcttgccaagggtccctgtgtgtgtgtatgtgtgtgcatgtgtgcgtgtctccatgtgcgtccatatttaacatgtaaaaatgtcccccccgctccgtcccccaaacatgttgtacatttcaccatggccccctcatcatagcaataacattcccactgccaggggttcttgagccagccaggccctgccagtggggaaggaggccaagcagtgcctgcctatgaaatttcaacttttcctttcatacgtctttattacccaagtcttctcccgtccattccagtcaaatctgggctcactcaccccagcgagctctcaaatccctctccaactgcctaaggccctttgtgtaaggtgtcttaatactgtccttttttttttttaacagtgttttgtagatttcagatgactatgcagaggcctgggggacccctggctctgggccgggcctggggctccgaaattccaaggcccagacttgcggggggtgggggggtatccagaattggttgtaaatactttgcatattgtctgattaaacacaaacagacctcagaattg

SEQ ID NO: 325116 - DNA, 3821 bp, Homo sapiens
tcctcctcctccctttctctctcgatctgtctctcccggcccggaatccattccggcctgggagccggagcggccaggccgccgtctgcccgtcccgctggacgtcccgcggtccgccctcccgtgcgtccgtctgccggtgagcccgcccgcccgccggcccaggaccatgggtagcaacaagagcaagcccaaggatgccagccagcggcgccgcagcctggagcccgccgagaacgtgcacggcgctggcgggggcgctttccccgcctcgcagacccccagcaagccagcctcggccgacggccaccgcggccccagcgcggccttcgcccccgcggccgccgagcccaagctgttcggaggcttcaactcctcggacaccgtcacctccccgcagagggcgggcccgctggccggtggagtgaccacctttgtggccctctatgactatgagtctaggacggagacagacctgtccttcaagaaaggcgagcggctccagattgtcaacaacacagagggagactggtggctggcccactcgctcagcacaggacagacaggctacatccccagcaactacgtggcgccctccgactccatccaggctgaggagtggtattttggcaagatcaccagacgggagtcagagcggttactgctcaatgcagagaacccgagagggaccttcctcgtgcgagaaagtgagaccacgaaaggtgcctactgcctctcagtgtctgacttcgacaacgccaagggcctcaacgtgaagcactacaagatccgcaagctggacagcggcggcttctacatcacctcccgcacccagttcaacagcctgcagcagctggtggcctactactccaaacacgccgatggcctgtgccaccgcctcaccaccgtgtgccccacgtccaagccgcagactcagggcctggccaaggatgcctgggagatccctcgggagtcgctgcggctggaggtcaagctgggccagggctgctttggcgaggtgtggatggggacctggaacggtaccaccagggtggccatcaaaaccctgaagcctggcacgatgtctccagaggccttcctgcaggaggcccaggtcatgaagaagctgaggcatgagaagctggtgcagttgtatgctgtggtttcagaggagcccatttacatcgtcacggagtacatgagcaaggggagtttgctggactttctcaagggggagacaggcaagtacctgcggctgcctcagctggtggacatggctgctcagatcgcctcaggcatggcgtacgtggagcggatgaactacgtccaccgggaccttcgtgcagccaacatcctggtgggagagaacctggtgtgcaaagtggccgactttgggctggctcggctcattgaagacaatgagtacacggcgcggcaaggtgccaaattccccatcaagtggacggctccagaagctgccctctatggccgcttcaccatcaagtcggacgtgtggtccttcgggatcctgctgactgagctcaccacaaagggacgggtgccctaccctgggatggtgaaccgcgaggtgctggaccaggtggagcggggctaccggatgccctgcccgccggagtgtcccgagtccctgcacgacctcatgtgccagtgctggcggaaggagcctgaggagcggcccaccttcgagtacctgcaggccttcctggaggactacttcacgtccaccgagccccagtaccagcccggggagaacctctaggcacaggcgggcccagaccggcttctcggcttggatcctgggctgggtggcccctgtctcggggcttgccccactctgcctgcctgctgttggtcctctctctgtggggctgaattgccaggggcgaggcccttcctctttggtggcatggaaggggcttctggacctagggtggcctgagagggcggtgggtatgcgagaccagcacggtgactctgtccagctcccgctgtggccgcacgcctctccctgcactccctcctggagctctgtgggtctctggaagaggaaccaggagaagggctggggccggggctgagggtgcccttttccagcctcagcctactccgctcactgaactccttccccacttctgtgccacccccggtctatgtcgagagctggccaaagagcctttccaaagaggagcgatgggcccctggccccgcctgcctgccaccctgccccttgccatccattctggaaacacctgtaggcagaggctgccgagacagaccctctgccgctgcttccaggctgggcagcacaaggccttgcctggcctgatgatggtgggtgggtgggatgagtaccccctcaaaccctgccctccttagacctgagggacccttcgagatcatcacttccttgcccccatttcacccatggggagacagttgagagcggggatgtgacatgcccaaggccacggagcagttcagagtggaggcgggcttggaacccggtgctccctctgtcatcctcaggaaccaacaattcgtcggaggcatcatggaaagactgggacagcccaggaaacaaggggtctgaggatgcattcgagatggcagattcccactgccgctgcccgctcagcccagctgttgggaacagcatggaggcagatgtggggctgagctggggaatcagggtaaaaggtgcaggtgtggagagagaggcttcaatcggcttgtgggtgatgtttgaccttcagagccagccggctatgaaagggagcgagcccctcggctctggaggcaatcaagcagacatagaagagccaagagtccaggaggccctggtcctggcctccttccccgtactttgtcccgtggcatttcaattcctggccctgttctcctccccaagtcggcaccctttaactcatgaggagggaaaagagtgcctaagcgggggtgaaagaggacgtgttacccactgccatgcaccaggactggctgtgtaaccttgggtggcccctgctgtctctctgggctgcagagtctgccccacatgtggccatggcctctgcaactgctcagctctggtccaggccctgtggcaggacacacatggtgagcctagccctgggacatcaggagactgggctctggctctgttcggcctttgggtgtgtggtggattctccctgggcctcagtgtgcccatctgtaaaggggcagctgacagtttgtggcatcttgccaagggtccctgtgtgtgtgtatgtgtgtgcatgtgtgcgtgtctccatgtgcgtccatatttaacatgtaaaaatgtcccccccgctccgtcccccaaacatgttgtacatttcaccatggccccctcatcatagcaataacattcccactgccaggggttcttgagccagccaggccctgccagtggggaaggaggccaagcagtgcctgcctatgaaatttcaacttttcctttcatacgtctttattacccaagtcttctcccgtccattccagtcaaatctgggctcactcaccccagcgagctctcaaatccctctccaactgcctaaggccctttgtgtaaggtgtcttaatactgtccttttttttttttaacagtgttttgtagatttcagatgactatgcagaggcctgggggacccctggctctgggccgggcctggggctccgaaattccaaggcccagacttgcggggggtgggggggtatccagaattggttgtaaatactttgcatattgtctgattaaacacaaacagacctcagaattg

SEQ ID NO: 325117 - DNA, 4281 bp, Homo sapiens
caaacaagtgcggccatttcaccagcccaggctggcttctgctgttgactggctgtggcacctcaagcagcccctttcccctctagcctcagtttatcaccgcaagagctaccattcatctagcacaacctgaccatcctcacactggtcagttccaaccttcccaggaatcttctgtggccatgttcactccggttttacagaacagagaacagaagctcagagaagtgaagcaacttgcccagctatgagagacagagccaggatttgaaaccagatgaggacgctgaggcccagagagggaaagccacttgcctagggacacacagcggggagaggtggagcagggcctctatttcgagacccctgactccacacctggtgtttgtgccaagaccccaggctgcctcccaggtcctctgggacagcccctgccttctaccaggaccatgggtagcaacaagagcaagcccaaggatgccagccagcggcgccgcagcctggagcccgccgagaacgtgcacggcgctggcgggggcgctttccccgcctcgcagacccccagcaagccagcctcggccgacggccaccgcggccccagcgcggccttcgcccccgcggccgccgagcccaagctgttcggaggcttcaactcctcggacaccgtcacctccccgcagagggcgggcccgctggccggtggagtgaccacctttgtggccctctatgactatgagtctaggacggagacagacctgtccttcaagaaaggcgagcggctccagattgtcaacaacacagagggagactggtggctggcccactcgctcagcacaggacagacaggctacatccccagcaactacgtggcgccctccgactccatccaggctgaggagtgagtaccgtctctggctgcctctacccgtcgtccctggacactgccggtgcagagtgcctctcctgggctggggtgggaggtctggctgtccagcgccccagccatatccagggagaagcactgtgagtgggcagaagcctggacagtcagcaccatcctccgtcctcccacccccaggtggtattttggcaagatcaccagacgggagtcagagcggttactgctcaatgcagagaacccgagagggaccttcctcgtgcgagaaagtgagaccacgaaaggtgcctactgcctctcagtgtctgacttcgacaacgccaagggcctcaacgtgaagcactacaagatccgcaagctggacagcggcggcttctacatcacctcccgcacccagttcaacagcctgcagcagctggtggcctactactccaaacacgccgatggcctgtgccaccgcctcaccaccgtgtgccccacgtccaagccgcagactcagggcctggccaaggatgcctgggagatccctcgggagtcgctgcggctggaggtcaagctgggccagggctgctttggcgaggtgtggatggggacctggaacggtaccaccagggtggccatcaaaaccctgaagcctggcacgatgtctccagaggccttcctgcaggaggcccaggtcatgaagaagctgaggcatgagaagctggtgcagttgtatgctgtggtttcagaggagcccatttacatcgtcacggagtacatgagcaaggggagtttgctggactttctcaagggggagacaggcaagtacctgcggctgcctcagctggtggacatggctgctcagatcgcctcaggcatggcgtacgtggagcggatgaactacgtccaccgggaccttcgtgcagccaacatcctggtgggagagaacctggtgtgcaaagtggccgactttgggctggctcggctcattgaagacaatgagtacacggcgcggcaaggtgccaaattccccatcaagtggacggctccagaagctgccctctatggccgcttcaccatcaagtcggacgtgtggtccttcgggatcctgctgactgagctcaccacaaagggacgggtgccctaccctgggatggtgaaccgcgaggtgctggaccaggtggagcggggctaccggatgccctgcccgccggagtgtcccgagtccctgcacgacctcatgtgccagtgctggcggaaggagcctgaggagcggcccaccttcgagtacctgcaggccttcctggaggactacttcacgtccaccgagccccagtaccagcccggggagaacctctaggcacaggcgggcccagaccggcttctcggcttggatcctgggctgggtggcccctgtctcggggcttgccccactctgcctgcctgctgttggtcctctctctgtggggctgaattgccaggggcgaggcccttcctctttggtggcatggaaggggcttctggacctagggtggcctgagagggcggtgggtatgcgagaccagcacggtgactctgtccagctcccgctgtggccgcacgcctctccctgcactccctcctggagctctgtgggtctctggaagaggaaccaggagaagggctggggccggggctgagggtgcccttttccagcctcagcctactccgctcactgaactccttccccacttctgtgccacccccggtctatgtcgagagctggccaaagagcctttccaaagaggagcgatgggcccctggccccgcctgcctgccaccctgccccttgccatccattctggaaacacctgtaggcagaggctgccgagacagaccctctgccgctgcttccaggctgggcagcacaaggccttgcctggcctgatgatggtgggtgggtgggatgagtaccccctcaaaccctgccctccttagacctgagggacccttcgagatcatcacttccttgcccccatttcacccatggggagacagttgagagcggggatgtgacatgcccaaggccacggagcagttcagagtggaggcgggcttggaacccggtgctccctctgtcatcctcaggaaccaacaattcgtcggaggcatcatggaaagactgggacagcccaggaaacaaggggtctgaggatgcattcgagatggcagattcccactgccgctgcccgctcagcccagctgttgggaacagcatggaggcagatgtggggctgagctggggaatcagggtaaaaggtgcaggtgtggagagagaggcttcaatcggcttgtgggtgatgtttgaccttcagagccagccggctatgaaagggagcgagcccctcggctctggaggcaatcaagcagacatagaagagccaagagtccaggaggccctggtcctggcctccttccccgtactttgtcccgtggcatttcaattcctggccctgttctcctccccaagtcggcaccctttaactcatgaggagggaaaagagtgcctaagcgggggtgaaagaggacgtgttacccactgccatgcaccaggactggctgtgtaaccttgggtggcccctgctgtctctctgggctgcagagtctgccccacatgtggccatggcctctgcaactgctcagctctggtccaggccctgtggcaggacacacatggtgagcctagccctgggacatcaggagactgggctctggctctgttcggcctttgggtgtgtggtggattctccctgggcctcagtgtgcccatctgtaaaggggcagctgacagtttgtggcatcttgccaagggtccctgtgtgtgtgtatgtgtgtgcatgtgtgcgtgtctccatgtgcgtccatatttaacatgtaaaaatgtcccccccgctccgtcccccaaacatgttgtacatttcaccatggccccctcatcatagcaataacattcccactgccaggggttcttgagccagccaggccctgccagtggggaaggaggccaagcagtgcctgcctatgaaatttcaacttttcctttcatacgtctttattacccaagtcttctcccgtccattccagtcaaatctgggctcactcaccccagcgagctctcaaatccctctccaactgcctaaggccctttgtgtaaggtgtcttaatactgtccttttttttttttaacagtgttttgtagatttcagatgactatgcagaggcctgggggacccctggctctgggccgggcctggggctccgaaattccaaggcccagacttgcggggggtgggggggtatccagaattggttgtaaatactttgcatattgtctgattaaacacaaacagacctcagaattg

SEQ ID NO: 325118 - DNA, 3287 bp, Homo sapiens
caaacaagtgcggccatttcaccagcccaggctggcttctgctgttgactggctgtggcacctcaagcagcccctttcccctctagcctcagtttatcaccgcaagagctaccattcatctagcacaacctgaccatcctcacactggtcagttccaaccttcccaggaatcttctgtggccatgttcactccggttttacagaacagagaacagaagctcagagaagtgaagcaacttgcccagctatgagagacagagccaggatttgaaaccagatgaggacgctgaggcccagagagggaaagccacttgcctagggacacacagcggggagaggtggagcagggcctctatttcgagacccctgactccacacctggtgtttgtgccaagaccccaggctgcctcccaggtcctctgggacagcccctgccttctaccaggaccatgggtagcaacaagagcaagcccaaggatgccagccagcggcgccgcagcctggagcccgccgagaacgtgcacggcgctggcgggggcgctttccccgcctcgcagacccccagcaagccagcctcggccgacggccaccgcggccccagcgcggccttcgcccccgcggccgccgagcccaagctgttcggaggcttcaactcctcggacaccgtcacctccccgcagagggcgggcccgctggccggtggagtgaccacctttgtggccctctatgactatgagtctaggacggagacagacctgtccttcaagaaaggcgagcggctccagattgtcaacaacacagagggagactggtggctggcccactcgctcagcacaggacagacaggctacatccccagcaactacgtggcgccctccgactccatccaggctgaggagtggtattttggcaagatcaccagacgggagtcagagcggttactgctcaatgcagagaacccgagagggaccttcctcgtgcgagaaagtgagaccacgaaaggtgcctactgcctctcagtgtctgacttcgacaacgccaagggcctcaacgtgaagcactacaagatccgcaagctggacagcggcggcttctacatcacctcccgcacccagttcaacagcctgcagcagctggtggcctactactccaaacacgccgatggcctgtgccaccgcctcaccaccgtgtgccccacgtccaagccgcagactcagggcctggccaaggatgcctgggagatccctcgggagtcgctgcggctggaggtcaagctgggccagggctgctttggcgaggtgtggatggggacctggaacggtaccaccagggtggccatcaaaaccctgaagcctggcacgatgtctccagaggccttcctgcaggaggcccaggtcatgaagaagctgaggcatgagaagctggtgcagttgtatgctgtggtttcagaggagcccatttacatcgtcacggagtacatgagcaaggggagtttgctggactttctcaagggggagacaggcaagtacctgcggctgcctcagctggtggacatggctgctcagatcgcctcaggcatggcgtacgtggagcggatgaactacgtccaccgggaccttcgtgcagccaacatcctggtgggagagaacctggtgtgcaaagtggccgactttgggctggctcggctcattgaagacaatgagtacacggcgcggcaaggtgccaaattccccatcaagtggacggctccagaagctgccctctatggccgcttcaccatcaagtcggacgtgtggtccttcgggatcctgctgactgagctcaccacaaagggacgggtgccctaccctgggatggtgaaccgcgaggtgctggaccaggtggagcggggctaccggatgccctgcccgccggagtgtcccgagtccctgcacgacctcatgtgccagtgctggcggaaggagcctgaggagcggcccaccttcgagtacctgcaggccttcctggaggactacttcacgtccaccgagccccagtaccagcccggggagaacctctaggcacaggcgggcccagaccggcttctcggcttggatcctgggctgggtggcccctgtctcggggcttgccccactctgcctgcctgctgttggtcctctctctgtggggctgaattgccaggggcgaggcccttcctctttggtggcatggaaggggcttctggacctagggtggcctgagagggcggtgggtatgcgagaccagcacggtgactctgtccagctcccgctgtggccgcacgcctctccctgcactccctcctggagctctgtgggtctctggaagaggaaccaggagaagggctggggccggggctgagggtgcccttttccagcctcagcctactccgctcactgaactccttccccacttctgtgccacccccggtctatgtcgagagctggccaaagagcctttccaaagaggagcgatgggcccctggccccgcctgcctgccaccctgccccttgccatccattctggaaacacctgtaggcagaggctgccgagacagaccctctgccgctgcttccaggctgggcagcacaaggccttgcctggcctgatgatggtgggtgggtgggatgagtaccccctcaaaccctgccctccttagacctgagggacccttcgagatcatcacttccttgcccccatttcacccatggggagacagttgagagcggggatgtgacatgcccaaggccacggagcagttcagagtggaggcgggcttggaacccggtgctccctctgtcatcctcaggaaccaacaattcgtcggaggcatcatggaaagactgggacagcccaggaaacaaggggtctgaggatgcattcgagatggcagattcccactgccgctgcccgctcagcccagctgttgggaacagcatggaggcagatgtggggctgagctggggaatcagggtaaaaggtgcaggtgtggagagagaggcttcaatcggcttgtgggtgatgtttgaccttcagagccagccggctatgaaagggagcgagcccctcggctctggaggcaatcaagcagacatagaagagccaagagtccaggaggccctggtcctggcctccttccccgtactttgtcccgggcctggggctccgaaattccaaggcccagacttgcggggggtgggggggtatccagaattggttgtaaatactttgcatattgtctgattaaacacaaacagacctcagaattg

SEQ ID NO: 325119 - DNA, 1674 bp, Homo sapiens
caaacaagtgcggccatttcaccagcccaggctggcttctgctgttgactggctgtggcacctcaagcagcccctttcccctctagcctcagtttatcaccgcaagagctaccattcatctagcacaacctgaccatcctcacactggtcagttccaaccttcccaggaatcttctgtggccatgttcactccggttttacagaacagagaacagaagctcagagaagtgaagcaacttgcccagctatgagagacagagccaggatttgaaaccagatgaggacgctgaggcccagagagggaaagccacttgcctagggacacacagcggggagaggtggagcagggcctctatttcgagacccctgactccacacctggtgtttgtgccaagaccccaggctgcctcccaggtcctctgggacagcccctgccttctaccaggaccatgggtagcaacaagagcaagcccaaggatgccagccagcggcgccgcagcctggagcccgccgagaacgtgcacggcgctggcgggggcgctttccccgcctcgcagacccccagcaagccagcctcggccgacggccaccgcggccccagcgcggccttcgcccccgcggccgccgagcccaagctgttcggaggcttcaactcctcggacaccgtcacctccccgcagagggcgggcccgctggccggtggagtgaccacctttgtggccctctatgactatgagtctaggacggagacagacctgtccttcaagaaaggcgagcggctccagattgtcaacaacacagagggagactggtggctggcccactcgctcagcacaggacagacaggctacatccccagcaactacgtggcgccctccgactccatccaggctgaggagtggtattttggcaagatcaccagacgggagtcagagcggttactgctcaatgcagagaacccgagagggaccttcctcgtgcgagaaagtgagaccacgaaaggtgcctactgcctctcagtgtctgacttcgacaacgccaagggcctcaacgtgaagcactacaagatccgcaagctggacagcggcggcttctacatcacctcccgcacccagttcaacagcctgcagcagctggtggcctactactccaaacacgccgatggcctgtgccaccgcctcaccaccgtgtgccccacgtccaagccgcagactcagggcctggccaaggatgcctgggagatccctcgggagtcgctgcggctggaggtcaagctgggccagggctgctttggcgaggtgtggatggggacctggaacggtaccaccagggtggccatcaaaaccctgaagcctggcacgatgtctccagaggccttcctgcaggaggcccaggtcatgaagaagctgaggcatgagaagctggtgcagttgtatgctgtggtttcagaggagcccatttacatcgtcacggagtacatgagcaaggggagtttgctggactttctcaagggggagacaggcaagtacctgcggctgcctcagctggtggacatggctgctcaggtgagtcagcccctcccgcctccccacacccttggtcctcaagcacccagacccatctggtgcagccagttctggcctcttgagtgccccctccaagaagcctgccttg

SEQ ID NO: 325120 - DNA, 119 bp, Homo sapiens
acctctctgtgccctgacttttctatctttaaaatggacgtaacaacagaggtttaataataagaggtttggaggttaagtgctaaaatgcatataaaatacctagcacaggacacagt

SEQ ID NO: 325121 - DNA, 455 bp, Homo sapiens
aatacagttataatcactaacaagcaggaaacactttagggtaaatacaacaaaatatatagaacttgcatgctgaaaactacaaaatgctaacaaaagaagtcaaagaagacctaaataaatggagagatataccatgtttatgaattggaagagctaaaataattaaaatgtcaattctccccacactgatacacagtttatagtagattgagtaaaatctgtgaatatattcaggtcataatccctggaaggagtaaaatctgtgaatatattcaggtcataatccttggaacctctgaatgctatcttatataaaggaactgggctgggcatggtaactcacatctgtaatcccagcactttgggaggccgaggtgggccgatcacctgagatcaggagttcgagatcagactgtccaacatggtgaaaccccgtctctactaaacataca

SEQ ID NO: 325122 - DNA, 442 bp, Homo sapiens
ctggccgtggagcctttctgggttggggagaggaaaggaaagtggaaaaaacctgagaacttcctgatctctctcgctgtgagacatgtctgagactcctgctcagtgtagcattaaggtaaaaatcttctcccctccttctacgtggtggaaaccctgagctgcaccggccagggcagtcgtgctgggctcctcagagcaggctgttgcagttgctctgttcgcaggaaattatttggggcgcgagggaaggagatgcagctcgcggtggctgctgtaccctttagcgtaaccttgctactccccccccaccgccgagcccctgccggctcctcggcccccacccccttgctttttgacaatgaaatgccggtcacaattggtcagagcaacccggattgtctccagaaccgtaaaacacccccgtaattagtgcgcttaa

SEQ ID NO: 325123 - DNA, 884 bp, Homo sapiens
ctggccgtggagcctttctgggttggggagaggaaaggaaagtggaaaaaacctgagaacttcctgatctctctcgctgtgagacatgtctgagactcctgctcagtgtagcattaagcaatgctccaaggatgctttggaagactcattattcagagctgcagctggactgccttagacatctgcatttctctatctctgaaataagggactcaaacaagagcatcactcttttcctttccagctctaaaattatgtgatttttctttcacatgcaggaacgaatttcatatacacctccagagagcccagtgccgagttacgcttcctcgacgccacttcatgttccagtgcctcgagcgctcaggatggaggaagactcgatccgcctgcctgcgcacctgcgtgagtgttcgtgacccgagagggacagaggattgatggcgtggggcgggggtggcaggcagtgggctccaggccagagaggggcaagctctgaggtggttttcacaggacttcgccacgctgctttggaatctttcacacccccctacccccaaatacctttgaaaaatttgaggttcctgttccttgtttctcagtgtattcatttcttccctgactatgacatgttaaaaaaaaaagaaacctggaaacatgcagtatatggcagagccaactaaatctcctagtagacaagatgatttctgtgtgtgtgcaaagtttatctgtattctcaaattcacgcttactcaactttaatattttctttggtcctaaattttgctcagtttgtgagtcagactcacttctgctttgtttttaagctgtgcgctcgtcctttctttccagggccctccctcccctccctgtctgtgctggct

SEQ ID NO: 325124 - DNA, 1022 bp, Homo sapiens
aaaaaaaaaaaaaagatcattcggaaccgaatatgtgaagatcagggctgtgatctggtgaattgggagtgatttatgccacccaagcgagttgacctgaaccgctggggtccatcatcctgcttctgtttctgcactggcatttgtgttagtatttggtggaaggtggttcacttttggctgaagttggtggatgtgggcagagcaggattagttcctttcttctgccctctcttctagcaatgctccaaggatgctttggaagactcattattcagagctgcagctggactgccttagacatctgcatttctctatctctgaaataagggactcaaacaagagcatcactcttttcctttccagctctaaaattatgtgatttttctttcacatggtaagtgaaatagtcatctgagctgctgtagtaggttgagcttattgtatcccagatctgagtggttcaactccatgttcatgctgcccagttccaagagcacctctgtggccttcaaacagttgtacacagtctgtaaactgctcagccacttctcccagtcttctaagcaggcggtcaaagcacagcatggtaggcagcaagctctcatccaagcccgtatttcagcaggcaggcgatgctgaggtgctttaggccttcagtgcacacagatagatgcttcccctgagcctcagggaaagctttattttgcccacgttgtattccttcctgcatcgtatatgttaatgttgctctgccactccaaatacagcagtgtctgctcagttccattttcttccttttgcaaagagcaggcaaccagctatgccttcctgagagcagacaaacctggagccaagggggccacattttcagcttcaatagcaattgctgcagctcccttatttcatcacctattaggatgcgcaggcggcgctaagtgacacatagcccataaaacatatctgcttcctgctgatttcatggttctggaggacaggctgtgcacagggattcagacaga

SEQ ID NO: 325125 - DNA, 650 bp, Homo sapiens
cttatgttctgacccacccaaattactcaattttgaagatataaactttcaagtttcaataacatctctacttctggggaacttctttagcatttcttcatataaaccctgtggatatttagaaggtacctgtctgggaactacatatgtcaaaggggaactgtggtctcaggtttatgcctcttgcgggattaattactgaagtactcaaggccctccttttactgaatcccactgcagacctcgactctgatgtaacttgacaaagggcgaggatcctgcagaaggtcttggcatagtccctaactacgttcaacctttatttactcctggagacctgccagaagttaataaactaaccgtcatgaggaaacgtccctcattacaggagatgagataaagccccagcacccgtatctccactgttcttcccagttgccacagaccgtttatatgaagaaatgctaaagaagttccccagaagtagagatgttattgaaacttgaaagtttatatcttcaaaattgagtaatttggaagggacacaaacatacctgaaacattttgtctcatatcatcaattctgtatgtaatctcacaataagaaaactataaaacaaccatgtaaataaatcagactatcctaaata

SEQ ID NO: 325126 - DNA, 2399 bp, Homo sapiens
aaaaaaaaaaaaaagatcattcggaaccgaatatgtgaagatcagggctgtgatctggtgaattgggagtgatttatgccacccaagcgagttgacctgaaccgctggggtccatcatcctgcttctgtttctgcactggcatttgtgttagtatttggtggaaggtggttcacttttggctgaagttggtggatgtgggcagagcaggattagttcctttcttctgccctctcttctagcaatgctccaaggatgctttggaagactcattattcagagctgcagctggactgccttagacatctgcatttctctatctctgaaataagggactcaaacaagagcatcactcttttcctttccagctctaaaattatgtgatttttctttcacatgcaggaacgaatttcatatacacctccagagagcccagtgccgagttacgcttcctcgacgccacttcatgttccagtgcctcgagcgctcaggatggaggaagactcgatccgcctgcctgcgcacctgcgcttgcagccaatttactggagcagggatgacgtagcccagtggctcaagtgggctgaaaatgagttttctttaaggccaattgacagcaacacgtttgaaatgaatggcaaagctctcctgctgctgaccaaagaggactttcgctatcgatctcctcattcaggtgatgtgctctatgaactccttcagcatattctgaagcagaggaaacctcggattcttttttcaccattcttccaccctggaaactctatacacacacagccggaggtcatactgcatcagaaccatgaagaagataactgtgtccagaggacccccaggccatccgtggataatgtgcaccataaccctcccaccattgaactgttgcaccgctccaggtcacctatcacgacaaatcaccggccttctcctgaccccgagcagcggcccctccggtcccccctggacaacatgatccgccgcctctccccggctgagagagctcagggacccaggccgcaccaggagaacaaccaccaggagtcctaccctctgtcagtgtctcccatggagaataatcactgcccagcgtcctccgagtcccacccgaagccatccagcccccggcaggagagcacacgcgtgatccagctgatgcccagccccatcatgcaccctctgatcctgaacccccggcactccgtggatttcaaacagtccaggctctccgaggacgggctgcatagggaagggaagcccatcaacctctctcatcgggaagacctggcttacatgaaccacatcatggtctctgtctccccgcctgaagagcacgccatgcccattgggagaatagcagactgtagactgctttgggattacgtctatcagttgctttctgacagccggtacgaaaacttcatccgatgggaggacaaagaatccaaaatattccggatagtggatcccaacggactggctcgactgtggggaaaccataagaacagaacaaacatgacctatgagaaaatgtccagagccctgcgccactactacaaactaaacattatcaggaaggagccaggacaaaggcttttgttcaggtttatgaaaaccccagatgaaatcatgagtggccgaacagaccgtctggagcacctagagtcccaggagctggatgaacaaatataccaagaagatgaatgctgaaggaaccaacagtccacctcagcgggccagcagcccagggaacccctgcccaccaggattgctggaagtgtgacggagcaggcgggctgaggagagtggaaaaggaagcgacccagaaatggcagggacacttctcttgcagaccaagagggaccctggagcaccttagacaaactacccagcacaggcggggctggaattctggcggagggcatgagcctgggactccatgtcacgtttccttctgatttggaatctctccatctgtaattcctcaccctcacccttccaccgttgttagtatcatggtgtttttgtttttgtttttgttttaagaacctgcagtttgactcttcatcgttcatctaggggaagacatctgatgttgttttcctatggaaatatatatctattatatatatattttttgcaaatctcacaaagtgcggcaagcccagctggtcaggaaagagaatacttgcagaggggttcaggttcctctttttcctgccacgtggatcaggtctgttcctgttactgttgggtcttggctgaaaaaaaaaaatgcttttaaaaaagataaaatgaaaaggagagctctctttttctctctcttgctctgttcttcccttggtcccctctgtcctcccgccctgcctgcagttgagattcagat

SEQ ID NO: 325127 - DNA, 1075 bp, Homo sapiens
aaaaaaaaaaaaaagatcattcggaaccgaatatgtgaagatcagggctgtgatctggtgaattgggagtgatttatgccacccaagcgagttgacctgaaccgctggggtccatcatcctgcttctgtttctgcactggcatttgtgttagtatttggtggaaggtggttcacttttggctgaagttggtggatgtgggcagagcaggattagttcctttcttctgccctctcttctagcaatgctccaaggatgctttggaagactcattattcagagctgcagctggactgccttagacatctgcatttctctatctctgaaataagggactcaaacaagagcatcactcttttcctttccagctctaaaattatgtgatttttctttcacatggtaagtgaaatagtcatctgagctgctgtagtaggttgagcttattgtatcccagatctgagtggttcaactccatgttcatgctgcccagttccaagagcacctctgtggccttcaaacagttgtacacagtctgtaaactgctcagccacttctcccagtcttctaagcaggcaaagactccttatctcttagatctaaaatcattaggtagattttgattccaagggtcaaagcacagcatggtaggcagcaagctctcatccaagcccgtatttcagcaggcaggcgatgctgaggtgctttaggccttcagtgcacacagatagatgcttcccctgagcctcagggaaagctttattttgcccacgttgtattccttcctgcatcgtatatgttaatgttgctctgccactccaaatacagcagtgtctgctcagttccattttcttccttttgcaaagagcaggcaaccagctatgccttcctgagagcagacaaacctggagccaagggggccacattttcagcttcaatagcaattgctgcagctcccttatttcatcacctattaggatgcgcaggcggcgctaagtgacacatagcccataaaacatatctgcttcctgctgatttcatggttctggaggacaggctgtgcacagggattcagacaga

SEQ ID NO: 325128 - DNA, 1102 bp, Homo sapiens
aaaaaaaaaaaaaagatcattcggaaccgaatatgtgaagatcagggctgtgatctggtgaattgggagtgatttatgccacccaagcgagttgacctgaaccgctggggtccatcatcctgcttctgtttctgcactggcatttgtgttagtatttggtggaaggtggttcacttttggctgaagttggtggatgtgggcagagcaggattagttcctttcttctgccctctcttctagcaatgctccaaggatgctttggaagactcattattcagagctgcagctggactgccttagacatctgcatttctctatctctgaaataagggactcaaacaagagcatcactcttttcctttccagctctaaaattatgtgatttttctttcacatgcaggaacgaatttcatatacacctccagagagcccagtgccgagttacgcttcctcgacgccacttcatgttccagtgcctcgagcgctcaggatggaggaagactcgatccgcctgcctgcgcacctgcgcttgcagccaatttactggagcagggatgacgtagcccagtggctcaagtgggctgaaaatgagttttctttaaggccaattgacagcaacacgtttgaaatgaatggcaaagctctcctgctgctgaccaaagaggactttcgctatcgatctcctcattcagacctcgactctgatgtaacttgacaaagggcgaggatcctgcagaaggtcttggcatagtccctaactacgttcaacctttatttactcctggagacctgccagaagttaataaactaaccgtcatgaggaaacgtccctcattacaggagatgagataaagccccagcacccgtatctccactgttcttcccagttgccacagaccgtttatatgaagaaatgctaaagaagttccccagaagtagagatgttattgaaacttgaaagtttatatcttcaaaattgagtaatttggaagggacacaaacatacctgaaacattttgtctcatatcatcaattctgtatgtaatctcacaataagaaaactataaaacaaccatgtaaataaatcagactatcctaaata

SEQ ID NO: 325129 - DNA, 808 bp, Homo sapiens
aaaaaaaaaaaaaagatcattcggaaccgaatatgtgaagatcagggctgtgatctggtgaattgggagtgatttatgccacccaagcgagttgacctgaaccgctggggtccatcatcctgcttctgtttctgcactggcatttgtgttagtatttggtggaaggtggttcacttttggctgaagttggtggatgtgggcagagcaggattagttcctttcttctgccctctcttctagcaatgctccaaggatgctttggaagactcattattcagagctgcagctggactgccttagacatctgcatttctctatctctgaaataagggactcaaacaagagcatcactcttttcctttccagctctaaaattatgtgatttttctttcacatgcaggaacgaatttcatatacacctccagagagcccagtgccgagttacgcttcctcgacgccacttcatgttccagtgcctcgagcgctcaggatggaggaagactcgatccgcctgcctgcgcacctgcgttctggggattaggacacggacatttctatttggcagccaacattcagccatctccagtcactgagctacacagaatgaaaagcacctttgaagaatcgtaagccatgaatgatgacgggccgaagggagtgagggctcctacctcttgtcactcctaccatcctgcctccaggacccctgccacctacttgggagtctgcccttaaaactcaagggtcacctgactcattcctccccactcattcatctgactacccaccaaagctaagtgtgaacagc

SEQ ID NO: 325130 - DNA, 2120 bp, Homo sapiens
ctggccgtggagcctttctgggttggggagaggaaaggaaagtggaaaaaacctgagaacttcctgatctctctcgctgtgagacatgtctgagactcctgctcagtgtagcattaagcaggaacgaatttcatatacacctccagagagcccagtgccgagttacgcttcctcgacgccacttcatgttccagtgcctcgagcgctcaggatggaggaagactcgatccgcctgcctgcgcacctgcgcttgcagccaatttactggagcagggatgacgtagcccagtggctcaagtgggctgaaaatgagttttctttaaggccaattgacagcaacacgtttgaaatgaatggcaaagctctcctgctgctgaccaaagaggactttcgctatcgatctcctcattcaggtgatgtgctctatgaactccttcagcatattctgaagcagaggaaacctcggattcttttttcaccattcttccaccctggaaactctatacacacacagccggaggtcatactgcatcagaaccatgaagaagataactgtgtccagaggacccccaggccatccgtggataatgtgcaccataaccctcccaccattgaactgttgcaccgctccaggtcacctatcacgacaaatcaccggccttctcctgaccccgagcagcggcccctccggtcccccctggacaacatgatccgccgcctctccccggctgagagagctcagggacccaggccgcaccaggagaacaaccaccaggagtcctaccctctgtcagtgtctcccatggagaataatcactgcccagcgtcctccgagtcccacccgaagccatccagcccccggcaggagagcacacgcgtgatccagctgatgcccagccccatcatgcaccctctgatcctgaacccccggcactccgtggatttcaaacagtccaggctctccgaggacgggctgcatagggaagggaagcccatcaacctctctcatcgggaagacctggcttacatgaaccacatcatggtctctgtctccccgcctgaagagcacgccatgcccattgggagaatagcagactgtagactgctttgggattacgtctatcagttgctttctgacagccggtacgaaaacttcatccgatgggaggacaaagaatccaaaatattccggatagtggatcccaacggactggctcgactgtggggaaaccataagaacagaacaaacatgacctatgagaaaatgtccagagccctgcgccactactacaaactaaacattatcaggaaggagccaggacaaaggcttttgttcaggtttatgaaaaccccagatgaaatcatgagtggccgaacagaccgtctggagcacctagagtcccaggagctggatgaacaaatataccaagaagatgaatgctgaaggaaccaacagtccacctcagcgggccagcagcccagggaacccctgcccaccaggattgctggaagtgtgacggagcaggcgggctgaggagagtggaaaaggaagcgacccagaaatggcagggacacttctcttgcagaccaagagggaccctggagcaccttagacaaactacccagcacaggcggggctggaattctggcggagggcatgagcctgggactccatgtcacgtttccttctgatttggaatctctccatctgtaattcctcaccctcacccttccaccgttgttagtatcatggtgtttttgtttttgtttttgttttaagaacctgcagtttgactcttcatcgttcatctaggggaagacatctgatgttgttttcctatggaaatatatatctattatatatatattttttgcaaatctcacaaagtgcggcaagcccagctggtcaggaaagagaatacttgcagaggggttcaggttcctctttttcctgccacgtggatcaggtctgttcctgttactgttgggtcttggctgaaaaaaaaaaatgcttttaaaaaagataaaatgaaaaggagagctctctttttctctctcttgctctgttcttcccttggtcccctctgtcctcccgccctgcctgcagttgagattcagat

SEQ ID NO: 325131 - DNA, 634 bp, Homo sapiens
ctggccgtggagcctttctgggttggggagaggaaaggaaagtggaaaaaacctgagaacttcctgatctctctcgctgtgagacatgtctgagactcctgctcagtgtagcattaagcaggaacgaatttcatatacacctccagagagcccagtgccgagttacgcttcctcgacgccacttcatgttccagtgcctcgagcgctcaggatggaggaagactcgatccgcctgcctgcgcacctgcgcttgcagccaatttactggagcagggatgacgtagcccagtggctcaagtgggctgaaaatgagttttctttaaggccaattgacagcaacacgtttgaaatgaatggcaaagctctcctgctgctgaccaaagaggactttcgctatcgatctcctcattcaggtgatgtgctctatgaactccttcagcatattctgaagcagaggaaacctcggattcttttttcaccattcttccaccctggaaactctatacacacacagccggaggtcatactgcatcagaaccatgaagaagaagcccttcagcggccagtagcatctgactttgagcctcagggtctgagtgaagccgctcgttggaactccaaggaaaaccttctc

SEQ ID NO: 325132 - DNA, 1252 bp, Homo sapiens
aacaaatatggtcgacggtccaaatttggaatgaagggtcccgtggctgtcatcagtggtgaggaggactcagccagcccactgcaccacatcaaccacggcatcaccacgccctcgtcactggatgcggggcccgacactgtggtcattggcatgactcgcatccctgtcattgagaacccccagtacttccgtcagggacacaactgccacaagccggacacgtactgtagactgctttgggattacgtctatcagttgctttctgacagccggtacgaaaacttcatccgatgggaggacaaagaatccaaaatattccggatagtggatcccaacggactggctcgactgtggggaaaccataagaacagaacaaacatgacctatgagaaaatgtccagagccctgcgccactactacaaactaaacattatcaggaaggagccaggacaaaggcttttgttcaggtttatgaaaaccccagatgaaatcatgagtggccgaacagaccgtctggagcacctagagtcccaggagctggatgaacaaatataccaagaagatgaatgctgaaggaaccaacagtccacctcagcgggccagcagcccagggaacccctgcccaccaggattgctggaagtgtgacggagcaggcgggctgaggagagtggaaaaggaagcgacccagaaatggcagggacacttctcttgcagaccaagagggaccctggagcaccttagacaaactacccagcacaggcggggctggaattctggcggagggcatgagcctgggactccatgtcacgtttccttctgatttggaatctctccatctgtaattcctcaccctcacccttccaccgttgttagtatcatggtgtttttgtttttgtttttgttttaagaacctgcagtttgactcttcatcgttcatctaggggaagacatctgatgttgttttcctatggaaatatatatctattatatatatattttttgcaaatctcacaaagtgcggcaagcccagctggtcaggaaagagaatacttgcagaggggttcaggttcctctttttcctgccacgtggatcaggtctgttcctgttactgttgggtcttggctgaaaaaaaaaaatgcttttaaaaaagataaaatgaaaaggagagctctctttttctctctcttgctctgttcttcccttggtcccctctgtcctcccgccctgcctgcagttgagattcagat

SEQ ID NO: 325133 - DNA, 154 bp, Homo sapiens
gtgcaagtgtgctaggtaccatgatagtgatgaacgtgcggtgctgcaggagcacagaggtcactttgtgctctatcacagaatccctaaaagagtcttaaaaaaggaaacatacatgttcttcatgcagtaattatgcagagtcccattgtag

SEQ ID NO: 325134 - DNA, 444 bp, Homo sapiens
cttccctggtctctggtggggacgcggttctgcagggaaggcaatgcccacccagcctggcacatggggctccgtaaagctggggtgtcaacaacttctggctgtcactgcctgaacaatgttcccccgggccctgcctactgtcttgctgcccgccacccccacctccctgcagctttgaggctggcggggtctgctcctgggaatggggtgggagccacagggacgacccggggcgggctgatgtcttcttgggggcagaccagagagctcaagtttcagagtcagaattaggcacttggagcgtttttgctggcttgcactttcttattttcttattttagagcgcttaaaaaatccggaaaaatggggtttaaaagaactgtctctttcagtctacatttttgtttaatacgcttgagcaataaacgctgacttgcagaa

SEQ ID NO: 325135 - DNA, 1012 bp, Homo sapiens
attgatattcaggaagcagctctccttcccctgccttcagctcaagtttgctgagcttttgtttcatttgtgaatacttcttgctggaagtccctcacccagagaccagtgctcccaacggcagagcagcgggggagataaagaactggtgacacgtggctgtacattcagcacagctgtggtgtccccaagtgccatgacccaggagccattcagagaggagctggcctatgaccggatgcccacgctggagcggggccggcaagaccccgccagctatgccccagacgcgaagccgagcgacctgcagctgtcgaagagactgcccccctgcttcagccacaagacgtgggtcttctctgtgctgatggggtgcatcccctcggcaattgtgagcttcaccgtctccaggaggaacgccaatgtgattcccaactttcagatattgtttgtttccacgtttgctgtgaccactacgtgtttaatttggtttggatgcaaactagtcctgaacccatcagcaataaacatcaacttcaacctcatcctgctgctcctgctggagctgctcatggcggccacggtgatcatcgctgcacggtccagcgaggaggactgcaagaaaaagaagggctccatgtctgacagcgccaacattctggacgaagtgccatttcctgctcgggtcctgaaatcttactcagtcgtcgaggtaatcgcaggcatctctgccgtcctcggggggatcattgccctgaacgtggatgactcagtttcaggcccacacctctcagtgacgttcttttggatcctagtggccggccgtgagtaacccctctggcccgcccgccgccgctctgggccacactgctcagatcctgcgtggctgggccccgagctcagtcttggtgcattcagacagagagtcaccacagagggtcctcgctggcccccaacttcagaagaactggggagttaaggattaaatgagtcaaagtattaactgctttta

SEQ ID NO: 325136 - DNA, 314 bp, Homo sapiens
  misc_feature (16)..(16): n is a, c, g, or t
  misc_feature (21)..(21): n is a, c, g, or t
  misc_feature (36)..(36): n is a, c, g, or t
  misc_feature (38)..(38): n is a, c, g, or t
  misc_feature (65)..(65): n is a, c, g, or t
  misc_feature (88)..(89): n is a, c, g, or t
  misc_feature (106)..(106): n is a, c, g, or t
  misc_feature (127)..(127): n is a, c, g, or t
  misc_feature (133)..(134): n is a, c, g, or t
  misc_feature (181)..(181): n is a, c, g, or t
  misc_feature (185)..(185): n is a, c, g, or t
  misc_feature (188)..(188): n is a, c, g, or t
aatttaaagtgccctnaaaanattaatgtttatctnantattatgtaatatggaaattaaaaggnaaaaaaatccaaagacttactgnnaaaatataattgaagtnttttatatgatgaagtgctcnataaannaaatgtaaaaaaccaatagaaaatatatgaaataaaataaaattatncgtnaanggcactttcttattttcttattttagagcgcttaaaaaatccggaaaaatggggtttaaaagaactgtctctttcagtctacatttttgtttaatacgcttgagcaataaacgctgacttgcagaa

SEQ ID NO: 325137 - DNA, 3462 bp, Homo sapiens
attgatattcaggaagcagctctccttcccctgccttcagctcaagtttgctgagcttttgtttcatttgtgaatacttcttgctggaagtccctcacccagagaccagtgctcccaacggcagagcagcgggggagataaagaactggtgacacgtggctgtacattcagcacagctgtggtgtccccaagtgccatgacccaggagccattcagagaggagctggcctatgaccggatgcccacgctggagcggggccggcaagaccccgccagctatgccccagacgcgaagccgagcgacctgcagctgtcgaagagactgcccccctgcttcagccacaagacgtgggtcttctctgtgctgatggggagctgcctcctggtgacctcggggttttcgctgtacctggggaacgtgttcccggctgagatggattacttgcgctgtgctgcaggctcttgcatcccctcggcaattgtgagcttcaccgtctccaggaggaacgccaatgtgattcccaactttcagatattgtttgtttccacgtttgctgtgaccactacgtgtttaatttggtttggatgcaaactagtcctgaacccatcagcaataaacatcaacttcaacctcatcctgctgctcctgctggagctgctcatggcggccacggtgatcatcgctgcacggtccagcgaggaggactgcaagaaaaagaagggctccatgtctgacagcgccaacattctggacgaagtgccatttcctgctcgggtcctgaaatcttactcagtcgtcgaggtaatcgcaggcatctctgccgtcctcggggggatcattgccctgaacgtggatgactcagtttcaggcccacacctctcagtgacgttcttttggatcctagtggccgtggaggtcctgattgccataagcagcctcacgtctccgctgctgttcacagcctctggatatctgtcattcagcatcatgagaatcgtggagatgtttaaggattacccgccagccataaaaccatcctacgatgtgctgctgctgctgctgctgctagtgctcctgctgcaggccggcctcaacacgggcaccgccatccagtgcgtgcgcttcaaggtcagtgcaaggctgcagggtgcatcctgggacacccagaacggcccgcaggagcgcctggctggggaggtggccaggagccccctgaaggagttcgacaaggagaaagcctggagagccgtcgtggtgcaaatggcccagtgacccccagacgcggaaaccgggtggcagcgcccagcctggccccaagcatggaaacgcacaacccctaatcgccctgagctactgcttctaacacctcttttcccttgtgtgagggcaaaccaggctgcaggtggggttttcacttcctagggtagtttaattttaaaataggccaatgttggctagtctgtgcctcagtgagatcagtcagctccgagtggctcccgtgtcgtaacagcaggagcatggccgcaacttcccaggccgaggaagggcccccggctcggcctcttgagagccccacccctgaactggccccagctcctcttcctgcctctctcatggcttgggctggagtgggctctctggacctgaccagactgtgggtccctgcgtctcctgcccactctgaccgggcttcctccctccacgcttagggtctgtcccgggtactcagtcagcccagtgggatcttacccacttccctgcaaggtgcacctgccccaggctcaggctgcccagcggctcttcctggacagtgagagcagggctgggcgcctctgtcctggcccgggagccgcaggggcccctcctccagagcctgggcgcaagcgacacaggctgccgctgctctcccaggtgaaatccacaccagtccacgccgggtcgcctgccctgtctccctacttagacccagtcattctagagggatccaccgccacactggccggcccacgtcctgggtgctgtcatgcccagcttggagtgccacgtggccgctgcccacgtcccgggcactgtcatgcccagcttggagtgccacatggccgctgcccacgtcccgggcactgtcatgcccagcttggagtgccacgtggccgctgctgtgacaggcagtgttcttgggggtggggctgcatccaaggctttgtaaaccggctggaccacgtctccctggccccagtgaccgggggaagctgagcccctccctcctgtgtttgctcccattactcaaaatgcaggacagatcaggtcagagcccaggaattctcacaggttcacccagcgccctctacctcctagcaagtactttgtcttgatcctcactgagaaggccccagggcagcggtcttctccatctccgctgttttggggtcttagggtacagcccaggcggtcactgcccacctgccaggctgcagggacagttgggtgtgagaataacactggctttgggtagtgccatggccaggagtgggtttccctgcgtctcctcgtcccgagggcgcctgggtcctcccagctgacggcagtaaatccacagtgagttggggcgactgtgaaactggaatgctgttactttgataattactttccagcaggtgttttccttcacaatggttttgtttctttccttctgatctgagaagacatgaacgttttctcttcaccgccgtggggtgtattgactggtcccccatgggctgctggaaaggcccggagatgcatctgtggcctggggccatcaagatcaaagaaccaggaggcctgggagatgcagctggatggggcggcctgcagaccctgccagggggtttgaggaccctcccaggtttcccactgcggaacaggagtgactctggctgccaagataccttcatggtgttcatgacaagtggaatcattattttcaaccattgaagggggatgcaggcaagacaccttcccagctgctcctagaggggacaagccaggccctctctgcagtcctcggcagctccggaaggacacagtcaggggccgggcaaacactttggccacagccccaaacaagcgccaccgtgggagaggagaggctgctgtcactggtaccggatgcagaccccaccctgtctgcaggccacccccacctccctgcagctttgaggctggcggggtctgctcctgggaatggggtgggagccacagggacgacccggggcgggctgatgtcttcttgggggcagaccagagagctcaagtttcagagtcagaattaggcacttggagcgtttttgctggcttgcactttcttattttcttattttagagcgcttaaaaaatccggaaaaatggggtttaaaagaactgtctctttcagtctacatttttgtttaatacgcttgagcaataaacgctgacttgcagaa

SEQ ID NO: 325138 - DNA, 3429 bp, Homo sapiens
attgatattcaggaagcagctctccttcccctgccttcagctcaagtttgctgagcttttgtttcatttgtgaatacttcttgctggaagtccctcacccagagaccagtgctcccaacggcagagcagcgggggagataaagaactggtgacacgtggctgtacattcagcacagctgtggtgtccccaagtgccatgacccaggagccattcagagaggagctggcctatgaccggatgcccacgctggagcggggccggcaagaccccgccagctatgccccagacgcgaagccgagcgacctgcagctgtcgaagagactgcccccctgcttcagccacaagacgtgggtcttctctgtgctgatggggtgcatcccctcggcaattgtgagcttcaccgtctccaggaggaacgccaatgtgattcccaactttcagatattgtttgtttccacgtttgctgtgaccactacgtgtttaatttggtttggatgcaaactagtcctgaacccatcagcaataaacatcaacttcaacctcatcctgctgctcctgctggagctgctcatggcggccacggtgatcatcgctgcacggtccagcgaggaggactgcaagaaaaagaagggctccatgtctgacagcgccaacattctggacgaagtgccatttcctgctcgggtcctgaaatcttactcagtcgtcgaggtaatcgcaggcatctctgccgtcctcggggggatcattgccctgaacgtggatgactcagtttcaggcccacacctctcagtgacgttcttttggatcctagtggcctgctttccaagtgccattgccagtcatgtggcagcagagtgtcccagcaagtgtctggtggaggtcctgattgccataagcagcctcacgtctccgctgctgttcacagcctctggatatctgtcattcagcatcatgagaatcgtggagatgtttaaggattacccgccagccataaaaccatcctacgatgtgctgctgctgctgctgctgctagtgctcctgctgcaggccggcctcaacacgggcaccgccatccagtgcgtgcgcttcaaggtcagtgcaaggctgcagggtgcatcctgggacacccagaacggcccgcaggagcgcctggctggggaggtggccaggagccccctgaaggagttcgacaaggagaaagcctggagagccgtcgtggtgcaaatggcccagtgacccccagacgcggaaaccgggtggcagcgcccagcctggccccaagcatggaaacgcacaacccctaatcgccctgagctactgcttctaacacctcttttcccttgtgtgagggcaaaccaggctgcaggtggggttttcacttcctagggtagtttaattttaaaataggccaatgttggctagtctgtgcctcagtgagatcagtcagctccgagtggctcccgtgtcgtaacagcaggagcatggccgcaacttcccaggccgaggaagggcccccggctcggcctcttgagagccccacccctgaactggccccagctcctcttcctgcctctctcatggcttgggctggagtgggctctctggacctgaccagactgtgggtccctgcgtctcctgcccactctgaccgggcttcctccctccacgcttagggtctgtcccgggtactcagtcagcccagtgggatcttacccacttccctgcaaggtgcacctgccccaggctcaggctgcccagcggctcttcctggacagtgagagcagggctgggcgcctctgtcctggcccgggagccgcaggggcccctcctccagagcctgggcgcaagcgacacaggctgccgctgctctcccaggtgaaatccacaccagtccacgccgggtcgcctgccctgtctccctacttagacccagtcattctagagggatccaccgccacactggccggcccacgtcctgggtgctgtcatgcccagcttggagtgccacgtggccgctgcccacgtcccgggcactgtcatgcccagcttggagtgccacatggccgctgcccacgtcccgggcactgtcatgcccagcttggagtgccacgtggccgctgctgtgacaggcagtgttcttgggggtggggctgcatccaaggctttgtaaaccggctggaccacgtctccctggccccagtgaccgggggaagctgagcccctccctcctgtgtttgctcccattactcaaaatgcaggacagatcaggtcagagcccaggaattctcacaggttcacccagcgccctctacctcctagcaagtactttgtcttgatcctcactgagaaggccccagggcagcggtcttctccatctccgctgttttggggtcttagggtacagcccaggcggtcactgcccacctgccaggctgcagggacagttgggtgtgagaataacactggctttgggtagtgccatggccaggagtgggtttccctgcgtctcctcgtcccgagggcgcctgggtcctcccagctgacggcagtaaatccacagtgagttggggcgactgtgaaactggaatgctgttactttgataattactttccagcaggtgttttccttcacaatggttttgtttctttccttctgatctgagaagacatgaacgttttctcttcaccgccgtggggtgtattgactggtcccccatgggctgctggaaaggcccggagatgcatctgtggcctggggccatcaagatcaaagaaccaggaggcctgggagatgcagctggatggggcggcctgcagaccctgccagggggtttgaggaccctcccaggtttcccactgcggaacaggagtgactctggctgccaagataccttcatggtgttcatgacaagtggaatcattattttcaaccattgaagggggatgcaggcaagacaccttcccagctgctcctagaggggacaagccaggccctctctgcagtcctcggcagctccggaaggacacagtcaggggccgggcaaacactttggccacagccccaaacaagcgccaccgtgggagaggagaggctgctgtcactggtaccggatgcagaccccaccctgtctgcaggccacccccacctccctgcagctttgaggctggcggggtctgctcctgggaatggggtgggagccacagggacgacccggggcgggctgatgtcttcttgggggcagaccagagagctcaagtttcagagtcagaattaggcacttggagcgtttttgctggcttgcactttcttattttcttattttagagcgcttaaaaaatccggaaaaatggggtttaaaagaactgtctctttcagtctacatttttgtttaatacgcttgagcaataaacgctgacttgcagaa

SEQ ID NO: 325139 - DNA, 2803 bp, Homo sapiens
gagcaccgccgcctgccacactgtgagacagggaagggagtctgagggtcttggttttctgccctcaccactgtcaggtcgtcgaggtaatcgcaggcatctctgccgtcctcggggggatcattgccctgaacgtggatgactcagtttcaggcccacacctctcagtgacgttcttttggatcctagtggcctgctttccaagtgccattgccagtcatgtggcagcagagtgtcccagcaagtgtctggtggaggtcctgattgccataagcagcctcacgtctccgctgctgttcacagcctctggatatctgtcattcagcatcatgagaatcgtggagatgtttaaggattacccgccagccataaaaccatcctacgatgtgctgctgctgctgctgctgctagtgctcctgctgcaggccggcctcaacacgggcaccgccatccagtgcgtgcgcttcaaggtcagtgcaaggctgcagggtgcatcctgggacacccagaacggcccgcaggagcgcctggctggggaggtggccaggagccccctgaaggagttcgacaaggagaaagcctggagagccgtcgtggtgcaaatggcccagtgacccccagacgcggaaaccgggtggcagcgcccagcctggccccaagcatggaaacgcacaacccctaatcgccctgagctactgcttctaacacctcttttcccttgtgtgagggcaaaccaggctgcaggtggggttttcacttcctagggtagtttaattttaaaataggccaatgttggctagtctgtgcctcagtgagatcagtcagctccgagtggctcccgtgtcgtaacagcaggagcatggccgcaacttcccaggccgaggaagggcccccggctcggcctcttgagagccccacccctgaactggccccagctcctcttcctgcctctctcatggcttgggctggagtgggctctctggacctgaccagactgtgggtccctgcgtctcctgcccactctgaccgggcttcctccctccacgcttagggtctgtcccgggtactcagtcagcccagtgggatcttacccacttccctgcaaggtgcacctgccccaggctcaggctgcccagcggctcttcctggacagtgagagcagggctgggcgcctctgtcctggcccgggagccgcaggggcccctcctccagagcctgggcgcaagcgacacaggctgccgctgctctcccaggtgaaatccacaccagtccacgccgggtcgcctgccctgtctccctacttagacccagtcattctagagggatccaccgccacactggccggcccacgtcctgggtgctgtcatgcccagcttggagtgccacgtggccgctgcccacgtcccgggcactgtcatgcccagcttggagtgccacatggccgctgcccacgtcccgggcactgtcatgcccagcttggagtgccacgtggccgctgctgtgacaggcagtgttcttgggggtggggctgcatccaaggctttgtaaaccggctggaccacgtctccctggccccagtgaccgggggaagctgagcccctccctcctgtgtttgctcccattactcaaaatgcaggacagatcaggtcagagcccaggaattctcacaggttcacccagcgccctctacctcctagcaagtactttgtcttgatcctcactgagaaggccccagggcagcggtcttctccatctccgctgttttggggtcttagggtacagcccaggcggtcactgcccacctgccaggctgcagggacagttgggtgtgagaataacactggctttgggtagtgccatggccaggagtgggtttccctgcgtctcctcgtcccgagggcgcctgggtcctcccagctgacggcagtaaatccacagtgagttggggcgactgtgaaactggaatgctgttactttgataattactttccagcaggtgttttccttcacaatggttttgtttctttccttctgatctgagaagacatgaacgttttctcttcaccgccgtggggtgtattgactggtcccccatgggctgctggaaaggcccggagatgcatctgtggcctggggccatcaagatcaaagaaccaggaggcctgggagatgcagctggatggggcggcctgcagaccctgccagggggtttgaggaccctcccaggtttcccactgcggaacaggagtgactctggctgccaagataccttcatggtgttcatgacaagtggaatcattattttcaaccattgaagggggatgcaggcaagacaccttcccagctgctcctagaggggacaagccaggccctctctgcagtcctcggcagctccggaaggacacagtcaggggccgggcaaacactttggccacagccccaaacaagcgccaccgtgggagaggagaggctgctgtcactggtaccggatgcagaccccaccctgtctgcaggccacccccacctccctgcagctttgaggctggcggggtctgctcctgggaatggggtgggagccacagggacgacccggggcgggctgatgtcttcttgggggcagaccagagagctcaagtttcagagtcagaattaggcacttggagcgtttttgctggcttgcactttcttattttcttattttagagcgcttaaaaaatccggaaaaatggggtttaaaagaactgtctctttcagtctacatttttgtttaatacgcttgagcaataaacgctgacttgcagaa

SEQ ID NO: 325140 - DNA, 1952 bp, Homo sapiens
attgatattcaggaagcagctctccttcccctgccttcagctcaagtttgctgagcttttgtttcatttgtgaatacttcttgctggaagtccctcacccagagaccagtgctcccaacggcagagcagcgggggagataaagaactggtgacacgtggctgtacattcagcacagctgtggtgtccccaagtgccatgacccaggagccattcagagaggagctggcctatgaccggatgcccacgctggagcggggccggcaagaccccgccagctatgccccagacgcgaagccgagcgacctgcagctgtcgaagagactgcccccctgcttcagccacaagacgtgggtcttctctgtgctgatggggagctgcctcctggtgacctcggggttttcgctgtacctggggaacgtgttcccggctgagatggattacttgcgctgtgctgcaggctcttgcatcccctcggcaattgtgagcttcaccgtctccaggaggaacgccaatgtgattcccaactttcagatattgtttgtttccacgtttgctgtgaccactacgtgtttaatttggtttggatgcaaactagtcctgaacccatcagcaataaacatcaacttcaacctcatcctgctgctcctgctggagctgctcatggcggccacggtgatcatcgctgcacggtccagcgaggaggactgcaagaaaaagaagggctccatgtctgacagcgccaacattctggacgaagtgccatttcctgctcgggtcctgaaatcttactcagtcgtcgaggtaatcgcaggcatctctgccgtcctcggggggatcattgccctgaacgtggatgactcagtttcaggcccacacctctcagtgacgttcttttggatcctagtggcctgctttccaagtgccattgccagtcatgtggcagcagagtgtcccagcaagtgtctggtggaggtcctgattgccataagcagcctcacgtctccgctgctgttcacagcctctggatatctgtcattcagcatcatgagaatcgtggagatgtttaaggattacccgccagccataaaaccatcctacgatgtgctgctgctgctgctgctgctagtgctcctgctgcaggccggcctcaacacgggcaccgccatccagtgcgtgcgcttcaaggtcagtgcaaggctgcagggtgcatcctgggacacccagaacggcccgcaggagcgcctggctggggaggtggccaggagccccctgaaggagttcgacaaggagaaagcctggagagccgtcgtggtgcaaatggcccagtgacccccagacgcggaaaccgggtggcagcgcccagcctggccccaagcatggaaacgcacaacccctaatcgccctgagctactgcttctaacacctcttttcccttgtgtgagggcaaaccaggctgcaggtggggttttcacttcctagggtagtttaattttaaaataggccaatgttggctagtctgtgcctcagtgagatcagtcagctccgagtggctcccgtgtcgtaacagcaggagcatggccgcaacttcccaggccgaggaagggcccccggctcggcctcttgagagccccacccctgaactggccccagctcctcttcctgcctctctcatggcttgggctggagtgggctctctggacctgaccagactgtgggtccctgcgtctcctgcccactctgaccggggctgatgtcttcttgggggcagaccagagagctcaagtttcagagtcagaattaggcacttggagcgtttttgctggcttgcactttcttattttcttattttagagcgcttaaaaaatccggaaaaatggggtttaaaagaactgtctctttcagtctacatttttgtttaatacgcttgagcaataaacgctgacttgcagaa

SEQ ID NO: 325141 - DNA, 1714 bp, Homo sapiens
attgatattcaggaagcagctctccttcccctgccttcagctcaagtttgctgagcttttgtttcatttgtgaatacttcttgctggaagtccctcacccagagaccagtgctcccaacggcagagcagcgggggagataaagaactggtgacacgtggctgtacattcagcacagctgtggtgtccccaagtgccatgacccaggagccattcagagaggagctggcctatgaccggatgcccacgctggagcggggccggcaagaccccgccagctatgccccagacgcgaagccgagcgacctgcagctgtcgaagagactgcccccctgcttcagccacaagacgtgggtcttctctgtgctgatggggagctgcctcctggtgacctcggggttttcgctgtacctggggaacgtgttcccggctgagatggattacttgcgctgtgctgcaggctcttgcatcccctcggcaattgtgagcttcaccgtctccaggaggaacgccaatgtgattcccaactttcagatattgtttgtttccacgtttgctgtgaccactacgtgtttaatttggtttggatgcaaactagtcctgaacccatcagcaataaacatcaacttcaacctcatcctgctgctcctgctggagctgctcatggcggccacggtgatcatcgctgcacggtccagcgaggaggactgcaagaaaaagaagggctccatgtctgacagcgccaacattctggacgaagtgccatttcctgctcgggtcctgaaatcttactcagtcgtcgaggtaatcgcaggcatctctgccgtcctcggggggatcattgccctgaacgtggatgactcagtttcaggcccacacctctcagtgacgttcttttggatcctagtggcctgctttccaagtgccattgccagtcatgtggcagcagagtgtcccagcaagtgtctggtggaggtcctgattgccataagcagcctcacgtctccgctgctgttcacagcctctggatatctgtcattcagcatcatgagaatcgtggagatgtttaaggattacccgccagccataaaaccatcctacgatgtgctgctgctgctgctgctgctagtgctcctgctgcaggccggcctcaacacgggcaccgccatccagtgcgtgcgcttcaaggtcagtgcaaggctgcagggtgcatcctgggacacccagaacggcccgcaggagcgcctggctggggaggtggccaggagccccctgaaggagttcgacaaggagaaagcctggagagccgtcgtggtgcaaatggcccagtgacccccagacgcggaaaccgggtggcagcgcccagcctggccccaagcatggaaacgcacaacccctaatcgccctgagctactgcttctaacacgccacccccacctccctgcagctttgaggctggcggggtctgctcctgggaatggggtgggagccacagggacgacccggggcgggctgatgtcttcttgggggcagaccagagagctcaagtttcagagtcagaattaggcacttggagcgtttttgctggcttgcactttcttattttcttattttagagcgcttaaaaaatccggaaaaatggggtttaaaagaactgtctctttcagtctacatttttgtttaatacgcttgagcaataaacgctgacttgcagaa

SEQ ID NO: 325142 - DNA, 1706 bp, Homo sapiens
attgatattcaggaagcagctctccttcccctgccttcagctcaagtttgctgagcttttgtttcatttgtgaatacttcttgctggaagtccctcacccagagaccagtgctcccaacggcagagcagcgggggagataaagaactggtgacacgtggctgtacattcagcacagctgtggtgtccccaagtgccatgacccaggagccattcagagaggagctggcctatgaccggatgcccacgctggagcggggccggcaagaccccgccagctatgccccagacgcgaagccgagcgacctgcagctgtcgaagagactgcccccctgcttcagccacaagacgtgggtcttctctgtgctgatggggagctgcctcctggtgacctcggggttttcgctgtacctggggaacgtgttcccggctgagatggattacttgcgctgtgctgcaggctcttgcatcccctcggcaattgtgagcttcaccgtctccaggaggaacgccaatgtgattcccaactttcagatattgtttgtttccacgtttgctgtgaccactacgtgtttaatttggtttggatgcaaactagtcctgaacccatcagcaataaacatcaacttcaacctcatcctgctgctcctgctggagctgctcatggcggccacggtgatcatcgctgcacggtccagcgaggaggactgcaagaaaaagaagggctccatgtctgacagcgccaacattctggacgaagtgccatttcctgctcgggtcctgaaatcttactcagtcgtcgaggtaatcgcaggcatctctgccgtcctcggggggatcattgccctgaacgtggatgactcagtttcaggcccacacctctcagtgacgttcttttggatcctagtggcctgctttccaagtgccattgccagtcatgtggcagcagagtgtcccagcaagtgtctggtggaggtcctgattgccataagcagcctcacgtctccgctgctgttcacagcctctggatatctgtcattcagcatcatgagaatcgtggagatgtttaaggattacccgccagccataaaaccatcctacgatgtgctgctgctgctgctgctgctagtgctcctgctgcaggccggcctcaacacgggcaccgccatccagtgcgtgcgcttcaaggtcagtgcaaggctgcagggtgcatcctgggacacccagaacggcccgcaggagcgcctggctggggaggtggccaggagccccctgaaggagttcgacaaggagaaagcctggagagccgtcgtggtgcaaatggcccagtgacccccagacgcggaaaccgggtggcagcgcccagcctggccccaagcatggaaacgcacaacccctaatcgccctgagctactgcttctaacacctcttttcccttgtgtgagggcaaaccaggctgcaggtggggttttcacttcctagggtagtttaattttaaaataggctgatgtcttcttgggggcagaccagagagctcaagtttcagagtcagaattaggcacttggagcgtttttgctggcttgcactttcttattttcttattttagagcgcttaaaaaatccggaaaaatggggtttaaaagaactgtctctttcagtctacatttttgtttaatacgcttgagcaataaacgctgacttgcagaa

SEQ ID NO: 325143 - DNA, 1102 bp, Homo sapiens
attgatattcaggaagcagctctccttcccctgccttcagctcaagtttgctgagcttttgtttcatttgtgaatacttcttgctggaagtccctcacccagagaccagtgctcccaacggcagagcagcgggggagataaagaactggtgacacgtggctgtacattcagcacagctgtggtgtccccaagtgccatgacccaggagccattcagagaggagctggcctatgaccggatgcccacgctggagcggggccggcaagaccccgccagctatgccccagacgcgaagccgagcgacctgcagctgtcgaagagactgcccccctgcttcagccacaagacgtgggtcttctctgtgctgatggggagctgcctcctggtgacctcggggttttcgctgtacctggggaacgtgttcccggctgagatggattacttgcgctgtgctgcaggctcttgcatcccctcggcaattgtgagcttcaccgtctccaggaggaacgccaatgtgattcccaactttcagatattgtttgtttccacgtttgctgtgaccactacgtgtttaatttggtttggatgcaaactagtcctgaacccatcagcaataaacatcaacttcaacctcatcctgctgctcctgctggagctgctcatggcggccacggtgatcatcgctgcacggtccagcgaggaggactgcaagaaaaagaagggctccatgtctgacagcgccaacattctggacgaagtgccatttcctgctcgggtcctgaaatcttactcagtcgtcgaggtaatcgcaggcatctctgccgtcctcggggggatcattgccctgaacgtggatgactcagtttcaggcccacacctctcagtgacgttcttttggatcctagtggccggccgtgagtaacccctctggcccgcccgccgccgctctgggccacactgctcagatcctgcgtggctgggccccgagctcagtcttggtgcattcagacagagagtcaccacagagggtcctcgctggcccccaacttcagaagaactggggagttaaggattaaatgagtcaaagtattaactgctttta

SEQ ID NO: 325144 - DNA, 450 bp, Homo sapiens
gtcaggtgttgcacctggagggcccagatggatcaatgaggcatttaaagtgtagaatctcaccctgaacccagactattcaggtccgtttttctaggaaagttatttctttttcacttttagattcaagtgctcattttcttcttcaaatttagagcacttcagtatgaacaatatttcttttgttaaaaaatatttcttggaaacaacttattgaagtttcctcagagtggccaaagccgatgataattttattccagataaagaactggtgacacgtggctgtacattcagcacagctgtggtgtccccaagtgccatgacccaggagccattcagagaggagctggcctatgaccggatgcccacgctggagcggggccggcaagaccccgccagctatgccccagacgcgaagccgagcgacctgcagctgtcgaagagactgcc

SEQ ID NO: 325145 - DNA, 3519 bp, Homo sapiens
attgatattcaggaagcagctctccttcccctgccttcagctcaagtttgctgagcttttgtttcatttgtgaatacttcttgctggaagtccctcacccagagaccagtgctcccaacggcagagcagcgggggagataaagaactggtgacacgtggctgtacattcagcacagctgtggtgtccccaagtgccatgacccaggagccattcagagaggagctggcctatgaccggatgcccacgctggagcggggccggcaagaccccgccagctatgccccagacgcgaagccgagcgacctgcagctgtcgaagagactgcccccctgcttcagccacaagacgtgggtcttctctgtgctgatggggagctgcctcctggtgacctcggggttttcgctgtacctggggaacgtgttcccggctgagatggattacttgcgctgtgctgcaggctcttgcatcccctcggcaattgtgagcttcaccgtctccaggaggaacgccaatgtgattcccaactttcagatattgtttgtttccacgtttgctgtgaccactacgtgtttaatttggtttggatgcaaactagtcctgaacccatcagcaataaacatcaacttcaacctcatcctgctgctcctgctggagctgctcatggcggccacggtgatcatcgctgcacggtccagcgaggaggactgcaagaaaaagaagggctccatgtctgacagcgccaacattctggacgaagtgccatttcctgctcgggtcctgaaatcttactcagtcgtcgaggtaatcgcaggcatctctgccgtcctcggggggatcattgccctgaacgtggatgactcagtttcaggcccacacctctcagtgacgttcttttggatcctagtggcctgctttccaagtgccattgccagtcatgtggcagcagagtgtcccagcaagtgtctggtggaggtcctgattgccataagcagcctcacgtctccgctgctgttcacagcctctggatatctgtcattcagcatcatgagaatcgtggagatgtttaaggattacccgccagccataaaaccatcctacgatgtgctgctgctgctgctgctgctagtgctcctgctgcaggccggcctcaacacgggcaccgccatccagtgcgtgcgcttcaaggtcagtgcaaggctgcagggtgcatcctgggacacccagaacggcccgcaggagcgcctggctggggaggtggccaggagccccctgaaggagttcgacaaggagaaagcctggagagccgtcgtggtgcaaatggcccagtgacccccagacgcggaaaccgggtggcagcgcccagcctggccccaagcatggaaacgcacaacccctaatcgccctgagctactgcttctaacacctcttttcccttgtgtgagggcaaaccaggctgcaggtggggttttcacttcctagggtagtttaattttaaaataggccaatgttggctagtctgtgcctcagtgagatcagtcagctccgagtggctcccgtgtcgtaacagcaggagcatggccgcaacttcccaggccgaggaagggcccccggctcggcctcttgagagccccacccctgaactggccccagctcctcttcctgcctctctcatggcttgggctggagtgggctctctggacctgaccagactgtgggtccctgcgtctcctgcccactctgaccgggcttcctccctccacgcttagggtctgtcccgggtactcagtcagcccagtgggatcttacccacttccctgcaaggtgcacctgccccaggctcaggctgcccagcggctcttcctggacagtgagagcagggctgggcgcctctgtcctggcccgggagccgcaggggcccctcctccagagcctgggcgcaagcgacacaggctgccgctgctctcccaggtgaaatccacaccagtccacgccgggtcgcctgccctgtctccctacttagacccagtcattctagagggatccaccgccacactggccggcccacgtcctgggtgctgtcatgcccagcttggagtgccacgtggccgctgcccacgtcccgggcactgtcatgcccagcttggagtgccacatggccgctgcccacgtcccgggcactgtcatgcccagcttggagtgccacgtggccgctgctgtgacaggcagtgttcttgggggtggggctgcatccaaggctttgtaaaccggctggaccacgtctccctggccccagtgaccgggggaagctgagcccctccctcctgtgtttgctcccattactcaaaatgcaggacagatcaggtcagagcccaggaattctcacaggttcacccagcgccctctacctcctagcaagtactttgtcttgatcctcactgagaaggccccagggcagcggtcttctccatctccgctgttttggggtcttagggtacagcccaggcggtcactgcccacctgccaggctgcagggacagttgggtgtgagaataacactggctttgggtagtgccatggccaggagtgggtttccctgcgtctcctcgtcccgagggcgcctgggtcctcccagctgacggcagtaaatccacagtgagttggggcgactgtgaaactggaatgctgttactttgataattactttccagcaggtgttttccttcacaatggttttgtttctttccttctgatctgagaagacatgaacgttttctcttcaccgccgtggggtgtattgactggtcccccatgggctgctggaaaggcccggagatgcatctgtggcctggggccatcaagatcaaagaaccaggaggcctgggagatgcagctggatggggcggcctgcagaccctgccagggggtttgaggaccctcccaggtttcccactgcggaacaggagtgactctggctgccaagataccttcatggtgttcatgacaagtggaatcattattttcaaccattgaagggggatgcaggcaagacaccttcccagctgctcctagaggggacaagccaggccctctctgcagtcctcggcagctccggaaggacacagtcaggggccgggcaaacactttggccacagccccaaacaagcgccaccgtgggagaggagaggctgctgtcactggtaccggatgcagaccccaccctgtctgcaggccacccccacctccctgcagctttgaggctggcggggtctgctcctgggaatggggtgggagccacagggacgacccggggcgggctgatgtcttcttgggggcagaccagagagctcaagtttcagagtcagaattaggcacttggagcgtttttgctggcttgcactttcttattttcttattttagagcgcttaaaaaatccggaaaaatggggtttaaaagaactgtctctttcagtctacatttttgtttaatacgcttgagcaataaacgctgacttgcagaa

SEQ ID NO: 325146 - DNA, 3571 bp, Homo sapiens
gtagaggcatgttttgcaatctctcgtttagctaccaattggagcagtttaacgtgcttgagtccccggcgtgatgtgttcatggacgaagttgccgatggatgttgtcaggtgttgcacctggagggcccagatggatcaatgaggcatttaaagtgtagaatctcaccctgaacccagactattcagataaagaactggtgacacgtggctgtacattcagcacagctgtggtgtccccaagtgccatgacccaggagccattcagagaggagctggcctatgaccggatgcccacgctggagcggggccggcaagaccccgccagctatgccccagacgcgaagccgagcgacctgcagctgtcgaagagactgcccccctgcttcagccacaagacgtgggtcttctctgtgctgatggggagctgcctcctggtgacctcggggttttcgctgtacctggggaacgtgttcccggctgagatggattacttgcgctgtgctgcaggctcttgcatcccctcggcaattgtgagcttcaccgtctccaggaggaacgccaatgtgattcccaactttcagatattgtttgtttccacgtttgctgtgaccactacgtgtttaatttggtttggatgcaaactagtcctgaacccatcagcaataaacatcaacttcaacctcatcctgctgctcctgctggagctgctcatggcggccacggtgatcatcgctgcacggtccagcgaggaggactgcaagaaaaagaagggctccatgtctgacagcgccaacattctggacgaagtgccatttcctgctcgggtcctgaaatcttactcagtcgtcgaggtaatcgcaggcatctctgccgtcctcggggggatcattgccctgaacgtggatgactcagtttcaggcccacacctctcagtgacgttcttttggatcctagtggcctgctttccaagtgccattgccagtcatgtggcagcagagtgtcccagcaagtgtctggtggaggtcctgattgccataagcagcctcacgtctccgctgctgttcacagcctctggatatctgtcattcagcatcatgagaatcgtggagatgtttaaggattacccgccagccataaaaccatcctacgatgtgctgctgctgctgctgctgctagtgctcctgctgcaggccggcctcaacacgggcaccgccatccagtgcgtgcgcttcaaggtcagtgcaaggctgcagggtgcatcctgggacacccagaacggcccgcaggagcgcctggctggggaggtggccaggagccccctgaaggagttcgacaaggagaaagcctggagagccgtcgtggtgcaaatggcccagtgacccccagacgcggaaaccgggtggcagcgcccagcctggccccaagcatggaaacgcacaacccctaatcgccctgagctactgcttctaacacctcttttcccttgtgtgagggcaaaccaggctgcaggtggggttttcacttcctagggtagtttaattttaaaataggccaatgttggctagtctgtgcctcagtgagatcagtcagctccgagtggctcccgtgtcgtaacagcaggagcatggccgcaacttcccaggccgaggaagggcccccggctcggcctcttgagagccccacccctgaactggccccagctcctcttcctgcctctctcatggcttgggctggagtgggctctctggacctgaccagactgtgggtccctgcgtctcctgcccactctgaccgggcttcctccctccacgcttagggtctgtcccgggtactcagtcagcccagtgggatcttacccacttccctgcaaggtgcacctgccccaggctcaggctgcccagcggctcttcctggacagtgagagcagggctgggcgcctctgtcctggcccgggagccgcaggggcccctcctccagagcctgggcgcaagcgacacaggctgccgctgctctcccaggtgaaatccacaccagtccacgccgggtcgcctgccctgtctccctacttagacccagtcattctagagggatccaccgccacactggccggcccacgtcctgggtgctgtcatgcccagcttggagtgccacgtggccgctgcccacgtcccgggcactgtcatgcccagcttggagtgccacatggccgctgcccacgtcccgggcactgtcatgcccagcttggagtgccacgtggccgctgctgtgacaggcagtgttcttgggggtggggctgcatccaaggctttgtaaaccggctggaccacgtctccctggccccagtgaccgggggaagctgagcccctccctcctgtgtttgctcccattactcaaaatgcaggacagatcaggtcagagcccaggaattctcacaggttcacccagcgccctctacctcctagcaagtactttgtcttgatcctcactgagaaggccccagggcagcggtcttctccatctccgctgttttggggtcttagggtacagcccaggcggtcactgcccacctgccaggctgcagggacagttgggtgtgagaataacactggctttgggtagtgccatggccaggagtgggtttccctgcgtctcctcgtcccgagggcgcctgggtcctcccagctgacggcagtaaatccacagtgagttggggcgactgtgaaactggaatgctgttactttgataattactttccagcaggtgttttccttcacaatggttttgtttctttccttctgatctgagaagacatgaacgttttctcttcaccgccgtggggtgtattgactggtcccccatgggctgctggaaaggcccggagatgcatctgtggcctggggccatcaagatcaaagaaccaggaggcctgggagatgcagctggatggggcggcctgcagaccctgccagggggtttgaggaccctcccaggtttcccactgcggaacaggagtgactctggctgccaagataccttcatggtgttcatgacaagtggaatcattattttcaaccattgaagggggatgcaggcaagacaccttcccagctgctcctagaggggacaagccaggccctctctgcagtcctcggcagctccggaaggacacagtcaggggccgggcaaacactttggccacagccccaaacaagcgccaccgtgggagaggagaggctgctgtcactggtaccggatgcagaccccaccctgtctgcaggccacccccacctccctgcagctttgaggctggcggggtctgctcctgggaatggggtgggagccacagggacgacccggggcgggctgatgtcttcttgggggcagaccagagagctcaagtttcagagtcagaattaggcacttggagcgtttttgctggcttgcactttcttattttcttattttagagcgcttaaaaaatccggaaaaatggggtttaaaagaactgtctctttcagtctacatttttgtttaatacgcttgagcaataaacgctgacttgcagaa

SEQ ID NO: 325147 - DNA, 2680 bp, Homo sapiens
gctactgagacagagaactcacatgggtgcccacccaagcgggtctgtgacagagagaatgacgcctgcagtgctttccaagtgccattgccagtcatgtggcagcagagtgtcccagcaagtgtctggtggaggtcctgattgccataagcagcctcacgtctccgctgctgttcacagcctctggatatctgtcattcagcatcatgagaatcgtggagatgtttaaggattacccgccagccataaaaccatcctacgatgtgctgctgctgctgctgctgctagtgctcctgctgcaggccggcctcaacacgggcaccgccatccagtgcgtgcgcttcaaggtcagtgcaaggctgcagggtgcatcctgggacacccagaacggcccgcaggagcgcctggctggggaggtggccaggagccccctgaaggagttcgacaaggagaaagcctggagagccgtcgtggtgcaaatggcccagtgacccccagacgcggaaaccgggtggcagcgcccagcctggccccaagcatggaaacgcacaacccctaatcgccctgagctactgcttctaacacctcttttcccttgtgtgagggcaaaccaggctgcaggtggggttttcacttcctagggtagtttaattttaaaataggccaatgttggctagtctgtgcctcagtgagatcagtcagctccgagtggctcccgtgtcgtaacagcaggagcatggccgcaacttcccaggccgaggaagggcccccggctcggcctcttgagagccccacccctgaactggccccagctcctcttcctgcctctctcatggcttgggctggagtgggctctctggacctgaccagactgtgggtccctgcgtctcctgcccactctgaccgggcttcctccctccacgcttagggtctgtcccgggtactcagtcagcccagtgggatcttacccacttccctgcaaggtgcacctgccccaggctcaggctgcccagcggctcttcctggacagtgagagcagggctgggcgcctctgtcctggcccgggagccgcaggggcccctcctccagagcctgggcgcaagcgacacaggctgccgctgctctcccaggtgaaatccacaccagtccacgccgggtcgcctgccctgtctccctacttagacccagtcattctagagggatccaccgccacactggccggcccacgtcctgggtgctgtcatgcccagcttggagtgccacgtggccgctgcccacgtcccgggcactgtcatgcccagcttggagtgccacatggccgctgcccacgtcccgggcactgtcatgcccagcttggagtgccacgtggccgctgctgtgacaggcagtgttcttgggggtggggctgcatccaaggctttgtaaaccggctggaccacgtctccctggccccagtgaccgggggaagctgagcccctccctcctgtgtttgctcccattactcaaaatgcaggacagatcaggtcagagcccaggaattctcacaggttcacccagcgccctctacctcctagcaagtactttgtcttgatcctcactgagaaggccccagggcagcggtcttctccatctccgctgttttggggtcttagggtacagcccaggcggtcactgcccacctgccaggctgcagggacagttgggtgtgagaataacactggctttgggtagtgccatggccaggagtgggtttccctgcgtctcctcgtcccgagggcgcctgggtcctcccagctgacggcagtaaatccacagtgagttggggcgactgtgaaactggaatgctgttactttgataattactttccagcaggtgttttccttcacaatggttttgtttctttccttctgatctgagaagacatgaacgttttctcttcaccgccgtggggtgtattgactggtcccccatgggctgctggaaaggcccggagatgcatctgtggcctggggccatcaagatcaaagaaccaggaggcctgggagatgcagctggatggggcggcctgcagaccctgccagggggtttgaggaccctcccaggtttcccactgcggaacaggagtgactctggctgccaagataccttcatggtgttcatgacaagtggaatcattattttcaaccattgaagggggatgcaggcaagacaccttcccagctgctcctagaggggacaagccaggccctctctgcagtcctcggcagctccggaaggacacagtcaggggccgggcaaacactttggccacagccccaaacaagcgccaccgtgggagaggagaggctgctgtcactggtaccggatgcagaccccaccctgtctgcaggccacccccacctccctgcagctttgaggctggcggggtctgctcctgggaatggggtgggagccacagggacgacccggggcgggctgatgtcttcttgggggcagaccagagagctcaagtttcagagtcagaattaggcacttggagcgtttttgctggcttgcactttcttattttcttattttagagcgcttaaaaaatccggaaaaatggggtttaaaagaactgtctctttcagtctacatttttgtttaatacgcttgagcaataaacgctgacttgcagaa

SEQ ID NO: 325148 - DNA, 2288 bp, Homo sapiens
attgatattcaggaagcagctctccttcccctgccttcagctcaagtttgctgagcttttgtttcatttgtgaatacttcttgctggaagtccctcacccagagaccagtgctcccaacggcagagcagcgggggagataaagaactggtgacacgtggctgtacattcagcacagctgtggtgtccccaagtgccatgacccaggagccattcagagaggagctggcctatgaccggatgcccacgctggagcggggccggcaagaccccgccagctatgccccagacgcgaagccgagcgacctgcagctgtcgaagagactgcccccctgcttcagccacaagacgtgggtcttctctgtgctgatggggagctgcctcctggtgacctcggggttttcgctgtacctggggaacgtgttcccggctgagatggattacttgcgctgtgctgcaggctcttgcatcccctcggcaattgtgagcttcaccgtctccaggaggaacgccaatgtgattcccaactttcagatattgtttgtttccacgtttgctgtgaccactacgtgtttaatttggtttggatgcaaactagtcctgaacccatcagcaataaacatcaacttcaacctcatcctgctgctcctgctggagctgctcatggcggccacggtgatcatcgctgcacggtccagcgaggaggactgcaagaaaaagaagggctccatgtctgacagcgccaacattctggacgaagtgccatttcctgctcgggtcctgaaatcttactcagtcgtcgaggtaatcgcaggcatctctgccgtcctcggggggatcattgccctgaacgtggatgactcagtttcaggcccacacctctcagtgacgttcttttggatcctagtggcctgctttccaagtgccattgccagtcatgtggcagcagagtgtcccagcaagtgtctggtggaggtcctgattgccataagcagcctcacgtctccgctgctgttcacagcctctggatatctgtcattcagcatcatgagaatcgtggagatgtttaaggattacccgccagccataaaaccatcctacgatgtgctgctgctgctgctgctgctagtgctcctgctgcaggccggcctcaacacgggcaccgccatccagtgcgtgcgcttcaaggtcagtgcaaggctgcagggtgcatcctgggacacccagaacggcccgcaggagcgcctggctggggaggtggccaggagccccctgaaggagttcgacaaggagaaagcctggagagccgtcgtggtgcaaatggcccagtgacccccagacgcggaaaccgggtggcagcgcccagcctggccccaagcatggaaacgcacaacccctaatcgccctgagctactgcttctaacacctcttttcccttgtgtgagggcaaaccaggctgcaggtggggttttcacttcctagggtagtttaattttaaaataggccaatgttggctagtctgtgcctcagtgagatcagtcagctccgagtggctcccgtgtcgtaacagcaggagcatggccgcaacttcccaggccgaggaagggcccccggctcggcctcttgagagccccacccctgaactggccccagctcctcttcctgcctctctcatggcttgggctggagtgggctctctggacctgaccagactgtgggtccctgcgtctcctgcccactctgaccgggcttcctccctccacgcttagggtctgtcccgggtactcagtcagcccagtgggatcttacccacttccctgcaaggtgcacctgccccaggctcaggctgcccagcggctcttcctggacagtgagagcagggctgggcgcctctgtcctggcccgggagccgcaggggcccctcctccagagcctgggcgcaagcgacacaggctgccgctgctctcccaggtgaaatccacaccagtccacgccgggtcgccacccccacctccctgcagctttgaggctggcggggtctgctcctgggaatggggtgggagccacagggacgacccggggcgggctgatgtcttcttgggggcagaccagagagctcaagtttcagagtcagaattaggcacttggagcgtttttgctggcttgcactttcttattttcttattttagagcgcttaaaaaatccggaaaaatggggtttaaaagaactgtctctttcagtctacatttttgtttaatacgcttgagcaataaacgctgacttgcagaa

SEQ ID NO: 325149 - DNA, 2172 bp, Homo sapiens
attgatattcaggaagcagctctccttcccctgccttcagctcaagtttgctgagcttttgtttcatttgtgaatacttcttgctggaagtccctcacccagagaccagtgctcccaacggcagagcagcgggggagataaagaactggtgacacgtggctgtacattcagcacagctgtggtgtccccaagtgccatgacccaggagccattcagagaggagctggcctatgaccggatgcccacgctggagcggggccggcaagaccccgccagctatgccccagacgcgaagccgagcgacctgcagctgtcgaagagactgcccccctgcttcagccacaagacgtgggtcttctctgtgctgatggggagctgcctcctggtgacctcggggttttcgctgtacctggggaacgtgttcccggctgagatggattacttgcgctgtgctgcaggctcttgcatcccctcggcaattgtgagcttcaccgtctccaggaggaacgccaatgtgattcccaactttcagatattgtttgtttccacgtttgctgtgaccactacgtgtttaatttggtttggatgcaaactagtcctgaacccatcagcaataaacatcaacttcaacctcatcctgctgctcctgctggagctgctcatggcggccacggtgatcatcgctgcacggtccagcgaggaggactgcaagaaaaagaagggctccatgtctgacagcgccaacattctggacgaagtgccatttcctgctcgggtcctgaaatcttactcagtcgtcgaggtaatcgcaggcatctctgccgtcctcggggggatcattgccctgaacgtggatgactcagtttcaggcccacacctctcagtgacgttcttttggatcctagtggcctgctttccaagtgccattgccagtcatgtggcagcagagtgtcccagcaagtgtctggtggaggtcctgattgccataagcagcctcacgtctccgctgctgttcacagcctctggatatctgtcattcagcatcatgagaatcgtggagatgtttaaggattacccgccagccataaaaccatcctacgatgtgctgctgctgctgctgctgctagtgctcctgctgcaggccggcctcaacacgggcaccgccatccagtgcgtgcgcttcaaggtcagtgcaaggctgcagggtgcatcctgggacacccagaacggcccgcaggagcgcctggctggggaggtggccaggagccccctgaaggagttcgacaaggagaaagcctggagagccgtcgtggtgcaaatggcccagtgacccccagacgcggaaaccgggtggcagcgcccagcctggccccaagcatggaaacgcacaacccctaatcgccctgagctactgcttctaacacctcttttcccttgtgtgagggcaaaccaggctgcaggtggggttttcacttcctagggtagtttaattttaaaataggccaatgttggctagtctgtgcctcagtgagatcagtcagctccgagtggctcccgtgtcgtaacagcaggagcatggccgcaacttcccaggccgaggaagggcccccggctcggcctcttgagagccccacccctgaactggccccagctcctcttcctgcctctctcatggcttgggctggagtgggctctctggacctgaccagactgtgggtccctgcgtctcctgcccactctgaccgggcttcctccctccacgcttagggtctgtcccgggtactcagtcagcccagtgggatcttacccacttccctgcaaggtgcacctgccccaggctcaggctgcccagcggctcttcctggacagtgagagcagggctgggcgcctctgtcctggcccgggagccgcaggggcccctcctccagagcctgggcgcaagcgacacaggctgccgctgctctcccaggtgaaactttggacacgcacttttgagttaatgctggaataagttaagactttcagtctgttgggaaggcatgattggttttgaaatgtgagaagaaggacatgacacttgggaggggccagaggagaaatcatatggcttggccctctgtccccacccaaatctcatctcaaattgtaatcccctcatgtcagacgacggca

SEQ ID NO: 325150 - DNA, 1056 bp, Homo sapiens
attgatattcaggaagcagctctccttcccctgccttcagctcaagtttgctgagcttttgtttcatttgtgaatacttcttgctggaagtccctcacccagagaccagtgctcccaacggcagagcagcgggggagataaagaactggtgacacgtggctgtacattcagcacagctgtggtgtccccaagtgccatgacccaggagccattcagagaggagctggcctatgaccggatgcccacgctggagcggggccggcaagaccccgccagctatgccccagacgcgaagccgagcgacctgcagctgtcgaagagactgcccccctgcttcagccacaagacgtgggtcttctctgtgctgatggggagctgcctcctggtgacctcggggttttcgctgtacctggggaacgtgttcccggctgagatggattacttgcgctgtgctgcaggctcttgcatcccctcggcaattgtgagcttcaccgtctccaggaggaacgccaatgtgattcccaactttcagatattgtttgtttccacgtttgctgtgaccactacgtgtttaatttggtttggatgcaaactagtcctgaacccatcagcaataaacatcaacttcaacctcatcctgctgctcctgctggagctgctcatggcggccacggtgatcatcgctgcacggtccagcgaggaggactgcaagaaaaagaagggctccatgtctgacagcgccaacattctggacgaagtgccatttcctgctcgggtcctgaaatcttactcagtcgtcgaggtaatcgcaggcatctctgccgtcctcggggggatcattgccctgaacgtggatgactcagtttcaggcccacacctctcagtgacgttcttttggatcctagtggccttggagcgtttttgctggcttgcactttcttattttcttattttagagcgcttaaaaaatccggaaaaatggggtttaaaagaactgtctctttcagtctacatttttgtttaatacgcttgagcaataaacgctgacttgcagaa

SEQ ID NO: 325151 - DNA, 875 bp, Homo sapiens
gctactgagacagagaactcacatgggtgcccacccaagcgggtctgtgacagagagaatgacgcctgcagtgctttccaagtgccattgccagtcatgtggcagcagagtgtcccagcaagtgtctggtggaggtcctgattgccataagcagcctcacgtctccgctgctgttcacagcctctggatatctgtcattcagcatcatgagaatcgtggagatgtttaaggattacccgccagccataaaaccatcctacgatgtgctgctgctgctgctgctgctagtgctcctgctgcaggccggcctcaacacgggcaccgccatccagtgcgtgcgcttcaaggtcagtgcaaggctgcagggtgcatcctgggacacccagaacggcccgcaggagcgcctggctggggaggtggccaggagccccctgaaggagttcgacaaggagaaagcctggagagccgtcgtggtgcaaatggcccagtgacccccagacgcggaaaccgggtggcagcgcccagcctggccccaagcatggaaacgcacaacccctaatcgccctgagctactgcttctaacacgccacccccacctccctgcagctttgaggctggcggggtctgctcctgggaatggggtgggagccacagggacgacccggggcgggctgatgtcttcttgggggcagaccagagagctcaagtttcagagtcagaattaggcacttggagcgtttttgctggcttgcactttcttattttcttattttagagcgcttaaaaaatccggaaaaatggggtttaaaagaactgtctctttcagtctacatttttgtttaatacgcttgagcaataaacgctgacttgcagaa

SEQ ID NO: 325152 - DNA, 532 bp, Homo sapiens
ccggccgcggaccggctgcgagagacgacagaaggggctctcgttccccggccatcttagcggctgctgttggttgggggccgtcccgctcctaaggcaggaagatggtggccgcaaagaagacgaaaaagtcgctggagtcgatcaactctaggctccaactcgttatgaaaagtgggaagtacgtcctggggtacaagcagactctgaagatgatcagacaaggcaaagcgaaattggtcattctcgctaacaactgcccagctttgaggaaatctgaaatagagtactatgctatgttggctaaaactggtgtccatcactacagtggcaataatattgaactgggcacagcatgcggaaaatactacagagtgtgcacactggctatcattgatccaggtgactctgacatcattagaagcatgccagaacagactggtgaaaagtaaaccttttcacctacaaaatttcacctgcaaaccttaaacctgcaaaattttcctttaataaaatttgcttgttttaaaaa

SEQ ID NO: 325153 - DNA, 518 bp, Homo sapiens
gcgtgccgctactactactaaattcgcggccgcgtcgacatcttagcggctgctgttggttgggggccgtcccgctcctaaggcaggaagatggtggccgcaaagaagacgaaaaagtcgctggagtcgatcaactctaggctccaactcgttatgaaaagtgggaagtacgtcctggggtacaagcagactctgaagatgatcagacaaggcaaagcgaaattggtcattctcgctaacaactgcccagctttgaggaaatctgaaatagagtactatgctatgttggctaaaactggtgtccatcactacagtggcaataatattgaactgggcacagcatgcggaaaatactacagagtgtgcacactggctatcattgatccaggtgactctgacatcattagaagcatgccagaacagactggtgaaaagtaaaccttttcacctacaaaatttcacctgcaaaccttaaacctgcaaaattttcctttaataaaatttgcttgttttaaaaa

SEQ ID NO: 325154 - DNA, 505 bp, Homo sapiens
cggacgcgtgggtcgacccacgcgtccgcttagcggctgctgttggttgggggccgtcccgctcctaaggcaggaagatggtggccgcaaagaagacgaaaaagtcgctggagtcgatcaactctaggctccaactcgttatgaaaagtgggaagtacgtcctggggtacaagcagactctgaagatgatcagacaaggcaaagcgaaattggtcattctcgctaacaactgcccagctttgaggaaatctgaaatagagtactatgctatgttggctaaaactggtgtccatcactacagtggcaataatattgaactgggcacagcatgcggaaaatactacagagtgtgcacactggctatcattgatccaggtgactctgacatcattagaagcatgccagaacagactggtgaaaagtaaaccttttcacctacaaaatttcacctgcaaaccttaaacctgcaaaattttcctttaataaaatttgcttgttttaaaaa

SEQ ID NO: 325155 - DNA, 790 bp, Homo sapiens
gcgtgccgctactactactaaattcgcggccgcgtcgacatcttagcggctgctgttggttgggggccgtcccgctcctaaggcaggaagatggtggccgcaaagaagacgaaaaagtcgctggagtcgatcaactctaggctccaactcgttatgaaaagtgggaagtacgtcctggggtacaagcagactctgaagatgatcagacaaggcaaagcgaaattggtcattctcgctaacaactgcccagctttgaggaaatctgaaatagagtactatgctatgttggctaaaactggtgtccatcactacagtggcaataatattgaactgggcacagcatgcggaaaatactacagagtgtgcacactggctatcattgatccaggtgactctgacatcattagaagcatgccagaacagactggtgaaaagtaaaccttttcacctacaaaatttcacctgcaaaccttaaacctgcaaaattttcctttaataaaatttgcttgttttaaaaacaaacaaaaacaaaaaaaaaaaaaaaagaaaaaaaaaaaaaggggggggagggcagcaaaaaagataatccacccaacgagggccccaagtcaagaaggccagcaccagtcattcgagacaacagggcgcccatagaagcggcagataacaacgccaagcgactagcgccgcatctacaaccaggagcgtaaagcaggaaacagcgcgcgcacgctactatgtgcaacgccaccacccggaggagcaacactgggcacaacccaggagcaac

SEQ ID NO: 325156 - DNA, 779 bp, Homo sapiens
  misc_feature (596)..(596): n is a, c, g, or t
  misc_feature (600)..(600): n is a, c, g, or t
  misc_feature (602)..(602): n is a, c, g, or t
cggacgcgtgggtcgacccacgcgtccgcttagcggctgctgttggttgggggccgtcccgctcctaaggcaggaagatggtggccgcaaagaagacgaaaaagtcgctggagtcgatcaactctaggctccaactcgttatgaaaagtgggaagtacgtcctggggtacaagcagactctgaagatgatcagacaaggcaaagcgaaattggtcattctcgctaacaactgcccagctttgaggaaatctgaaatagagtactatgctatgttggctaaaactggtgtccatcactacagtggcaataatattgaactgggcacagcatgcggaaaatactacagagtgtgcacactggctatcattgatccaggtgactctgacatcattagaagcatgccagaacagactggtgaaaagtaaaccttttcacctacaaaatttcacctgcaaaccttaaacctgcaaaattttcctttaataaaatttgcttgttttaaaaaaaaaaaaaaaaaaaaaaaaaaaaaaaaaaaaaaaaaacaaaacaaaaaaaaaaaaaaaaaaaaaaaaaaaaggggggggggccccaaaaancccncngggggggccacaaagacgcgccccccgcgtctgacggagcaaaaggggcggccaacagacgggcgccgcgcaaacacagacacggcggcggcggcggccggacaacacaaaggccggcgagggaggacaaccgacgagcgggcggaacccggaaagaacaccccccccggcgggaga

SEQ ID NO: 325157 - DNA, 786 bp, Homo sapiens
tacggctaggtacgaggctgggtggtggtggttgggggccgtcccgctcctaaggcaggaagatggtggccgcaaagaagacgaaaaagtcgctggagtcgatcaactctaggctccaactcgttatgaaaagtgggaagtacgtcctggggtacaagcagactctgaagatgatcagacaaggcaaagcgaaattggtcattctcgctaacaactgcccagctttgaggaaatctgaaatagagtactatgctatgttggctaaaactggtgtccatcactacagtggcaataatattgaactgggcacagcatgcggaaaatactacagagtgtgcacactggctatcattgatccaggtgactctgacatcattagaagcatgccagaacagactggtgaaaagtaaaccttttcacctacaaaatttcacctgcaaaccttaaacctgcaaaattttcctttaataaaatttgcttgttttaaaaaaaaaaaaaaaaaaaaaataaaaaacaaacaaaaacaaaaaaaaaaaaaaaagaaaaaaaaaaaaaggggggggagggcagcaaaaaagataatccacccaacgagggccccaagtcaagaaggccagcaccagtcattcgagacaacagggcgcccatagaagcggcagataacaacgccaagcgactagcgccgcatctacaaccaggagcgtaaagcaggaaacagcgcgcgcacgctactatgtgcaacgccaccacccggaggagcaacactgggcacaacccaggagcaac

SEQ ID NO: 325158 - DNA, 468 bp, Homo sapiens
ggaggctgcagtgagctaagatcataccactgcacttcaggcctgggcgtcagagtgagaccctgtttctaaaataataataattttaaaaaatgatatttatggttgcattgggaagtacgtcctggggtacaagcagactctgaagatgatcagacaaggcaaagcgaaattggtcattctcgctaacaactgcccagctttgaggaaatctgaaatagagtactatgctatgttggctaaaactggtgtccatcactacagtggcaataatattgaactgggcacagcatgcggaaaatactacagagtgtgcacactggctatcattgatccaggtgactctgacatcattagaagcatgccagaacagactggtgaaaagtaaaccttttcacctacaaaatttcacctgcaaaccttaaacctgcaaaattttcctttaataaaatttgcttgttttaaaaa

SEQ ID NO: 325159 - DNA, 355 bp, Homo sapiens
gcggccgcctactactactactactaattacgcgcgctcgacagaaaggcaaagcgaaattggtcattctcgctaacaactgcccagctttgaggaaatctgaaatagagtactatgctatgttggctaaaactggtgtccatcactacagtggcaataatattgaactgggcacagcatgcggaaaatactacagagtgtgcacactggctatcattgatccaggtgactctgacatcattagaagcatgccagaacagactggtgaaaagtaaaccttttcacctacaaaatttcacctgcaaaccttaaacctgcaaaattttcctttaataaaatttgcttgttttaaaaa

SEQ ID NO: 325160 - DNA, 512 bp, Homo sapiens
  misc_feature (1)..(1): n is a, c, g, or t
  misc_feature (62)..(64): n is a, c, g, or t
  misc_feature (69)..(69): n is a, c, g, or t
  misc_feature (71)..(71): n is a, c, g, or t
  misc_feature (82)..(82): n is a, c, g, or t
nattttaggtgaacactatgagacacaagttatgtaacaaaaaaagacaggtctggtacccnnncccgnancccccgcgccnccgcccccccttagccccctcctcttggttgggggccgtcccgctcctaaggcaggaagatggtggccgcaaagaagacgaaaaagtcgctggagtcgatcaactctaggctccaactcgttatgaaaagtgggaagtacgtcctggggtacaagcagactctgaagatgatcagacaaggcaaagcgaaattggtcattctcgctaacaactgcccagctttgagtggcaataatattgaactgggcacagcatgcggaaaatactacagagtgtgcacactggctatcattgatccaggtgactctgacatcattagaagcatgccagaacagactggtgaaaagtaaaccttttcacctacaaaatttcacctgcaaaccttaaacctgcaaaattttcctttaataaaatttgcttgttttaaaaa

SEQ ID NO: 325161 - DNA, 681 bp, Homo sapiens
  misc_feature (498)..(498): n is a, c, g, or t
  misc_feature (502)..(502): n is a, c, g, or t
  misc_feature (504)..(504): n is a, c, g, or t
gcgtgccgctactactactaaattcgcggccgcgtcgaaaaaagtcgctggagtcgatcaactctaggctccaactcgttatgaaaagtgggaagtacgtcctggggtacaagcagactctgaagatgatcagacaaggcaaagcgaaattggtcattctcgctaacaactgcccagctttgaggaaatctgaaatagagtactatgctatgttggctaaaactggtgtccatcactacagtggcaataatattgaactgggcacagcatgcggaaaatactacagagtgtgcacactggctatcattgatccaggtgactctgacatcattagaagcatgccagaacagactggtgaaaagtaaaccttttcacctacaaaatttcacctgcaaaccttaaacctgcaaaattttcctttaataaaatttgcttgttttaaaaaaaaacaaaaaaaaaaaaaaaaaaaaaaaaaaaaggggggggggccccaaaaancccncngggggggccacaaagacgcgccccccgcgtctgacggagcaaaaggggcggccaacagacgggcgccgcgcaaacacagacacggcggcggcggcggccggacaacacaaaggccggcgagggaggacaaccgacgagcgggcggaacccggaaagaacaccccccccggcgggaga

SEQ ID NO: 325162 - DNA, 314 bp, Homo sapiens
acagcagcgcgtgctgtccggacagcacgcgctaacaactgcccagctttgaggaaatctgaaatagagtactatgctatgttggctaaaactggtgtccatcactacagtggcaataatattgaactgggcacagcatgcggaaaatactacagagtgtgcacactggctatcattgatccaggtgactctgacatcattagaagcatgccagaacagactggtgaaaagtaaaccttttcacctacaaaatttcacctgcaaaccttaaacctgcaaaattttcctttaataaaatttgcttgttttaaaaa

SEQ ID NO: 325163 - DNA, 313 bp, Homo sapiens
ccggccgcggaccggctgcgagagacgacagaaggggctctcgttccccggcgaaatctgaaatagagtactatgctatgttggctaaaactggtgtccatcactacagtggcaataatattgaactgggcacagcatgcggaaaatactacagagtgtgcacactggctatcattgatccaggtgactctgacatcattagaagcatgccagaacagactggtgaaaagtaaaccttttcacctacaaaatttcacctgcaaaccttaaacctgcaaaattttcctttaataaaatttgcttgttttaaaaa

SEQ ID NO: 325164 - DNA, 299 bp, Homo sapiens
  misc_feature (17)..(17): n is a, c, g, or t
gtgtcgtcacggatccntagatacacgcattatagcggctgctgttggttgggggccgtcccgctcctaaggcaggaagatggtggccgcaaagaagacgaaaaagtcgctggagtcgatcaactctaggctccaactcgttatgaaaagtgggaagtacgtcctggggtacaagcagactctgaagatgatcagacaaggcaaagcgaaattggtcattctcgctaacaactgcccagctttgagtgaaatagagtactatgctataatggcgttatcacgggatcctctagacaacc

SEQ ID NO: 325165 - DNA, 188 bp, Homo sapiens
gcggccgcctactactactactactgctcgaattcaagcttctaacgatgtacggggagtgactctgacatcattagaagcatgccagaacagactggtgaaaagtaaaccttttcacctacaaaatttcacctgcaaaccttaaacctgcaaaattttcctttaataaaatttgcttgttttaaaaa

SEQ ID NO: 325166 - DNA, 233 bp, Homo sapiens
gcggccgcctactactactactactgctcgaattcaagcttctaacgatgtacggggacatggtgaaaccccgtctctaataaaaatacaaaaattagccggggtgactctgacatcattagaagcatgccagaacagactggtgaaaagtaaaccttttcacctacaaaatttcacctgcaaaccttaaacctgcaaaattttcctttaataaaatttgcttgttttaaaaa

SEQ ID NO: 325167 - DNA, 1049 bp, Homo sapiens
ccggctctgccgtgaagagctttgcattgtgggaagtctttcctttctcgttccccggccatcttagcggctgctgttggttgggggccgtcccgctcctaaggcaggaagatggtggccgcaaagaagacggtgagtgaggcgggccaggcccggaagacgattcacgtggagagatgtcttggccagggcgggcagatgtgagcccacgggggtgacagcatgcctgctggcatttggagggccccagaaggaatcccagtggccctctcaatgacttggggtcctcgacttcggaagtttaaggggctcggcttcaaaaagctgggtccggttttgaggcggttgcaggcgaggcccttaggtccgtatttaatgtttgctttgtagaaaaaaagtcgctggagtcgatcaactctaggctccaactcgttatgaaaagtgggaagtacgtcctggggtacaagcagactctgaagatgatcagacaaggcaaagcgaaattggtcattctcgctaacaactgcccagctttgaggtaatcgaagagactgaacgtgcttcgcctaccgcgaattcatcgtgaacgaatatacaggagtgtaaacttgtaatctgagtaccatgaactcgaacacttgcaggataattacggtagcgattgtggtgtttggcccttcattcccgtctccccgacccacccccaaatcgtgtgctccccttctgtgagcttatttttggaggagaaatgtgtgtgtgtggcaggagtgaaaacagaacatcgaggtttaatggaaacacagacacattactgttttttccatgtattttgtgtcctgcttttttggttcttttagctttgaggtgctttaatgatgcttcattgtgtgaacttgttttagtgtcaaaaaactaggtaagaaaagttgaggctgggctatggagttgcaggctatcatagaatcacctagtttagcccgctaaatcagttctgagtcaagatttatgcttgactcactgttttgaaattgaacttagggggtgttgta

SEQ ID NO: 325168 - DNA, 849 bp, Homo sapiens
gtctcactctgtcgcccaggctgagtgcagtggcgcgatcatggctcactgcagcctcgacctaccgagctcaagcgacctctccgcctcagcctccggcgtagctgggagtagctaggactactggagcgcgccaccacgcccggctaatttcttttttctttcttttttatttttttgtagagacaggggtggtctatgttgtccaggctggccttgagctggacgcaacagatcttcccgcctcaacctccgaaagtgctgggattaaaggttgggggccgtcccgctcctaaggcaggaagatggtggccgcaaagaagacgaaaaagtcgctggagtcgatcaactctaggctccaactcgttatgaaaagtgggaagtacgtcctggggtacaagcagactctgaagatgatcagacaaggcaaagcgaaattggtcattctcgctaacaactgcccagctttgaggtaatcgaagagactgaacgtgcttcgcctaccgcgaattcatcgtgaacgaatatacaggagtgtaaacttgtaatctgagtaccatgaactcgaacacttgcaggataattacggaaatctgaaatagagtactatgctatgttggctaaaactggtgtccatcactacagtggcaataatattgaactgggcacagcatgcggaaaatactacagagtgtgcacactggctatcattgatccaggtgactctgacatcattagaagcatgccagaacagactggtgaaaagtaaaccttttcacctacaaaatttcacctgcaaaccttaaacctgcaaaattttcctttaataaaatttgcttgttttaaaaa

SEQ ID NO: 325169 - DNA, 539 bp, Homo sapiens
ccggctctgccgtgaagagctttgcattgtgggaagtctttcctttctcgttccccggccatcttagcggctgctgttggttgggggccgtcccgctcctaaggcaggaagatggtggccgcaaagaagacgaaaaagtcgctggagtcgatcaactctaggctccaactcgttatgaaaagtgggaagtacgtcctggggtacaagcagactctgaagatgatcagacaaggcaaagcgaaattggtcattctcgctaacaactgcccagctttgaggaaatctgaaatagagtactatgctatgttggctaaaactggtgtccatcactacagtggcaataatattgaactgggcacagcatgcggaaaatactacagagtgtgcacactggctatcattgatccaggtgactctgacatcattagaagcatgccagaacagactggtgaaaagtaaaccttttcacctacaaaatttcacctgcaaaccttaaacctgcaaaattttcctttaataaaatttgcttgttttaaaaa

SEQ ID NO: 325170 - DNA, 765 bp, Homo sapiens
ccggctctgccgtgaagagctttgcattgtgggaagtctttcctttctcgttccccggccatcttagcggctgctgttggttgggggccgtcccgctcctaaggcaggaagatggtggccgcaaagaagacgaaaaagtcgctggagtcgatcaactctaggctccaactcgttatgaaaagtgggaagtacgtcctggggtacaagcagactctgaagatgatcagacaaggcaaagcgaaattggtcattctcgctaacaactgcccagctttgaggaaatctgaaatagagtactatgctatgttggctaaaactggtgtccatcactacagtggcaataatattgaactgggcacagcatgcggaaaatactacagagtgtgcacactggctatcattgatccaggtgactctgacatcattagaagcatgccagaacagactggtgaaaagtaaaccttttcacctacaaaatttcacctgcaaaccttaaacctgcaaaattttcctttaataaaatttgcttgttttaaaaaaagaaaaaaatgatggagagagcttcctcggttatgtggacatgcttggtgtagcctatgaagccccttcgctggccactggttatggtgcatacttggctcagcctctgctgcgagaagttctggagaagcagccagtgctaagccagaccgaggcccgcgacttagtagaacgctgcatgcgagtgctgtactaccgagatgccgttcttacaccggtttcaac

SEQ ID NO: 325171 - DNA, 801 bp, Homo sapiens
ccggctctgccgtgaagagctttgcattgtgggaagtctttcctttctcgttccccggccatcttagcggctgctgttggttgggggccgtcccgctcctaaggcaggaagatggtggccgcaaagaagacgaaaaagtcgctggagtcgatcaactctaggctccaactcgttatgaaaagtgggaagtacgtcctggggtacaagcagactctgaagatgatcagacaaggcaaagcgaaattggtcattctcgctaacaactgcccagctttgaggaaatctgaaatagagtactatgctatgttggctaaaactggtgtccatcactacagtggcaataatattgaactgggcacagcatgcggaaaatactacagagtgtgcacactggctatcattgatccaggtgactctgacatcattagaagcatgccagaacagactggtgaaaagtaaaccttttcacctacaaaatttcacctgcaaaccttaaacctgcaaaattttcctttaataaaatttgcttgttttaaaaaaaaaaaaaaaaaaaaacttcggaggttgtgtattattatgaagggcgagggggggagggagaaagggggctttcaataagcccgggggtttccccgcgcgtacggggacaccagggcatcggaatcggtagaacaaagggtgtacgaagtggcgagggacacaccacagtccggaacaccagaacacaaggtcgggggggccccatataagacaattccacacgcgggagtgcgggtcgcataagccggaaaggtccggtaa

SEQ ID NO: 325172 - DNA, 482 bp, Homo sapiens
ccggctctgccgtgaagagctttgcattgtgggaagtctttcctttctcgttccccggccatcttagcggctgctgttggttgggggccgtcccgctcctaaggcaggaagatggtggccgcaaagaagacgaaaaagtcgctggagtcgatcaactctaggctccaactcgttatgaaaagtgggaagtacgtcctggggtacaagcagactctgaagatgatcagacaaggcaaagcgaaattggtcattctcgctaacaactgcccagctttgagtggcaataatattgaactgggcacagcatgcggaaaatactacagagtgtgcacactggctatcattgatccaggtgactctgacatcattagaagcatgccagaacagactggtgaaaagtaaaccttttcacctacaaaatttcacctgcaaaccttaaacctgcaaaattttcctttaataaaatttgcttgttttaaaaa

SEQ ID NO: 325173 - DNA, 1260 bp, Homo sapiens
aagcttcgacggccgccagtgtgctctaaagggtggacagtcatggcggcccggcgcggggctctcatagtgctggagggcgtggaccgcgccgggaagagcacgcagagccgcaagctggtggaagcgctgtgcgccgcgggccaccgcgccgaactgctccggttcccggaaagatcaactgaaatcggcaaacttctgagttcctacttgaaaaagaaaagtgacgtggaggatcactcggtgcacctgcttttttctgcaaatcgctgggaacaagtgccgttaattaaggaaaagttgagccagggcgtgaccctcgtcgtggacagatacgcattttctggtgtggccttcaccggtgccaaggagaatttttccctagactggtgtaaacagccagacgtgggccttcccaaacccgacctggtcctgttcctccagttacagctggcggatgctgccaagcggggagcgtttggccatgagcgctatgagaacggggctttccaggagcgggcgctccggtgtttccaccagctcatgaaagacacgactttgaactggaagatggtggatgcttccaaaagcatcgaagctgtccatgaggaactccgcgtgctctctgaggacgccatccgcactgccacagagaagccgctgggggagctatggaagtgacccaaggctgcccactggagacgcctctccctgcagtcccccgagaggtgggagactcgcggaaggccccgtccccagcggagtccagaccccacaacttcaggagctctttcccggcagcagagatctgcaggctgcctcttctgccccggagctggggtgcactggggacccccgtggtggggaccttggcagtgtggacatgagcagagcgatggagcagtctcctgccctctcccctgtcctgatggcactctgttgtattttcttactgaagttcagtgataactctgagcagtttcattgtgatcactgtaaatggtaatcagttggaattctcctaaatgtcttccagacactagtaaaaaaacgacctgaaaaaaaaatttttttttttttttttttttttttttttaaagttttcagacttatttcacagcgattgacacagaaacataccgtgactctgacatcattagaagcatgccagaacagactggtgaaaagtaaacgtttactttagagcattttttttttttttttttttttaaagttttcagacttatttcacagcgattg

SEQ ID NO: 325174 - DNA, 345 bp, Homo sapiens
gtctcactctgtcgcccaggctgagtgcagtggcgcgatcatggctcactgcagcctcgacctaccgagctcaagcgacctctccgcctcagcctccggcgtagctgggagtagctaggactactggagcgcgccaccacgcccggctaatttcttttttctttcttttttatttttttgtagagacaggggtggtctatgttgtccaggctggccttgagctggacgcaacagatcttcccgcctcaacctccgaaagtgctgggattaaaggtatgagcagccgcgtacggcccccgcagccattctagccagcggtaccaatagcaaccggcagctgccctc

SEQ ID NO: 325175 - DNA, 815 bp, Homo sapiens
  misc_feature (750)..(751): n is a, c, g, or t
  misc_feature (754)..(754): n is a, c, g, or t
  misc_feature (762)..(762): n is a, c, g, or t
gtctcactctgtcgcccaggctgagtgcagtggcgcgatcatggctcactgcagcctcgacctaccgagctcaagcgacctctccgcctcagcctccggcgtagctgggagtagctaggactactggagcgcgccaccacgcccggctaatttcttttttctttcttttttatttttttgtagagacaggggtggtctatgttgtccaggctggccttgagctggacgcaacagatcttcccgcctcaacctccgaaagtgctgggattaaaggttgggggccgtcccgctcctaaggcaggaagatggtggccgcaaagaagacgaaaaagtcgctggagtcgatcaactctaggctccaactcgttatgaaaagtgggaagtacgtcctggggtacaagcagactctgaagatgatcagacaaggcaaagcgaaattggtcattctcgctaacaactgcccagctttgaggaaatctgaaatagagtactatgctatgttggctaaaactggtgtccatcactacagtggcaataatattgaactgggcacagcatgcggaaaatactacagagtgtgcacactggctatcattgatccaggtgactctgacatcattagaagcatgccagaacagactggtgaaaagtaaaccttttcacctacaaaatttcacctgcaaaccttaaacctgcaaaattttcctttaataaaatttgcttgttttaaaaaaaaaaaaaaaaaaaaannaanaaaaaaanaaaaaaaaaaaaaacaacaaaaaaacacacacaaaaacaaaaacaaaaaaaaa

SEQ ID NO: 325176 - DNA, 776 bp, Homo sapiens
ccggctctgccgtgaagagctttgcattgtgggaagtctttcctttctcgttccccggccatcttagcggctgctgttggttgggggccgtcccgctcctaaggcaggaagatggtggccgcaaagaagacgaaaaagtcgctggagtcgatcaactctaggctccaactcgttatgaaaagtgggaagtacgtcctggggtacaagcagactctgaagatgatcagacaaggcaaagcgaaattggtcattctcgctaacaactgcccagctttgagtggcaataatattgaactgggcacagcatgcggaaaatactacagagtgtgcacactggctatcattgatccaggtgactctgacatcattagaagcatgccagaacagactggtgaaaagtaaaccttttcacctacaaaatttcacctgcaaaccttaaacctgcaaaattttcctttaataaaatttgcttgttttaaaaaaaaaaaaaaaaaaaaaaaaaaacaaacaaaaacaaaaaaaaaaaaaaaagaaaaaaaaaaaaaggggggggagggcagcaaaaaagataatccacccaacgagggccccaagtcaagaaggccagcaccagtcattcgagacaacagggcgcccatagaagcggcagataacaacgccaagcgactagcgccgcatctacaaccaggagcgtaaagcaggaaacagcgcgcgcacgctactatgtgcaacgccaccacccggaggagcaacactgggcacaacccaggagcaac

SEQ ID NO: 325177 - DNA, 536 bp, Homo sapiens
gtgaaagtaaccttcacctacaaattcacctgcatgccccagggttcccggccatcttagcggctgctgttggttgggggccgtcccgctcctaaggcaggaagatggtggccgcaaagaagacgaaaaagtcgctggagtcgatcaactctaggctccaactcgttatgaaaagtgggaagtacgtcctggggtacaagcagactctgaagatgatcagacaaggcaaagcgaaattggtcattctcgctaacaactgcccagctttgaggaaatctgaaatagagtactatgctatgttggctaaaactggtgtccatcactacagtggcaataatattgaactgggcacagcatgcggaaaatactacagagtgtgcacactggctatcattgatccaggtgtgttgatctcttctgacatcattagaagcattgcccctaggggaaaaaaaaccaaaagggggaaaaaaacctttttttgggggggggggggctttttgggggggggaaaaaaacacacacccacccaccac

SEQ ID NO: 325178 - DNA, 529 bp, Homo sapiens
taggtgatctagaggatccggtcattgctacacgcttctcgtccccggccatcttagcggctgctgttggttgggggccgtcccgctcctaaggcaggaagatggtggccgcaaagaagacgaaaaagtcgctggagtcgatcaactctaggctccaactcgttatgaaaagtgggaagtacgtcctggggtacaagcagactctgaagatgatcagacaaggcaaagcgaaattggtcattctcgctaacaactgcccagctttgaggaaatctgaaatagagtactatgctatgttggctaaaactggtgtccatcactacagtggcaataatattgaactgggcacagcatgcggaaaatactacagagtgtgcacactggctatcattgatccaggtgactctgacatcattagaagcatgccagaacagactggtgaaaagtaaaccttttcacctacaaaatttcacctgcaaaccttaaacctgcaaaattttcctttaataaaatttgcttgttttaaaaa

SEQ ID NO: 325179 - DNA, 836 bp, Homo sapiens
atttatgaagtggcacagaatctaactttgcactgaatatcttttcattcacatctcctctgccttagtcacaatggcaacagtacagaaaattctatcaaacctcagaatatagtagaaataattaagctgttgaatgagtcttaaaaattatactactgttaagtggaccaagtttggtgaagcagaatgtgacaaaggttgattaaggaaggaacaactcaaggacattgggaatgataacttttccacttgagaactactttatgttttactgtaatttttaaagttttttttgtcctttttgttattttgcaaaagaaaatagtatttacaggtggcatcgataaacaccggtgtttatcgatgccaccatgttgggggccgtcccgctcctaaggcaggaagatggtggccgcaaagaagacgaaaaagtcgctggagtcgatcaactctaggctccaactcgttatgaaaagtgggaagtacgtcctggggtacaagcagactctgaagatgatcagacaaggcaaagcgaaattggtcattctcgctaacaactgcccagctttgaggaaatctgaaatagagtactatgctatgttggctaaaactggtgtccatcactacagtggcaataatattgaactgggcacagcatgcggaaaatactacagagtgtgcacactggctatcattgatccaggtgactctgacatcattagaagcatgccagaacagactggtgaaaagtaaaccttttcacctacaaaatttcacctgcaaaccttaaacctgcaaaattttcctttaataaaatttgcttgttttaaaaa

SEQ ID NO: 325180 - DNA, 517 bp, Homo sapiens
atgtatgtctgtgttcagtgttacccgaggatcacgccattatagcggctgctgtaggttgggggccgtcccgctcctaaggcaggaagatggtggccgcaaagaagacgaaaaagtcgctggagtcgatcaactctaggctccaactcgttatgaaaagtgggaagtacgtcctggggtacaagcagactctgaagatgatcagacaaggcaaagcgaaattggtcattctcgctaacaactgcccagctttgaggaaatctgaaatagagtactatgctatgttggctaaaactggtgtccatcactacagtggcaataatattgaactgggcacagcatgcggaaaatactacagagtgtgcacactggctatcattgatccaggtgactctgacatcattagaagcatgccagaacagactggtgaaaagtaaaccttttcacctacaaaatttcacctgcaaaccttaaacctgcaaaattttcctttaataaaatttgcttgttttaaaaa

SEQ ID NO: 325181 - DNA, 507 bp, Homo sapiens
  misc_feature (17)..(17): n is a, c, g, or t
gtgtcgtcacggatccntagatacacgcattatagcggctgctgttggttgggggccgtcccgctcctaaggcaggaagatggtggccgcaaagaagacgaaaaagtcgctggagtcgatcaactctaggctccaactcgttatgaaaagtgggaagtacgtcctggggtacaagcagactctgaagatgatcagacaaggcaaagcgaaattggtcattctcgctaacaactgcccagctttgaggaaatctgaaatagagtactatgctatgttggctaaaactggtgtccatcactacagtggcaataatattgaactgggcacagcatgcggaaaatactacagagtgtgcacactggctatcattgatccaggtgactctgacatcattagaagcatgccagaacagactggtgaaaagtaaaccttttcacctacaaaatttcacctgcaaaccttaaacctgcaaaattttcctttaataaaatttgcttgttttaaaaa

SEQ ID NO: 325182 - DNA, 490 bp, Homo sapiens
tacggctaggtacgaggctgggtggtggtggttgggggccgtcccgctcctaaggcaggaagatggtggccgcaaagaagacgaaaaagtcgctggagtcgatcaactctaggctccaactcgttatgaaaagtgggaagtacgtcctggggtacaagcagactctgaagatgatcagacaaggcaaagcgaaattggtcattctcgctaacaactgcccagctttgaggaaatctgaaatagagtactatgctatgttggctaaaactggtgtccatcactacagtggcaataatattgaactgggcacagcatgcggaaaatactacagagtgtgcacactggctatcattgatccaggtgactctgacatcattagaagcatgccagaacagactggtgaaaagtaaaccttttcacctacaaaatttcacctgcaaaccttaaacctgcaaaattttcctttaataaaatttgcttgttttaaaaa

SEQ ID NO: 325183 - DNA, 1695 bp, Homo sapiens
ccggccgcggaccggctgcgagagacgacagaaggggctctcgttccccggccatcttagcggctgctgttggttgggggccgtcccgctcctaaggcaggaagatggtggccgcaaagaagacgaaaaagtcgctggagtcgatcaactctaggctccaactcgttatgaaaagtgggaagtacgtcctggggtacaagcagactctgaagatgatcagacaaggcaaagcgaaattggtcattctcgctaacaactgcccagctttgaggaaatctgaaatagagtactatgctatgttggctaaaactggtgtccatcactacagtggcaataatattgaactgggcacagcatgcggaaaatactacagagtgtgcacactggctatcattgatccaggtgactctgacatcattagaagcatgccagaacagactggtgaaaagtaaaccttttcacctacaaaatttcacctgcaaaccttaaacctgcaaaattttcctttaataaaatttgcttgttttaaaaaaaaaaaaaaaaaaaaacctcgagactagttctctctctctctctctccccctccagactccaggacacgcccatgtatgtcccctgcgtgttcatcctgggcccagatccccctgccccagcaagactcgcagtgggatggctgctggcatgcccaccctgcatgcgctttgccctctccttgcaagcctggcacatagcttctctccatactcctaagggactttgcagacacccaagccactgggacccctgctaacacatgcaggtcttctcttctgccaactaacgtgctcgcgccctcccagcacgtggagagcttcaattgtcagataaacaggaagcgacagatgaccgctttctaacgctctcttttctcccgttttcagctgtagagtagctgccaggaggacttggccacccggccctgtcacactgcagccccttccccttccctctcgtggcccacaaggaggaaggaagggaaacctaaaagcccacttagaaactttttggatatgccactgcaattcttttcaaaatagcattccccaggtttttaatgggaggaaaaaaagctttaatgttgagcatgctgcgagctgctgcgtggaaaggcctctgtatgggccgaagacccttcttccctggctgccaggctcgccaggagcccactggaaacgcccaccacgggggctccttgttacacatgttctttttttatccgatcaacctgtgcacttttgatattttgatattatatttgcttccttaattcctcgcgtagagacggtctcaggtgccgtggtctatgctcgtggtcctgtagctgtccgcctcagctcccaccgtgtttgtctggtgtcagcacgaggcagagctgtgtgctccatagcgtgtagctttagactcggagatgagtgctttgacccagcgaggagctcagctaagtgtatccacgctgtggttcagcagcctttagatcatacggcattgtggttcatgtttgaaattacagattttaaatgccatgttcattaagaaatccagggtattcagattctggggtttttcatattgtattattattattcttaggaatagttcaatgtaacaagaagaaaacttgacctttgctctggttaaaacagtaataggcacttg

SEQ ID NO: 325184 - DNA, 599 bp, Homo sapiens
ccggccgcggaccggctgcgagagacgacagaaggggctctcgttccccggccatcttagcggctgctgttggttgggggccgtcccgctcctaaggcaggaagatggtggccgcaaagaagacgaaaaagtcgctggagtcgatcaactctaggctccaactcgttatgaaaagtgggaagtacgtcctggggtacaagcagactctgaagatgatcagacaaggcaaagcgaaattggtcattctcgctaacaactgcccagctttgaggaaatctgaaatagagtactatgctatgttggctaaaactggtgtccatcactacagtggcaataatattgaactgggcacagcatgcggaaaatactacagagtgtgcacactggctatcattgatccaggtgactctgacatcattagaagcatgccagaacagactggtgaaaagtaaaccttttcacctacaaaatttcacctgcaaaccttaaacctgcaaaattttcctttaataaaatttgcttgttttaaaaaacattgtatctatttcagtatttttctctatttttgtttcaatacaatttcctgaaggttggattag

SEQ ID NO: 325185 - DNA, 804 bp, Homo sapiens
ccggccgcggaccggctgcgagagacgacagaaggggctctcgttccccggccatcttagcggctgctgttggttgggggccgtcccgctcctaaggcaggaagatggtggccgcaaagaagacgaaaaagtcgctggagtcgatcaactctaggctccaactcgttatgaaaagtgggaagtacgtcctggggtacaagcagactctgaagatgatcagacaaggcaaagcgaaattggtcattctcgctaacaactgcccagctttgaggaaatctgaaatagagtactatgctatgttggctaaaactggtgtccatcactacagtggcaataatattgaactgggcacagcatgcggaaaatactacagagtgtgcacactggctatcattgatccaggtgactctgacatcattagaagcatgccagaacagactggtgaaaagtaaaccttttcacctacaaaatttcacctgcaaaccttaaacctgcaaaattttcctttaataaaatttgcttgttttaaaaacaaacaaaaacaaaaaaaaaaaaaaaagaaaaaaaaaaaaaggggggggagggcagcaaaaaagataatccacccaacgagggccccaagtcaagaaggccagcaccagtcattcgagacaacagggcgcccatagaagcggcagataacaacgccaagcgactagcgccgcatctacaaccaggagcgtaaagcaggaaacagcgcgcgcacgctactatgtgcaacgccaccacccggaggagcaacactgggcacaacccaggagcaac

SEQ ID NO: 325186 - DNA, 806 bp, Homo sapiens
  misc_feature (623)..(623): n is a, c, g, or t
  misc_feature (627)..(627): n is a, c, g, or t
  misc_feature (629)..(629): n is a, c, g, or t
ccggccgcggaccggctgcgagagacgacagaaggggctctcgttccccggccatcttagcggctgctgttggttgggggccgtcccgctcctaaggcaggaagatggtggccgcaaagaagacgaaaaagtcgctggagtcgatcaactctaggctccaactcgttatgaaaagtgggaagtacgtcctggggtacaagcagactctgaagatgatcagacaaggcaaagcgaaattggtcattctcgctaacaactgcccagctttgaggaaatctgaaatagagtactatgctatgttggctaaaactggtgtccatcactacagtggcaataatattgaactgggcacagcatgcggaaaatactacagagtgtgcacactggctatcattgatccaggtgactctgacatcattagaagcatgccagaacagactggtgaaaagtaaaccttttcacctacaaaatttcacctgcaaaccttaaacctgcaaaattttcctttaataaaatttgcttgttttaaaaaaaaaaaaaaaaaaaaaaaaaaaaaaaaaaaaaaaaaacaaaacaaaaaaaaaaaaaaaaaaaaaaaaaaaaggggggggggccccaaaaancccncngggggggccacaaagacgcgccccccgcgtctgacggagcaaaaggggcggccaacagacgggcgccgcgcaaacacagacacggcggcggcggcggccggacaacacaaaggccggcgagggaggacaaccgacgagcgggcggaacccggaaagaacaccccccccggcgggaga

SEQ ID NO: 325187 - DNA, 768 bp, Homo sapiens
  misc_feature (585)..(585): n is a, c, g, or t
  misc_feature (589)..(589): n is a, c, g, or t
  misc_feature (591)..(591): n is a, c, g, or t
ccggccgcggaccggctgcgagagacgacagaaggggctctcgttccccggccatcttagcggctgctgttggttgggggccgtcccgctcctaaggcaggaagatggtggccgcaaagaagacgaaaaagtcgctggagtcgatcaactctaggctccaactcgttatgaaaagtgggaagtacgtcctggggtacaagcagactctgaagatgatcagacaaggcaaagcgaaattggtcattctcgctaacaactgcccagctttgaggaaatctgaaatagagtactatgctatgttggctaaaactggtgtccatcactacagtggcaataatattgaactgggcacagcatgcggaaaatactacagagtgtgcacactggctatcattgatccaggtgactctgacatcattagaagcatgccagaacagactggtgaaaagtaaaccttttcacctacaaaatttcacctgcaaaccttaaacctgcaaaattttcctttaataaaatttgcttgttttaaaaaaaaacaaaaaaaaaaaaaaaaaaaaaaaaaaaaggggggggggccccaaaaancccncngggggggccacaaagacgcgccccccgcgtctgacggagcaaaaggggcggccaacagacgggcgccgcgcaaacacagacacggcggcggcggcggccggacaacacaaaggccggcgagggaggacaaccgacgagcgggcggaacccggaaagaacaccccccccggcgggaga

SEQ ID NO: 325188 - DNA, 833 bp, Homo sapiens
ccggccgcggaccggctgcgagagacgacagaaggggctctcgttccccggccatcttagcggctgctgttggttgggggccgtcccgctcctaaggcaggaagatggtggccgcaaagaagacgaaaaagtcgctggagtcgatcaactctaggctccaactcgttatgaaaagtgggaagtacgtcctggggtacaagcagactctgaagatgatcagacaaggcaaagcgaaattggtcattctcgctaacaactgcccagctttgaggaaatctgaaatagagtactatgctatgttggctaaaactggtgtccatcactacagtggcaataatattgaactgggcacagcatgcggaaaatactacagagtgtgcacactggctatcattgatccaggtgactctgacatcattagaagcatgccagaacagactggtgaaaagtaaaccttttcacctacaaaatttcacctgcaaaccttaaacctgcaaaattttcctttaataaaatttgcttgttttaaaaaagttccacaaaagaaaaacaataaaaactaaacaacttttttggcgccgccttgcgacccctcaagaagaggtttcgagaaccccttcgtctgggacacgcggggcccccatagaggataaggagaacagtgcgcaaaagctgtccccgagagaaaacccgggctccaggactgagtggcgggatttctcaccaattaaaaaaagcccggggggaaacgccaacggttctgaacaatccaaaaggagctcgggacaagaggaattcaacaggagtcacagggggcgatatatagcgggcgg

SEQ ID NO: 325189 - DNA, 562 bp, Homo sapiens
  misc_feature (543)..(543): n is a, c, g, or t
  misc_feature (547)..(547): n is a, c, g, or t
  misc_feature (550)..(550): n is a, c, g, or t
ccggccgcggaccggctgcgagagacgacagaaggggctctcgttccccggccatcttagcggctgctgttggttgggggccgtcccgctcctaaggcaggaagatggtggccgcaaagaagacgaaaaagtcgctggagtcgatcaactctaggctccaactcgttatgaaaagtgggaagtacgtcctggggtacaagcagactctgaagatgatcagacaaggcaaagcgaaattggtcattctcgctaacaactgcccagctttgaggaaatctgaaatagagtactatgctatgttggctaaaactggtgtccatcactacagtggcaataatattgaactgggcacagcatgcggaaaatactacagagtgtgcacactggctatcattgatccaggtgactctgacatcattagaagcatgccagaacagactggtgaaaagtaaaccttttcacctacaaaatttcacctgcaaaccttaaacctgcaaaattttcctttaataaaatttgcttgttttaaaaaggaaaaaaaanaaanaanaaaaaaaaaaaa

SEQ ID NO: 325190 - DNA, 639 bp, Homo sapiens
  misc_feature (574)..(575): n is a, c, g, or t
  misc_feature (578)..(578): n is a, c, g, or t
  misc_feature (586)..(586): n is a, c, g, or t
ccggccgcggaccggctgcgagagacgacagaaggggctctcgttccccggccatcttagcggctgctgttggttgggggccgtcccgctcctaaggcaggaagatggtggccgcaaagaagacgaaaaagtcgctggagtcgatcaactctaggctccaactcgttatgaaaagtgggaagtacgtcctggggtacaagcagactctgaagatgatcagacaaggcaaagcgaaattggtcattctcgctaacaactgcccagctttgaggaaatctgaaatagagtactatgctatgttggctaaaactggtgtccatcactacagtggcaataatattgaactgggcacagcatgcggaaaatactacagagtgtgcacactggctatcattgatccaggtgactctgacatcattagaagcatgccagaacagactggtgaaaagtaaaccttttcacctacaaaatttcacctgcaaaccttaaacctgcaaaattttcctttaataaaatttgcttgttttaaaaaccaaaaaaaaaaaaaaaaaaaaaaaaaaaaaaaaaaaaaaannaanaaaaaaanaaaaaaaaaaaaaacaacaaaaaaacacacacaaaaacaaaaacaaaaaaaaa

SEQ ID NO: 325191 - DNA, 828 bp, Homo sapiens
ccggccgcggaccggctgcgagagacgacagaaggggctctcgttccccggccatcttagcggctgctgttggttgggggccgtcccgctcctaaggcaggaagatggtggccgcaaagaagacgaaaaagtcgctggagtcgatcaactctaggctccaactcgttatgaaaagtgggaagtacgtcctggggtacaagcagactctgaagatgatcagacaaggcaaagcgaaattggtcattctcgctaacaactgcccagctttgaggaaatctgaaatagagtactatgctatgttggctaaaactggtgtccatcactacagtggcaataatattgaactgggcacagcatgcggaaaatactacagagtgtgcacactggctatcattgatccaggtgactctgacatcattagaagcatgccagaacagactggtgaaaagtaaaccttttcacctacaaaatttcacctgcaaaccttaaacctgcaaaattttcctttaataaaatttgcttgttttaaaaaaaaaaaaaaaaaaaaaataaaaaacaaacaaaaacaaaaaaaaaaaaaaaagaaaaaaaaaaaaaggggggggagggcagcaaaaaagataatccacccaacgagggccccaagtcaagaaggccagcaccagtcattcgagacaacagggcgcccatagaagcggcagataacaacgccaagcgactagcgccgcatctacaaccaggagcgtaaagcaggaaacagcgcgcgcacgctactatgtgcaacgccaccacccggaggagcaacactgggcacaacccaggagcaac

SEQ ID NO: 325192 - DNA, 712 bp, Homo sapiens
ccggccgcggaccggctgcgagagacgacagaaggggctctcgttccccggccatcttagcggctgctgttggttgggggccgtcccgctcctaaggcaggaagatggtggccgcaaagaagacgaaaaagtcgctggagtcgatcaactctaggctccaactcgttatgaaaagtgggaagtacgtcctggggtacaagcagactctgaagatgatcagacaaggcaaagcgaaattggtcattctcgctaacaactgcccagctttgaggaaatctgaaatagagtactatgctatgttggctaaaactggtgtccatcactacagtggcaataatattgaactgggcacagcatgcggaaaatactacagagtgtgcacactggctatcattgatccaggtgactctgacatcattagaagcatgccagaacagactggtgaaaagtaaaccttttcacctacaaaatttcacctgcaaggacagcacgcgctaagcaagctaatttttgtatttctagtagagatgaggtttcaccatgttggccaggctggtcttgaactcctgacctcaagtgatccacctaccacagcctcctaaagtactgggattacaagcatgagtcactacacccgacctcatagtagttttgatttacacttccctaatgatggtgtccagcatctactggccatttgttagcgcgtgct

SEQ ID NO: 325193 - DNA, 532 bp, Homo sapiens
ccggccgcggaccggctgcgagagacgacagaaggggctctcgttccccggccatcttagcggctgctgttggttgggggccgtcccgctcctaaggcaggaagatggtggccgcaaagaagacgaaaaagtcgctggagtcgatcaactctaggctccaactcgttatgaaaagtgggaagtacgtcctggggtacaagcagactctgaagatgatcagacaaggcaaagcgaaattggtcattctcgctaacaactgcccagctttgaggaaatctgaaatagagtactatgctatgttggctaaaactggtgtccatcactacagtggcaataatattgaactgggcacagcatgcggaaaatactacagagtgtgcacactggctatcattgatccaggtgactctgacatcattagaagcatgccagaacagactggtgaaaagtaaacctcctccatgttaattcccctatcccccatttatcctcgtatccctctcccctgacatcatttgcgggttataatctc

SEQ ID NO: 325194 - DNA, 792 bp, Homo sapiens
ccggccgcggaccggctgcgagagacgacagaaggggctctcgttccccggccatcttagcggctgctgttggttgggggccgtcccgctcctaaggcaggaagatggtggccgcaaagaagacggtgagtgaggcgggccaggcccggaagacgattcacgtggagagatgtcttggccagggcgggcagatgtgagcccacgggggtgacagcatgcctgctggcatttggagggccccagaaggaatcccagtggccctctcaatgacttggggtcctcgacttcggaagtttaaggggctcggcttcaaaaagctgggtccggttttgaggcggttgcaggcgaggcccttaggtccgtatttaatgtttgctttgtagaaaaaaagtcgctggagtcgatcaactctaggctccaactcgttatgaaaagtgggaagtacgtcctggggtacaagcagactctgaagatgatcagacaaggcaaagcgaaattggtcattctcgctaacaactgcccagctttgaggaaatctgaaatagagtactatgctatgttggctaaaactggtgtccatcactacagtggcaataatattgaactgggcacagcatgcggaaaatactacagagtgtgcacactggctatcattgatccaggtgactctgacatcattagaagcatgccagaacagactggtgaaaagtaaaccttttcacctacaaaatttcacctgcaaaccttaaacctgcaaaattttcctttaataaaatttgcttgttttaaaaa

SEQ ID NO: 325195 - DNA, 445 bp, Homo sapiens
gcgtgccgctactactactaaattcgcggccgcgtcgaaaaaagtcgctggagtcgatcaactctaggctccaactcgttatgaaaagtgggaagtacgtcctggggtacaagcagactctgaagatgatcagacaaggcaaagcgaaattggtcattctcgctaacaactgcccagctttgaggaaatctgaaatagagtactatgctatgttggctaaaactggtgtccatcactacagtggcaataatattgaactgggcacagcatgcggaaaatactacagagtgtgcacactggctatcattgatccaggtgactctgacatcattagaagcatgccagaacagactggtgaaaagtaaaccttttcacctacaaaatttcacctgcaaaccttaaacctgcaaaattttcctttaataaaatttgcttgttttaaaaa

SEQ ID NO: 325196 - DNA, 507 bp, Homo sapiens
gcgtcgacgccttaggagcgggacggcccccaaccaacagcagccgctaagatggccggggaacgagaaaggcaggaagatggtggccgcaaagaagacgaaaaagtcgctggagtcgatcaactctaggctccaactcgttatgaaaagtgggaagtacgtcctggggtacaagcagactctgaagatgatcagacaaggcaaagcgaaattggtcattctcgctaacaactgcccagctttgaggaaatctgaaatagagtactatgctatgttggctaaaactggtgtccatcactacagtggcaataatattgaactgggcacagcatgcggaaaatactacagagtgtgcacactggctatcattgatccaggtgactctgacatcattagaagcatgccagaacagactggtgaaaagtaaaccttttcacctacaaaatttcacctgcaaaccttaaacctgcaaaattttcctttaataaaatttgcttgttttaaaaa

SEQ ID NO: 325197 - DNA, 1327 bp, Homo sapiens
ccggccgcggaccggctgcgagagacgacagaaggggctctcgttccccggccatcttagcggctgctgttggttgggggccgtcccgctcctaaggcaggaagatggtggccgcaaagaagacgaaaaagtcgctggagtcgatcaactctaggctccaactcgttatgaaaagtgggaagtacgtcctggggtacaagcagactctgaagatgatcagacaaggcaaagcgaaattggtcattctcgctaacaactgcccagctttgaggaaatctgaaatagagtactatgctatgttggctaaaactggtgtccatcactacagtggcaataatattgaactgggcacagcatgcggaaaatactacagagtgtgcacactggctatcattgatccaggtatgctttttaaatcataaagtcttttttttttttgcctttctaatgtaatgtctggacaagtatttcttactacgcaaatgtctttggttcctaaattcagatagaatatggatctagcaaggcatatcgtgtagttgtattttgtagagaattggtaatgaatgccaatacattataattggctttattataagttaaaatttttactgtcagataatgaatttcatttgatgaagtacctatgaaataatgacatagatttggtaaaaggtgaaattataaggagagaataatctggcaaaacagaagaaagtaattcttgcttcttgagaacagacatgtaaaattagcttgagaaaaaaaaaagtgccaaaaaatctacatcattctgttttccaattgtgaatctttgattcatagaatactgcgaatattctcgctgttctgattttgtaatagtcaggacaggctaaacattcgctatattaagaccatgcatgtgtccccaaacctagttctttccctaggtctggttttataaatgctggtgataaaccaattttattatatgatcattttatgtgattatataatggctgtgattctaggttatctttggtcaaccttaagaaaaatgacagtacagctaatgtgataacttttgcaaaaagtcagtgctaatttgcagaccattgtctacagaagggataaccaaaggtagagaaattttatggtaccagttgctattaaatgaattgtaaaattactgtttttttatttttattttttagggtgactctgacatcattagaagcatgccagaacagactggtgaaaagtaaaccttttcacctacaaaatttcacctgcaaaccttaaacctgcaaaattttcctttaataaaatttgcttgttttaaaaa

SEQ ID NO: 325198 - DNA, 587 bp, Homo sapiens
  misc_feature (522)..(523): n is a, c, g, or t
  misc_feature (526)..(526): n is a, c, g, or t
  misc_feature (534)..(534): n is a, c, g, or t
ccggccgcggaccggctgcgagagacgacagaaggggctctcgttccccggccatcttagcggctgctgttggttgggggccgtcccgctcctaaggcaggaagatggtggccgcaaagaagacgaaaaagtcgctggagtcgatcaactctaggctccaactcgttatgaaaagtgggaagtacgtcctggggtacaagcagactctgaagatgatcagacaaggcaaagcgaaattggtcattctcgctaacaactgcccagctttgaggaaatctgaaatagagtactatgctatgttggctaaaactggtgtccatcactacagtggcaataatattgaactgggcacagcatgcggaaaatactacagagtgtgcacactggctatcattgatccagcttttcacctacaaaatttcacctgcaaaccttaaacctgcaaaattttcctttaataaaatttgcttgttttaaaaaccaaaaaaaaaaaaaaaaaaaaaaaaaaaaaaaaaaaaaaannaanaaaaaaanaaaaaaaaaaaaaacaacaaaaaaacacacacaaaaacaaaaacaaaaaaaaa

SEQ ID NO: 325199 - DNA, 645 bp, Homo sapiens
ccggccgcggaccggctgcgagagacgacagaaggggctctcgttccccggccatcttagcggctgctgttggttgggggccgtcccgctcctaaggcaggaagatggtggccgcaaagaagacgaaaaagtcgctggagtcgatcaactctaggctccaactcgttatgaaaagtgggaagtacgtcctggggtacaagcagactctgaagatgatcagacaaggcaaagcgaaattggtcattctcgctaacaactgcccagctttgaggaaatctgaaatagagtactatgctatgttggctaaaactggtgtccatcactacagtggcaataatattgaactggcatcagacctcaaacctacatataacacagtgttgctaacaatcagcaacatcactgccattacggatcggtgtgggtacagtcgcgctcaacactcactctcatgtatgtatcactctctgcgattcattcggggcacatagataatcaacgacaactgatctatacatcacgtctcagtgaagtgctctaatcataatgcagaggccagacatagggcacactccgtcgttacactccgtaccatactcgaaacatatctattcaatctccacatatacccatacaccacagagc

SEQ ID NO: 325200 - DNA, 472 bp, Homo sapiens
ccggccgcggaccggctgcgagagacgacagaaggggctctcgttccccggccatcttagcggctgctgttggttgggggccgtcccgctcctaaggcaggaagatggtggccgcaaagaagacgaaaaagtcgctggagtcgatcaactctaggctccaactcgttatgaaaagtgggaagtacgtcctggggtacaagcagactctgaagatgatcagacaaggcaaagcgaaattggtcattctcgctaacaactgcccagctttgaggaaatctgaaatagagtactatgctatgttggctaaaactggtgtccatcactacagccatgagatgttggaagcttccaacatctcatcgcgccttccaacatctcactgcaagctctgcctcccgggttcacgccatgagatgttggaaggccttccaacatctcatggcgtgatgagatgttggaaggggtaccgagc

SEQ ID NO: 325201 - DNA, 648 bp, Homo sapiens
ccggccgcggaccggctgcgagagacgacagaaggggctctcgttccccggccatcttagcggctgctgttggttgggggccgtcccgctcctaaggcaggaagatggtggccgcaaagaagacgaaaaagtcgctggagtcgatcaactctaggctccaactcgttatgaaaagtgggaagtacgtcctggggtacaagcagactctgaagatgatcagacaaggcaaagcgaaattggtcattctcgctaacaactgcccagctttgaggtaatcgaagagactgaacgtgcttcgcctaccgcgaattcatcgtgaacgaatatacaggagtgtaaacttgtaatctgagtaccatgaactcgaacacttgcaggataattacggaaatctgaaatagagtactatgctatgttggctaaaactggtgtccatcactacagtggcaataatattgaactgggcacagcatgcggaaaatactacagagtgtgcacactggctatcattgatccaggtgactctgacatcattagaagcatgccagaacagactggtgaaaagtaaaccttttcacctacaaaatttcacctgcaaaccttaaacctgcaaaattttcctttaataaaatttgcttgttttaaaaa

SEQ ID NO: 325202 - DNA, 908 bp, Homo sapiens
ccggccgcggaccggctgcgagagacgacagaaggggctctcgttccccggccatcttagcggctgctgttggttgggggccgtcccgctcctaaggcaggaagatggtggccgcaaagaagacggtgagtgaggcgggccaggcccggaagacgattcacgtggagagatgtcttggccagggcgggcagatgtgagcccacgggggtgacagcatgcctgctggcatttggagggccccagaaggaatcccagtggccctctcaatgacttggggtcctcgacttcggaagtttaaggggctcggcttcaaaaagctgggtccggttttgaggcggttgcaggcgaggcccttaggtccgtatttaatgtttgctttgtagaaaaaaagtcgctggagtcgatcaactctaggctccaactcgttatgaaaagtgggaagtacgtcctggggtacaagcagactctgaagatgatcagacaaggcaaagcgaaattggtcattctcgctaacaactgcccagctttgaggtaatcgaagagactgaacgtgcttcgcctaccgcgaattcatcgtgaacgaatatacaggagtgtaaacttgtaatctgagtaccatgaactcgaacacttgcaggataattacggaaatctgaaatagagtactatgctatgttggctaaaactggtgtccatcactacagtggcaataatattgaactgggcacagcatgcggaaaatactacagagtgtgcacactggctatcattgatccaggtgactctgacatcattagaagcatgccagaacagactggtgaaaagtaaaccttttcacctacaaaatttcacctgcaaaccttaaacctgcaaaattttcctttaataaaatttgcttgttttaaaaa

SEQ ID NO: 325203 - DNA, 607 bp, Homo sapiens
ccggccgcggaccggctgcgagagacgacagaaggggctctcgttccccggccatcttagcggctgctgttggttgggggccgtcccgctcctaaggcaggaagatggtggccgcaaagaagacgaaaaagtcgctggagtcgatcaactctaggctccaactcgttatgaaaagtgggaagtggcaaagcgaaattggtcattctcgctaacaactgcccagctttgaggtaatcgaagagactgaacgtgcttcgcctaccgcgaattcatcgtgaacgaatatacaggagtgtaaacttgtaatctgagtaccatgaactcgaacacttgcaggataattacggaaatctgaaatagagtactatgctatgttggctaaaactggtgtccatcactacagtggcaataatattgaactgggcacagcatgcggaaaatactacagagtgtgcacactggctatcattgatccaggtgactctgacatcattagaagcatgccagaacagactggtgaaaagtaaaccttttcacctacaaaatttcacctgcaaaccttaaacctgcaaaattttcctttaataaaatttgcttgttttaaaaa

SEQ ID NO: 325204 - DNA, 749 bp, Homo sapiens
  misc_feature (566)..(566): n is a, c, g, or t
  misc_feature (570)..(570): n is a, c, g, or t
  misc_feature (572)..(572): n is a, c, g, or t
ccggccgcggaccggctgcgagagacgacagaaggggctctcgttccccggccatcttagcggctgctgttggttgggggccgtcccgctcctaaggcaggaagatggtggccgcaaagaagacgaaaaagtcgctggagtcgatcaactctaggctccaactcgttatgaaaagtgggaagtacgtcctggggtacaagcagactctgaagatgatcagacaaggcaaagcgaaattggtcattctcgctaacaactgcccagctttgagtggcaataatattgaactgggcacagcatgcggaaaatactacagagtgtgcacactggctatcattgatccaggtgactctgacatcattagaagcatgccagaacagactggtgaaaagtaaaccttttcacctacaaaatttcacctgcaaaccttaaacctgcaaaattttcctttaataaaatttgcttgttttaaaaaaaaaaaaaaaaaaaaaaaaaaaaaaaaaaaaaaaaaacaaaacaaaaaaaaaaaaaaaaaaaaaaaaaaaaggggggggggccccaaaaancccncngggggggccacaaagacgcgccccccgcgtctgacggagcaaaaggggcggccaacagacgggcgccgcgcaaacacagacacggcggcggcggcggccggacaacacaaaggccggcgagggaggacaaccgacgagcgggcggaacccggaaagaacaccccccccggcgggaga

SEQ ID NO: 325205 - DNA, 786 bp, Homo sapiens
  misc_feature (1)..(1): n is a, c, g, or t
  misc_feature (62)..(64): n is a, c, g, or t
  misc_feature (69)..(69): n is a, c, g, or t
  misc_feature (71)..(71): n is a, c, g, or t
  misc_feature (82)..(82): n is a, c, g, or t
  misc_feature (603)..(603): n is a, c, g, or t
  misc_feature (607)..(607): n is a, c, g, or t
  misc_feature (609)..(609): n is a, c, g, or t
nattttaggtgaacactatgagacacaagttatgtaacaaaaaaagacaggtctggtacccnnncccgnancccccgcgccnccgcccccccttagccccctcctcttggttgggggccgtcccgctcctaaggcaggaagatggtggccgcaaagaagacgaaaaagtcgctggagtcgatcaactctaggctccaactcgttatgaaaagtgggaagtacgtcctggggtacaagcagactctgaagatgatcagacaaggcaaagcgaaattggtcattctcgctaacaactgcccagctttgagtggcaataatattgaactgggcacagcatgcggaaaatactacagagtgtgcacactggctatcattgatccaggtgactctgacatcattagaagcatgccagaacagactggtgaaaagtaaaccttttcacctacaaaatttcacctgcaaaccttaaacctgcaaaattttcctttaataaaatttgcttgttttaaaaaaaaaaaaaaaaaaaaaaaaaaaaaaaaaaaaaaaaaacaaaacaaaaaaaaaaaaaaaaaaaaaaaaaaaaggggggggggccccaaaaancccncngggggggccacaaagacgcgccccccgcgtctgacggagcaaaaggggcggccaacagacgggcgccgcgcaaacacagacacggcggcggcggcggccggacaacacaaaggccggcgagggaggacaaccgacgagcgggcggaacccggaaagaacaccccccccggcgggaga

SEQ ID NO: 325206 - DNA, 744 bp, Homo sapiens
ccggccgcggaccggctgcgagagacgacagaaggggctctcgttccccggccatcttagcggctgctgttggttgggggccgtcccgctcctaaggcaggaagatggtggccgcaaagaagacgaaaaagtcgctggagtcgatcaactctaggctccaactcgttatgaaaagtgggaagtacgtcctggggtacaagcagactctgaagatgatcagacaaggcaaagcgaaattggtcattctcgctaacaactgcccagctttgagtggcaataatattgaactgggcacagcatgcggaaaatactacagagtgtgcacactggctatcattgatccaggtgactctgacatcattagaagcatgccagaacagactggtgaaaagtaaaccttttcacctacaaaatttcacctgcaagtaggtgaaaaggtttacttttcaccagtctgcacagcatgcggaaaatactacagagtgtgcacacgtggctatcattgatccaggtgactctgacgatcattagaagcgatgccagaacagactggtgaaaagtaagaccttttcacctagcaaaatttcagctggcaaaccgttaaacctgggaaaagtttcccgtgtagataaaatttgctagctgtgaaagatgaacaggaagataagaaaacagagacgcataacgagaaagaaagaatgagaagggagatgtatggagaggagggaagaaggggaggagaga

SEQ ID NO: 325207 - DNA, 782 bp, Homo sapiens
ccggccgcggaccggctgcgagagacgacagaaggggctctcgttccccggccatcttagcggctgctgttggttgggggccgtcccgctcctaaggcaggaagatggtggccgcaaagaagacgaaaaagtcgctggagtcgatcaactctaggctccaactcgttatgaaaagtgggaagtacgtcctggggtacaagcagactctgaagatgatcagacaaggcaaagcgaaattggtcattctcgctaacaactgcccagctttgaggtaatcgaagagactgaacgtgcttcgcctaccgcgaattcatcgtgaacgaatatacaggagtgtaaacttgtaatctgagtaccatgaactcgaacacttgcaggataattacggtagcgattgtggtgtttggcccttcattcccgtctccccgacccacccccaaatcgtgtgctccccttctgtgagcttatttttggaggagaaatgtgtgtgtgtggcaggagtgaaaacagaacatcgaggtttaatggaaacacagacacattactgttttttccatgtattttgtgtcctgcttttttggttcttttagctttgaggtgctttaatgatgcttcattgtgtgaacttgttttagtgtcaaaaaactaggtaagaaaagttgaggctgggctatggagttgcaggctatcatagaatcacctagtttagcccgctaaatcagttctgagtcaagatttatgcttgactcactgttttgaaattgaacttagggggtgttgta

SEQ ID NO: 325208 - DNA, 1042 bp, Homo sapiens
ccggccgcggaccggctgcgagagacgacagaaggggctctcgttccccggccatcttagcggctgctgttggttgggggccgtcccgctcctaaggcaggaagatggtggccgcaaagaagacggtgagtgaggcgggccaggcccggaagacgattcacgtggagagatgtcttggccagggcgggcagatgtgagcccacgggggtgacagcatgcctgctggcatttggagggccccagaaggaatcccagtggccctctcaatgacttggggtcctcgacttcggaagtttaaggggctcggcttcaaaaagctgggtccggttttgaggcggttgcaggcgaggcccttaggtccgtatttaatgtttgctttgtagaaaaaaagtcgctggagtcgatcaactctaggctccaactcgttatgaaaagtgggaagtacgtcctggggtacaagcagactctgaagatgatcagacaaggcaaagcgaaattggtcattctcgctaacaactgcccagctttgaggtaatcgaagagactgaacgtgcttcgcctaccgcgaattcatcgtgaacgaatatacaggagtgtaaacttgtaatctgagtaccatgaactcgaacacttgcaggataattacggtagcgattgtggtgtttggcccttcattcccgtctccccgacccacccccaaatcgtgtgctccccttctgtgagcttatttttggaggagaaatgtgtgtgtgtggcaggagtgaaaacagaacatcgaggtttaatggaaacacagacacattactgttttttccatgtattttgtgtcctgcttttttggttcttttagctttgaggtgctttaatgatgcttcattgtgtgaacttgttttagtgtcaaaaaactaggtaagaaaagttgaggctgggctatggagttgcaggctatcatagaatcacctagtttagcccgctaaatcagttctgagtcaagatttatgcttgactcactgttttgaaattgaacttagggggtgttgta

SEQ ID NO: 325209 - DNA, 884 bp, Homo sapiens
  misc_feature (548)..(548): n is a, c, g, or t
  misc_feature (550)..(550): n is a, c, g, or t
  misc_feature (625)..(625): n is a, c, g, or t
  misc_feature (634)..(634): n is a, c, g, or t
  misc_feature (656)..(656): n is a, c, g, or t
  misc_feature (777)..(777): n is a, c, g, or t
ccggccgcggaccggctgcgagagacgacagaaggggctctcgttccccggccatcttagcggctgctgttggttgggggccgtcccgctcctaaggcaggaagatggtggccgcaaagaagacgaaaaagtcgctggagtcgatcaactctaggctccaactcgttatgaaaagtgggaagtacgtcctggggtacaagcagactctgaagatgatcagacaaggcaaagcgaaattggtcattctcgctaacaactgcccagctttgaggaaatctgaaatagagtactatgctatgttggctaaaactggtgtccatcactacagtggcaataatattgaactgggcacagcatgcggaaaatactacagagtgtgcacactggctatcattgatccaggtgactctgacatcattagaagcatgccagaacagactggtgaaaagtaaaccttttcacctacaaaatttcacctgcaaaccttaaacctgcaaaattttcctttaataaaatttgcttgttttaaaaaaaaaaaaaaaagggangnccccaggccttgctaagcatgcgtggtatcaagaggtgcattgaggcgctcctgcagctcctcccggcacgggantcctcaaanccccagcctcagttccctgacnggcacggggctcactcttccccattccggggccaggaacgccagcctgtttgcctttggtcccaattggggtgctcttccttcgcgaactgttccccaggtgggcaccaagctccgccttncggttgttgcccgggcccaggaggctgcgggaagaagtgcacgctgccaagcttcaacttgaattgcccccagtatttgcgagcccagaccactgagtgtgagggcc

SEQ ID NO: 325210 - DNA, 723 bp, Homo sapiens
  misc_feature (614)..(614): n is a, c, g, or t
gcgtgccgctactactactaaattcgcggccgcgtcgaaaaaagtcgctggagtcgatcaactctaggctccaactcgttatgaaaagtgggaagtacgtcctggggtacaagcagactctgaagatgatcagacaaggcaaagcgaaattggtcattctcgctaacaactgcccagctttgaggaaatctgaaatagagtactatgctatgttggctaaaactggtgtccatcactacagtggcaataatattgaactgggcacagcatgcggaaaatactacagagtgtgcacactggctatcattgatccaggtgactctgacatcattagaagcatgccagaacagactggtgaaaagtaaaccttttcacctacaaaatttcacctgcaaaccttaaacctgcaaaattttcctttaataaaatttgcttgttttaaaaaaaaaaaaaaaaaaaaaccgcggaggccttctagtgcgcgggggcgcggaaaaagcgaggtacgtgacaggggcccctgtggcctatgagcctgttcctcggacccagttttccttgttcccaaggggggatagaaccggcccggtatccccctataatggggaggccgntattaaattccgaaataagcccgagttttacccgggctttagacactcctgggcacaaaaggacacacgacacacaaagacaaaaacacccacccaacaaacacgggta

SEQ ID NO: 325211 - DNA, 902 bp, Homo sapiens
actgcatccaacgccgccagggtcacgggcggctgggacaacctccttgctgtgatccctggcggctcgtctacgccactgatccccaagtctgtgtgtgagacggtgctgatggacttcgatgcgctggtgcaggcacagacaggcctgggcacagctgcggcgttggatgcagtcgactgcatccaacgcgttgggggccgtcccgctcctaaggcaggaagatggtggccgcaaagaagacgaaaaagtcgctggagtcgatcaactctaggctccaactcgttatgaaaagtgggaagtacgtcctggggtacaagcagactctgaagatgatcagacaaggcaaagcgaaattggtcattctcgctaacaactgcccagctttgaggtaatcgaagagactgaacgtgcttcgcctaccgcgaattcatcgtgaacgaatatacaggagtgtaaacttgtaatctgagtaccatgaactcgaacacttgcaggataattacggtagcgattgtggtgtttggcccttcattcccgtctccccgacccacccccaaatcgtgtgctccccttctgtgagcttatttttggaggagaaatgtgtgtgtgtggcaggagtgaaaacagaacatcgaggtttaatggaaacacagacacattactgttttttccatgtattttgtgtcctgcttttttggttcttttagctttgaggtgctttaatgatgcttcattgtgtgaacttgttttagtgtcaaaaaactaggtaagaaaagttgaggctgggctatggagttgcaggctatcatagaatcacctagtttagcccgctaaatcagttctgagtcaagatttatgcttgactcactgttttgaaattgaacttagggggtgttgta

SEQ ID NO: 325212 - DNA, 821 bp, Homo sapiens
  misc_feature (769)..(769): n is a, c, g, or t
  misc_feature (771)..(771): n is a, c, g, or t
  misc_feature (775)..(775): n is a, c, g, or t
  misc_feature (784)..(784): n is a, c, g, or t
  misc_feature (802)..(802): n is a, c, g, or t
  misc_feature (805)..(805): n is a, c, g, or t
  misc_feature (810)..(810): n is a, c, g, or t
ccggccgcggaccggctgcgagagacgacagaaggggctctcgttccccggccatcttagcggctgctgttggttgggggccgtcccgctcctaaggcaggaagatggtggccgcaaagaagacgaaaaagtcgctggagtcgatcaactctaggctccaactcgttatgaaaagtgggaagtacgtcctggggtacaagcagactctgaagatgatcagacaaggcaaagcgaaattggtcattctcgctaacaactgcccagctttgaggaaatctgaaatagagtactatgctatgttggctaaaactggtgtccatcactacagtggcaataatattgaactgggcacagcatgcggaaaatactacagagtgtgcacactggctatcattgatccaggtgactctgacatcattagaagcatgccagaacagactggtgaaaagtaaaccttttcacctacaaaatttcacctgcaaaccttaaacctgcaaaattttcctttaataaaatttgcttgttttaaaaaaaaaaaaaaaaaaaaacctcgagactagttctctctctctctctctccccctccagactccaggacacgcccatgtatgtcccctgcgtgttcatcctgggcccagatccccctgccccagcaagactcgcagtgggatggctgctggcatgcccaccctgcatgcgctttgccctctccttgcaagcctggcacatagcttctctccatactcctagggtttgggaccccagcctngncccngttacctgngggtctctttgcactagngtncgccnccagtgggagc

SEQ ID NO: 325213 - DNA, 892 bp, Homo sapiens
  misc_feature (755)..(755): n is a, c, g, or t
ccggccgcggaccggctgcgagagacgacagaaggggctctcgttccccggccatcttagcggctgctgttggttgggggccgtcccgctcctaaggcaggaagatggtggccgcaaagaagacgaaaaagtcgctggagtcgatcaactctaggctccaactcgttatgaaaagtgggaagtacgtcctggggtacaagcagactctgaagatgatcagacaaggcaaagcgaaattggtcattctcgctaacaactgcccagctttgaggaaatctgaaatagagtactatgctatgttggctaaaactggtgtccatcactacagtggcaataatattgaactgggcacagcatgcggaaaatactacagagtgtgcacactggctatcattgatccaggtgactctgacatcattagaagcatgccagaacagactggtgaaaagtaaaccttttcacctacaaaatttcacctgcaaaccttaaacctgcaaaattttcctttaataaaatttgcttgttttaaaaaaaaaaaaaaaaaaaaacgggcgccgggcatgggcgccgccgccggcggtccccgaccggatccggagcggtgcccctgaggcctccgtgctggggtccgaggaagccggccatgaatgaccggagcagtcggaggcggacaatgaaggacgatgagacttcgagatctccattcctcgatgaggccccactaacccacgatcttttcgctgagccctctgganaaattcgagacctcggaggctggtctcgccctggtctgatgaaaggtcagaccagtgcctggtcgggagaatctgtgagagcgctcgaggaccgggaaaaggatccgggtgcgtgacaatctcttcgtcggatgaga

SEQ ID NO: 325214 - DNA, 758 bp, Homo sapiens
ccggccgcggaccggctgcgagagacgacagaaggggctctcgttccccggccatcttagcggctgctgttggttgggggccgtcccgctcctaaggcaggaagatggtggccgcaaagaagacgaaaaagtcgctggagtcgatcaactctaggctccaactcgttatgaaaagtgggaagtacgtcctggggtacaagcagactctgaagatgatcagacaaggcaaagcgaaattggtcattctcgctaacaactgcccagctttgaggaaatctgaaatagagtactatgctatgttggctaaaactggtgtccatcactacagtggcaataatattgaactgggcacagcatgcggaaaatactacagagtgtgcacactggctatcattgatccaggtgactctgacatcattagaagcatgccagaacagactggtgaaaagtaaaccttttcacctacaaaatttcacctgcaaaccttaaacctgcaaaattttcctttaataaaatttgcttgttttaaaaaaagaaaaaaatgatggagagagcttcctcggttatgtggacatgcttggtgtagcctatgaagccccttcgctggccactggttatggtgcatacttggctcagcctctgctgcgagaagttctggagaagcagccagtgctaagccagaccgaggcccgcgacttagtagaacgctgcatgcgagtgctgtactaccgagatgccgttcttacaccggtttcaac

SEQ ID NO: 325215 - DNA, 857 bp, Homo sapiens
  misc_feature (521)..(521): n is a, c, g, or t
  misc_feature (523)..(523): n is a, c, g, or t
  misc_feature (598)..(598): n is a, c, g, or t
  misc_feature (607)..(607): n is a, c, g, or t
  misc_feature (629)..(629): n is a, c, g, or t
  misc_feature (750)..(750): n is a, c, g, or t
cggacgcgtgggtcgacccacgcgtccgcttagcggctgctgttggttgggggccgtcccgctcctaaggcaggaagatggtggccgcaaagaagacgaaaaagtcgctggagtcgatcaactctaggctccaactcgttatgaaaagtgggaagtacgtcctggggtacaagcagactctgaagatgatcagacaaggcaaagcgaaattggtcattctcgctaacaactgcccagctttgaggaaatctgaaatagagtactatgctatgttggctaaaactggtgtccatcactacagtggcaataatattgaactgggcacagcatgcggaaaatactacagagtgtgcacactggctatcattgatccaggtgactctgacatcattagaagcatgccagaacagactggtgaaaagtaaaccttttcacctacaaaatttcacctgcaaaccttaaacctgcaaaattttcctttaataaaatttgcttgttttaaaaaaaaaaaaaaaagggangnccccaggccttgctaagcatgcgtggtatcaagaggtgcattgaggcgctcctgcagctcctcccggcacgggantcctcaaanccccagcctcagttccctgacnggcacggggctcactcttccccattccggggccaggaacgccagcctgtttgcctttggtcccaattggggtgctcttccttcgcgaactgttccccaggtgggcaccaagctccgccttncggttgttgcccgggcccaggaggctgcgggaagaagtgcacgctgccaagcttcaacttgaattgcccccagtatttgcgagcccagaccactgagtgtgagggcc

SEQ ID NO: 325216 - DNA, 281 bp, Homo sapiens
tggcaagtttatctattatgaagtcctctccttcaactattctagctagctttctagtaccacattaaagttctttaccttttatctgtaatatgaagtagacataattgttttattttttgagacagagtcacactccgtcatccaggttggagtgcagtggcatgatcttggctcactaatatatactagtatacattattttaaatgatggatgttttaatagtattcattgttcttaatatgtgcaagccttggtgtttcaggaaaataggtaattt

SEQ ID NO: 325217 - DNA, 2261 bp, Homo sapiens
cgctcggggggtgggaaagcgagcccggcagctcaatgacaaatcggtggaggacggctggggtccggccccgggagggggcggggcgcgtttaagagctgcgggccgggtgcggacggcggaggcggcgggactggtccctgctcttcagtgggtcatctgtgtgtcacagcctcagaagaccagcgagatggctgccaacaagagtaagggccagagctccttggccctccacaaggtgatcatggttggcagcggaggcgttggcaagtcagccctgacgcttcagttcatgtatgacgagtttgtagaagactatgaacctaccaaagctgacagttatagaaagaaagtggttcttgatggggaagaagttcagatagatattctggacaccgctgggcaagaggactacgcagccattcgagataactactttcggagtggggaagggtttcttcttgtgttctcaatcacagaacatgaatcctttacagcaactgccgaattcagggaacagattctccgtgtgaaggctgaagaagataaaattccactgctcgtcgtgggaaacaagtctgacctagaggagcggaggcaggtgcctgtggaggaggccaggagtaaagccgaagagtggggcgtgcagtacgtggagacgtcagcgaagacccgggccaacgtggacaaggtgttctttgacctaatgagagaaatcagaacaaagaagatgtcagaaaacaaagacaagaatggcaagaaaagcagcaagaacaagaaaagttttaaagaaagatgttgcttactatgagtgtcaaggtgacggatgaagccagctgctcctaaggacacagggctgggttggtaaagagaaggctatggttgacttcttgcttgtgcttcccactctccccgacttcattcactcaaacttctttaaatggggaaaaatatttgtgactcagtggctggcagaagaaataagcccatgcaagtggaagggctgctttgtcaggaggttgtggaatttctttcttctccccttcttccctcccaaaagcttagctatgtataaagtgccacagataggaaacagctgttaattacaaagagaaagaattgtcatagcatcttattttgttcctagttttataacattaccatccttcgttttgaactacagatgttgtagtgggttttggaggagggagtggagtaagatgccctcccacttttatcagtttagtagtagtactgagaaaaatcccttcagctctaagaacactgaaaaatccaccgattttttgggtaagcttcttggcaataccctgtggatctgaaacagctaaaaaaatgaatttgaattgcgccagataggtcaataccaagcttctgattcctcctcacatatgaaaagtgaaagttgtgagttgttttcctcttatttaaacattggcctattataatctgtgttggttatttttctcctgtaagcatcctgatttttctgtaggaacttttctttggcagaccaagtgaagactcaggaatggtgtgcattataaatgacacacattgccacttgtgtagatatttttaagttctttggctaagtcctctcctaactgcctgtcctctggttaggcccctccctctccactagtggtgaatgcatgtgtctgtctgatcagcatcactgcacacggaggtctagtgagcctcttgctaagtgtcacacacactcttcccaaagacgtgatgagttaaagttgtattctgaaatcatgaagccagagcctgtgccagaccttctgctacctctcatagaattgctctgtaattctaaatttaaaattagaagtagagagagataagccatcgcccctttgcctctgagaattggctgctgtttctaatataattattttctaagatagccagatagttagaaaaagattttcattgatgacatatctttaaactttcttgcatcagtattctaaattgagcaaactgaaagattttcatcaggaaaggagcactgtgggaagagcccagtattcacattttttccccatttttcagaagcgacatttcatatataggtgccaaaagtgaatcggggtgcggagagtgggaaccttttgaatttatgattgtcacagagatggtagaaattatgatctgactggaaaacaatcctgtatcccctcccaaagaatcatgggctttttttttgaattaaaaagcagacaaataga

SEQ ID NO: 325218 - DNA, 2551 bp, Homo sapiens
ctcccgctcgggaccgtccacttcctcagtcctccggccgcggcttgggcagggtcagggctgggaagtgttgcaaaaacttaactgccctcggaacttgcacgcgccgtgaactgggcggtgttcctaaagggcttcggtttgctggttttgttttggtcctgtcttgcaaatgagcataaagttgtttctcccccagcctcctcccctttcctttctgataggggccagcggcgaaggggcttctaaggggaagcgcctggactgggcatcgccgtcccggttctcgccgcctgtgggagtgtgaggttaaccgtgctcggtgcagggttgcggggcgcggagcttgctgcgtccacactgcttgtgtgagcagtgtcctctctgtgctcatttccaacgagaaacgttggaactttggtgttcttatcagctcttcagtgggtcatctgtgtgtcacagcctcagaagaccagcgagatggctgccaacaagagtaagggccagagctccttggccctccacaaggtgatcatggttggcagcggaggcgttggcaagtcagccctgacgcttcagttcatgtatgacgagtttgtagaagactatgaacctaccaaagctgacagttatagaaagaaagtggttcttgatggggaagaagttcagatagatattctggacaccgctgggcaagaggactacgcagccattcgagataactactttcggagtggggaagggtttcttcttgtgttctcaatcacagaacatgaatcctttacagcaactgccgaattcagggaacagattctccgtgtgaaggctgaagaagataaaattccactgctcgtcgtgggaaacaagtctgacctagaggagcggaggcaggtgcctgtggaggaggccaggagtaaagccgaagagtggggcgtgcagtacgtggagacgtcagcgaagacccgggccaacgtggacaaggtgttctttgacctaatgagagaaatcagaacaaagaagatgtcagaaaacaaagacaagaatggcaagaaaagcagcaagaacaagaaaagttttaaagaaagatgttgcttactatgagtgtcaaggtgacggatgaagccagctgctcctaaggacacagggctgggttggtaaagagaaggctatggttgacttcttgcttgtgcttcccactctccccgacttcattcactcaaacttctttaaatggggaaaaatatttgtgactcagtggctggcagaagaaataagcccatgcaagtggaagggctgctttgtcaggaggttgtggaatttctttcttctccccttcttccctcccaaaagcttagctatgtataaagtgccacagataggaaacagctgttaattacaaagagaaagaattgtcatagcatcttattttgttcctagttttataacattaccatccttcgttttgaactacagatgttgtagtgggttttggaggagggagtggagtaagatgccctcccacttttatcagtttagtagtagtactgagaaaaatcccttcagctctaagaacactgaaaaatccaccgattttttgggtaagcttcttggcaataccctgtggatctgaaacagctaaaaaaatgaatttgaattgcgccagataggtcaataccaagcttctgattcctcctcacatatgaaaagtgaaagttgtgagttgttttcctcttatttaaacattggcctattataatctgtgttggttatttttctcctgtaagcatcctgatttttctgtaggaacttttctttggcagaccaagtgaagactcaggaatggtgtgcattataaatgacacacattgccacttgtgtagatatttttaagttctttggctaagtcctctcctaactgcctgtcctctggttaggcccctccctctccactagtggtgaatgcatgtgtctgtctgatcagcatcactgcacacggaggtctagtgagcctcttgctaagtgtcacacacactcttcccaaagacgtgatgagttaaagttgtattctgaaatcatgaagccagagcctgtgccagaccttctgctacctctcatagaattgctctgtaattctaaatttaaaattagaagtagagagagataagccatcgcccctttgcctctgagaattggctgctgtttctaatataattattttctaagatagccagatagttagaaaaagattttcattgatgacatatctttaaactttcttgcatcagtattctaaattgagcaaactgaaagattttcatcaggaaaggagcactgtgggaagagcccagtattcacattttttccccatttttcagaagcgacatttcatatataggtgccaaaagtgaatcggggtgcggagagtgggaaccttttgaatttatgattgtcacagagatggtagaaattatgatctgactggaaaacaatcctgtatcccctcccaaagaatcatgggctttttttttgaattaaaaagcagacaaataga

SEQ ID NO: 325219 - DNA, 2100 bp, Homo sapiens
cgctcggggggtgggaaagcgagcccggcagctcaatgacaaatcggtggaggacggctggggtccggccccgggagggggcggggcgcgtttaagagctgcgggccgggtgcggacggcggaggcggcgggactggtccctgtttgtagaagactatgaacctaccaaagctgacagttatagaaagaaagtggttcttgatggggaagaagttcagatagatattctggacaccgctgggcaagaggactacgcagccattcgagataactactttcggagtggggaagggtttcttcttgtgttctcaatcacagaacatgaatcctttacagcaactgccgaattcagggaacagattctccgtgtgaaggctgaagaagataaaattccactgctcgtcgtgggaaacaagtctgacctagaggagcggaggcaggtgcctgtggaggaggccaggagtaaagccgaagagtggggcgtgcagtacgtggagacgtcagcgaagacccgggccaacgtggacaaggtgttctttgacctaatgagagaaatcagaacaaagaagatgtcagaaaacaaagacaagaatggcaagaaaagcagcaagaacaagaaaagttttaaagaaagatgttgcttactatgagtgtcaaggtgacggatgaagccagctgctcctaaggacacagggctgggttggtaaagagaaggctatggttgacttcttgcttgtgcttcccactctccccgacttcattcactcaaacttctttaaatggggaaaaatatttgtgactcagtggctggcagaagaaataagcccatgcaagtggaagggctgctttgtcaggaggttgtggaatttctttcttctccccttcttccctcccaaaagcttagctatgtataaagtgccacagataggaaacagctgttaattacaaagagaaagaattgtcatagcatcttattttgttcctagttttataacattaccatccttcgttttgaactacagatgttgtagtgggttttggaggagggagtggagtaagatgccctcccacttttatcagtttagtagtagtactgagaaaaatcccttcagctctaagaacactgaaaaatccaccgattttttgggtaagcttcttggcaataccctgtggatctgaaacagctaaaaaaatgaatttgaattgcgccagataggtcaataccaagcttctgattcctcctcacatatgaaaagtgaaagttgtgagttgttttcctcttatttaaacattggcctattataatctgtgttggttatttttctcctgtaagcatcctgatttttctgtaggaacttttctttggcagaccaagtgaagactcaggaatggtgtgcattataaatgacacacattgccacttgtgtagatatttttaagttctttggctaagtcctctcctaactgcctgtcctctggttaggcccctccctctccactagtggtgaatgcatgtgtctgtctgatcagcatcactgcacacggaggtctagtgagcctcttgctaagtgtcacacacactcttcccaaagacgtgatgagttaaagttgtattctgaaatcatgaagccagagcctgtgccagaccttctgctacctctcatagaattgctctgtaattctaaatttaaaattagaagtagagagagataagccatcgcccctttgcctctgagaattggctgctgtttctaatataattattttctaagatagccagatagttagaaaaagattttcattgatgacatatctttaaactttcttgcatcagtattctaaattgagcaaactgaaagattttcatcaggaaaggagcactgtgggaagagcccagtattcacattttttccccatttttcagaagcgacatttcatatataggtgccaaaagtgaatcggggtgcggagagtgggaaccttttgaatttatgattgtcacagagatggtagaaattatgatctgactggaaaacaatcctgtatcccctcccaaagaatcatgggctttttttttgaattaaaaagcagacaaataga

SEQ ID NO: 325220 - DNA, 2243 bp, Homo sapiens
  misc_feature (2)..(2): n is a, c, g, or t
anattcggcatgaggtaccaatctgaagtgggaggcggcgggactggtccctctcttcagtgggtcatctgtgtgtcacagcctcagaagaccagcgagatggctgccaacaagagtaagggccagagctccttggccctccacaaggtgatcatggttggcagcggaggcgttggcaagtcagccctgacgcttcagttcatgtatgacgaggaatgtttcaaaatcattggcatatgacaagaaaaagtatacagcaaacaaaaaagtagaaggtattctagagtttgtagaagactatgaacctaccaaagctgacagttatagaaagaaagtggttcttgatggggaagaagttcagatagatattctggacaccgctgggcaagaggactacgcagccattcgagataactactttcggagtggggaagggtttcttcttgtgttctcaatcacagaacatgaatcctttacagcaactgccgaattcagggaacagattctccgtgtgaaggctgaagaagataaaattccactgctcgtcgtgggaaacaagtctgacctagaggagcggaggcaggtgcctgtggaggaggccaggagtaaagccgaagagtggggcgtgcagtacgtggagacgtcagcgaagacccgggccaacgtggacaaggtgttctttgacctaatgagagaaatcagaacaaagaagatgtcagaaaacaaagacaagaatggcaagaaaagcagcaagaacaagaaaagttttaaagaaagatgttgcttactatgagtgtcaaggtgacggatgaagccagctgctcctaaggacacagggctgggttggtaaagagaaggctatggttgacttcttgcttgtgcttcccactctccccgacttcattcactcaaacttctttaaatggggaaaaatatttgtgactcagtggctggcagaagaaataagcccatgcaagtggaagggctgctttgtcaggaggttgtggaatttctttcttctccccttcttccctcccaaaagcttagctatgtataaagtgccacagataggaaacagctgttaattacaaagagaaagaattgtcatagcatcttattttgttcctagttttataacattaccatccttcgttttgaactacagatgttgtagtgggttttggaggagggagtggagtaagatgccctcccacttttatcagtttagtagtagtactgagaaaaatcccttcagctctaagaacactgaaaaatccaccgattttttgggtaagcttcttggcaataccctgtggatctgaaacagctaaaaaaatgaatttgaattgcgccagataggtcaataccaagcttctgattcctcctcacatatgaaaagtgaaagttgtgagttgttttcctcttatttaaacattggcctattataatctgtgttggttatttttctcctgtaagcatcctgatttttctgtaggaacttttctttggcagaccaagtgaagactcaggaatggtgtgcattataaatgacacacattgccacttgtgtagatatttttaagttctttggctaagtcctctcctaactgcctgtcctctggttaggcccctccctctccactagtggtgaatgcatgtgtctgtctgatcagcatcactgcacacggaggtctagtgagcctcttgctaagtgtcacacacactcttcccaaagacgtgatgagttaaagttgtattctgaaatcatgaagccagagcctgtgccagaccttctgctacctctcatagaattgctctgtaattctaaatttaaaattagaagtagagagagataagccatcgcccctttgcctctgagaattggctgctgtttctaatataattattttctaagatagccagatagttagaaaaagattttcattgatgacatatctttaaactttcttgcatcagtattctaaattgagcaaactgaaagattttcatcaggaaaggagcactgtgggaagagcccagtattcacattttttccccatttttcagaagcgacatttcatatataggtgccaaaagtgaatcggggtgcggagagtgggaaccttttgaatttatgattgtcacagagatggtagaaattatgatctgactggaaaacaatcctgtatcccctcccaaagaatcatgggctttttttttgaattaaaaagcagacaaataga

SEQ ID NO: 325221 - DNA, 2120 bp, Homo sapiens
  misc_feature (2)..(2): n is a, c, g, or t
anattcggcatgaggtaccaatctgaagtgggaggcggcgggactggtccctctcttcagtgggtcatctgtgtgtcacagcctcagaagaccagcgagatggctgccaacaagagtaagggccagagctccttggccctccacaaggtgatcatggttggcagcggaggcgttggcaagtcagccctgacgcttcagttcatgtatgacgagtttgtagaagactatgaacctaccaaagctgacagttatagaaagaaagtggttcttgatggggaagaagttcagatagatattctggacaccgctgggcaagaggactacgcagccattcgagataaatgaatcctttacagcaactgccgaattcagggaacagattctccgtgtgaaggctgaagaagataaaattccactgctcgtcgtgggaaacaagtctgacctagaggagcggaggcaggtgcctgtggaggaggccaggagtaaagccgaagagtggggcgtgcagtacgtggagacgtcagcgaagacccgggccaacgtggacaaggtgttctttgacctaatgagagaaatcagaacaaagaagatgtcagaaaacaaagacaagaatggcaagaaaagcagcaagaacaagaaaagttttaaagaaagatgttgcttactatgagtgtcaaggtgacggatgaagccagctgctcctaaggacacagggctgggttggtaaagagaaggctatggttgacttcttgcttgtgcttcccactctccccgacttcattcactcaaacttctttaaatggggaaaaatatttgtgactcagtggctggcagaagaaataagcccatgcaagtggaagggctgctttgtcaggaggttgtggaatttctttcttctccccttcttccctcccaaaagcttagctatgtataaagtgccacagataggaaacagctgttaattacaaagagaaagaattgtcatagcatcttattttgttcctagttttataacattaccatccttcgttttgaactacagatgttgtagtgggttttggaggagggagtggagtaagatgccctcccacttttatcagtttagtagtagtactgagaaaaatcccttcagctctaagaacactgaaaaatccaccgattttttgggtaagcttcttggcaataccctgtggatctgaaacagctaaaaaaatgaatttgaattgcgccagataggtcaataccaagcttctgattcctcctcacatatgaaaagtgaaagttgtgagttgttttcctcttatttaaacattggcctattataatctgtgttggttatttttctcctgtaagcatcctgatttttctgtaggaacttttctttggcagaccaagtgaagactcaggaatggtgtgcattataaatgacacacattgccacttgtgtagatatttttaagttctttggctaagtcctctcctaactgcctgtcctctggttaggcccctccctctccactagtggtgaatgcatgtgtctgtctgatcagcatcactgcacacggaggtctagtgagcctcttgctaagtgtcacacacactcttcccaaagacgtgatgagttaaagttgtattctgaaatcatgaagccagagcctgtgccagaccttctgctacctctcatagaattgctctgtaattctaaatttaaaattagaagtagagagagataagccatcgcccctttgcctctgagaattggctgctgtttctaatataattattttctaagatagccagatagttagaaaaagattttcattgatgacatatctttaaactttcttgcatcagtattctaaattgagcaaactgaaagattttcatcaggaaaggagcactgtgggaagagcccagtattcacattttttccccatttttcagaagcgacatttcatatataggtgccaaaagtgaatcggggtgcggagagtgggaaccttttgaatttatgattgtcacagagatggtagaaattatgatctgactggaaaacaatcctgtatcccctcccaaagaatcatgggctttttttttgaattaaaaagcagacaaataga

SEQ ID NO: 325222 - DNA, 1614 bp, Homo sapiens
cgaatcgagtcggtaccaagttcgggccggggcatgtggacaaggtgttctttgacctaatgagagaaatcagaacaaagaagatgtcagaaaacaaagacaagaatggcaagaaaagcagcaagaacaagaaaagttttaaagaaagatgttgcttactatgagtgtcaaggtgacggatgaagccagctgctcctaaggacacagggctgggttggtaaagagaaggctatggttgacttcttgcttgtgcttcccactctccccgacttcattcactcaaacttctttaaatggggaaaaatatttgtgactcagtggctggcagaagaaataagcccatgcaagtggaagggctgctttgtcaggaggttgtggaatttctttcttctccccttcttccctcccaaaagcttagctatgtataaagtgccacagataggaaacagctgttaattacaaagagaaagaattgtcatagcatcttattttgttcctagttttataacattaccatccttcgttttgaactacagatgttgtagtgggttttggaggagggagtggagtaagatgccctcccacttttatcagtttagtagtagtactgagaaaaatcccttcagctctaagaacactgaaaaatccaccgattttttgggtaagcttcttggcaataccctgtggatctgaaacagctaaaaaaatgaatttgaattgcgccagataggtcaataccaagcttctgattcctcctcacatatgaaaagtgaaagttgtgagttgttttcctcttatttaaacattggcctattataatctgtgttggttatttttctcctgtaagcatcctgatttttctgtaggaacttttctttggcagaccaagtgaagactcaggaatggtgtgcattataaatgacacacattgccacttgtgtagatatttttaagttctttggctaagtcctctcctaactgcctgtcctctggttaggcccctccctctccactagtggtgaatgcatgtgtctgtctgatcagcatcactgcacacggaggtctagtgagcctcttgctaagtgtcacacacactcttcccaaagacgtgatgagttaaagttgtattctgaaatcatgaagccagagcctgtgccagaccttctgctacctctcatagaattgctctgtaattctaaatttaaaattagaagtagagagagataagccatcgcccctttgcctctgagaattggctgctgtttctaatataattattttctaagatagccagatagttagaaaaagattttcattgatgacatatctttaaactttcttgcatcagtattctaaattgagcaaactgaaagattttcatcaggaaaggagcactgtgggaagagcccagtattcacattttttccccatttttcagaagcgacatttcatatataggtgccaaaagtgaatcggggtgcggagagtgggaaccttttgaatttatgattgtcacagagatggtagaaattatgatctgactggaaaacaatcctgtatcccctcccaaagaatcatgggctttttttttgaattaaaaagcagacaaataga

SEQ ID NO: 325223 - DNA, 2003 bp, Homo sapiens
cgctcggggggtgggaaagcgagcccggcagctcaatgacaaatcggtggaggacggctggggtccggccccgggagggggcggggcgcgtttaagagctgcgggccgggtgcggacggcggaggcggcgggactggtccctgctcttcagtgggtcatctgtgtgtcacagcctcagaagaccagcgagatggctgccaacaagagtaagggccagagctccttggccctccacaaggtgatcatggttggcagcggaggcgttggcaagtcagccctgacgcttcagttcatgtatgacgagtttgtagaagactatgaacctaccaaagctgacagttatagaaagaaagtggttcttgatggggaagaagttcagatagatattctggacaccgctgggcaagaggactacgcagccattcgagataactactttcggagtggggaagggtttcttcttgtgttctcaatcacagaacatgaatcctttacagcaactgccgaattcagggaacagattctccgtgtgaaggctgaagaagataaaattccactgctcgtcgtgggaaacaagtctgacctagaggagcggaggcaggtgcctgtggaggaggccaggagtaaagccgaagagtggggcgtgcagtacgtggagacgtcagcgaagacccgggccaacgtggacaaggtgttctttgacctaatgagagaaatcagaacaaagaagatgtcagaaaacaaagacaagaatggcaagaaaagcagcaagaacaagaaaagttttaaagaaagatgttgcttactatgagtgtcaaggtgacggatgaagccagctgctcctaaggacacagggctgggttggtaaagagaaggctatggttgacttcttgcttgtgcttcccactctccccgacttcattcactcaaacttctttaaatggggaaaaatatttgtgactcagtggctggcagaagaaataagcccatgcaagtggaagggctgctttgtcaggaggttgtggaatttctttcttctccccttcttccctcccaaaagcttagctatgtataaagtgccacagataggaaacagctgttaattacaaagagaaagaattgtcatagcatcttattttgttcctagttttataacattaccatccttcgttttgaactacagatgttgtagtgggttttggaggagggagtggagtaagatgccctcccacttttatcagtttagtagtagtactgagaaaaatcccttcagctctaagaacactgaaaaatccaccgattttttgggtaagcttcttggcaataccctgtggatctgaaacagctaaaaaaatgaatttgaattgcgccagataggtcaataccaagcttctgattcctcctcacatatgaaaagtgaaagttgtgagttgttttcctcttatttaaacattggcctattataatctgtgttggttatttttctcctgtaagcatcctgatttttctgtaggaacttttctttggcagaccaagtgaagactcaggaatggtgtgcattataaatgacacacattgccacttgtgtagatatttttaagttctttggctaagtcctctcctaactgcctgtcctctggttaggcccctccctctccactagtggtgaatgcatgtgtctgtctgatcagcatcactgcacacggaggtctagtgagcctcttgctaagtgtcacacacactcttcccaaagacgtgatgagttaaagttgtattctgaaatcatgaagccagagcctgtgccagaccttctgctacctctcatagaattgctctgtaattctaaatttaaaattagaagtagagagagataagccatcgcccctttgcctctgagaattggctgctgtttctaatataattattttctaagatgccctcccacttttatcagtttagtagtagtactgagaaaaatcccttcagctctaagaacactgaaa

SEQ ID NO: 325224 - DNA, 2235 bp, Homo sapiens
cgctcggggggtgggaaagcgagcccggcagctcaatgacaaatcggtggaggacggctggggtccggccccgggagggggcggggcgcgtttaagagctgcgggccgggtgcggacggcggaggcggcgggactggtccctgctcttcagtgggtcatctgtgtgtcacagcctcagaagaccagcgagatggctgccaacaagagtaagggccagagctccttggccctccacaaggtgatcatggttggcagcggaggcgttggcaagtcagccctgacgcttcagttcatgtatgacgagtttgtagaagactatgaacctaccaaagctgacagttatagaaagaaagtggttcttgatggggaagaagttcagatagatattctggacaccgctgggcaagaggactacgcagccattcgagataactactttcggagtggggaagggtttcttcttgtgttctcaatcacagaacatgaatcctttacagcaactgccgaattcagggaacagattctccgtgtgaaggctgaagaagataaaattccactgctcgtcgtgggaaacaagtctgacctagaggagcggaggcaggtgcctgtggaggaggccaggagtaaagccgaagagtggggcgtgcagtacgtggagacgtcagcgaagacccgggccaacgtggacaaggtgttctttgacctaatgagagaaatcagaacaaagaagatgtcagaaaacaaagacaagaatggcaagaaaagcagcaagaacaagaaaagttttaaagaaagatgttgcttactatgagtgtcaaggtgacggatgaagccagctgctcctaaggacacagggctgggttggtaaagagaaggctatggttgacttcttgcttgtgcttcccactctccccgacttcattcactcaaacttctttaaatggggaaaaatatttgtgactcagtggctggcagaagaaataagcccatgcaagtggaagggctgctttgtcaggaggttgtggaatttctttcttctccccttcttccctcccaaaagcttagctatgtataaagtgccacagataggaaacagctgttaattacaaagagaaagaattgtcatagcatcttattttgttcctagttttataacattaccatccttcgttttgaactacagatgttgtagtgggttttggaggagggagtggagtaagatgccctcccacttttatcagtttagtagtagtactgagaaaaatcccttcagctctaagaacactgaaaaatccaccgattttttgggtaagcttcttggcaataccctgtggatctgaaacagctaaaaaaatgaatttgaattgcgccagataggtcaataccaagcttctgattcctcctcacatatgaaaagtgaaagttgtgagttgttttcctcttatttaaacattggcctattataatctgtgttggttatttttctcctgtaagcatcctgatttttctgtaggaacttttctttggcagaccaagtgaagactcaggaatggtgtgcattataaatgacacacattgccacttgtgtagatatttttaagttctttggctaagtcctctcctaactgcctgtcctctggttaggcccctccctctccactagtggtgaatgcatgtgtctgtctgatcagcatcactgcacacggaggtctagtgagcctcttgctaagtgtcacacacactcttcccaaagacgtgatgagttaaagttgtattctgaaatcatgaagccagagcctgtgccagaccttctgctacctctcatagaattgctctgtaattctaaatttaaaattagaagtagagagagataagccatcgcccctttgcctctgagaattggctgctgtttctaatataattattttctaagatagccagatagttagaaaaagattttcattgatgacatatctttaaactttcttgcatcagtattctaaattgagcaaactgaaagattttcatcaggaaaggagcactgtgggaagagcccagtattcacattttttccccatttttcagaagcgacatttcatatataggtgccccaagctagccactatcatctgacctgcaacaactctagctcccccacaaacaaccccgcccttccttttcaaccacaaccccgccttctcccccgccacccctctcccacctctcttgacccct

SEQ ID NO: 325225 - DNA, 834 bp, Homo sapiens
cgctcggggggtgggaaagcgagcccggcagctcaatgacaaatcggtggaggacggctggggtccggccccgggagggggcggggcgcgtttaagagctgcgggccgggtgcggacggcggaggcggcgggactggtccctgctcttcagtgggtcatctgtgtgtcacagcctcagaagaccagcgagatggctgccaacaagagtaagggccagagctccttggccctccacaaggtgaatgcatgtgtctgtctgatcagcatcactgcacacggaggtctagtgagcctcttgctaagtgtcacacacactcttcccaaagacgtgatgagttaaagttgtattctgaaatcatgaagccagagcctgtgccagaccttctgctacctctcatagaattgctctgtaattctaaatttaaaattagaagtagagagagataagccatcgcccctttgcctctgagaattggctgctgtttctaatataattattttctaagatagccagatagttagaaaaagattttcattgatgacatatctttaaactttcttgcatcagtattctaaattgagcaaactgaaagattttcatcaggaaaggagcactgtgggaagagcccagtattcacattttttccccatttttcagaagcgacatttcatatataggtgccaaaagtgaatcggggtgcggagagtgggaaccttttgaatttatgattgtcacagagatggtagaaattatgatctgactggaaaacaatcctgtatcccctcccaaagaatcatgggctttttttttgaattaaaaagcagacaaataga

SEQ ID NO: 325226 - DNA, 2895 bp, Homo sapiens
cagagacctgtccatcaccgagtccacgagtggcagcacctaccacaccgcagtaccttggcgaggcggagcaggggcaggcaggtcgcggaagggggaggcggagcaaggccggcgggagccaatcggcctggcggcacgagggggcgggggcggggtcaacgcgcgcgacccaaacacacgggccgggcgcaccctgcagccgcgccgctccgcggccttccggcgcggggccggggaacctcctccccatctgcgcaccccccgccttcgcggcccagatcctcccgccagcccggcccctccttcgcagggggagcgaggcgacggttgccgggaagcgcgcgccacctctccctcccatttttcgttctcccctcgcgcgccacccgtttttcctctttctccgttaataacagctgggtggctgggggaggagggaaggtggccccggcggagtctgggcgggcgcctcccactcagccgccagccgccgtgggagccggaggatggcggcggtagcagcggccgcccgagaggaggcggtgccgagatcgggggcgccgagcgcggcagcagagagcggtagcggcccgtcgtggcgcaccagaaccgaaaccagcggcagccgcacggccacttgagccgccccttcctgctggagccagcgaggggtgcctgcagccgggaccccttcctctccgcgtctcctcgtctcccgcgcagccgctccctcggcggggccgtggggagcgtggcgtcgggggcccgcgcggcgcagtcccccttcagcatcccgaacagcagcagcggcccgtacggctcgcaggactcggtgcacagcagccctgaggacggcggcggcggccgggaccggccggtgggcgggagccccggcgggccgcgcctggtgatcggctccttaccagctcacctctcgccgcacatgtttggaggatttaagtgccctgtatgctcaaaatttgtatcctcagatgaaatggatttgcatcttgtaatgtgtttaacaaagccacgaataacctataatgaggatgtactgagtaaagatgctggggaatgtgcaatatgccttgaagaattgcagcagggagatactatagcacgactgccttgtctatgcatatatcataaaggctgcatagatgaatggtttgaagtaaatagatcttgccctgagcacccttcagattaagcgtcagcttcctgttttataggttttcttgtcttgacaagatgcttgaaaaaccaagaggatatgaaaatctgtctctggagaaacaaagacgcaggcatactcagccagaaatctgagttttgtgagacttggtaatacagagatggacaatcgtactggggtaaaaaaaccctgctgaagagaggacagtgaccacagaactcagtgtaccaaacatgcatacaaaggacacacagggattttgaaaatgctgcacatcccttaatagtcatctacataggtaatactgataaacattttgtattcagacgccaaagttaactgatttaaaagttgatttactttttattaagttctccagagctgcacaactagttatgttttgatttgttttgttttttaatttggggtctctttgttttccccaacataatgttcataatgtttctgcattcatctgttcttaaattgaaaaacatataatttacttcttataaattgaagtcttaaatgtgaaaccaagaaatgtaatcaagcagtaaaaacatctgaatgtagaccatgatctcaagttcttccattttctcccccacgagtggaaaatagacttctacataggaaagctaaaatatgttaatatttttaaattaaaggtttaatatcagaatgcagtccaaagagcaaatcatattacataattacattttaattaaatatagaatattctactgaattgcaatttattaaatattcttatcctcttaaataaaactgctcaacagttaatcagcagtgaatcatcttgcagctatgcaatttaaaaaaaatacagattaccaatttcaagtgctgccagctaaaataactgttttaacgggtatcttttgtttgttcttttcacttaattattttattgtgctttgcatctccaggcagttctctcacatttgggtaaaatgtttagcaggctgtaaacttaagaaaagggtaaaataaaattttctggagaggaacttggaatttgagggagattttatatacctttaaaaactgtaatttaattgggatgccaggtttatagcaatttgcaactttaattttccagataatctggaggttagcatttgataaatgattttttaaagtagatatgaagattttgttaatttataatttattcatgtgttattactgtaattgaaaatgttatagacacttttaaattcagtttgtgtagaaagaaatgtgttaaacaaaattatgttaataaatattcccacataatacatctgaatggttaaaaatactggaagagttgtcagggctacaatagtgaatgtccttttttttaatatcaaaaatatcgataagtaggttttgtgttttcaacgtagggaaaatgttatcagtgaataggtggtgtactttacttggtataatttaaagttgcacagtaagtactgtttccttattttaatctttctttactcataatgtatttaagaatttgctgttttatttaacgctgctactcttaatcttctctaaatttttccccctactttcttgcttctgtttcacattttttaaaagggcaagtacaggagcaactgctgctacccagaaaaatgtgtgtattataaataattaaagagtttttaattgctttctgtatg

SEQ ID NO: 325227 - DNA, 2042 bp, Homo sapiens
  misc_feature (1888)..(1888): n is a, c, g, or t
cagagacctgtccatcaccgagtccacgagtggcagcacctaccacaccgcagtaccttggcgaggcggagcaggggcaggcaggtcgcggaagggggaggcggagcaaggccggcgggagccaatcggcctggcggcacgagggggcgggggcggggtcaacgcgcgcgacccaaacacacgggccgggcgcaccctgcagccgcgccgctccgcggccttccggcgcggggccggggaacctcctccccatctgcgcaccccccgccttcgcggcccagatcctcccgccagcccggcccctccttcgcagggggagcgaggcgacggttgccgggaagcgcgcgccacctctccctcccatttttcgttctcccctcgcgcgccacccgtttttcctctttctccgttaataacagctgggtggctgggggaggagggaaggtggccccggcggagtctgggcgggcgcctcccactcagccgccagccgccgtgggagccggaggatggcggcggtagcagcggccgcccgagaggaggcggtgccgagatcgggggcgccgagcgcggcagcagagagcggtagcggcccgtcgtggcgcaccagaaccgaaaccagcggcagccgcacggccacttgagccgccccttcctgctggagccagcgaggggtgcctgcagccgggaccccttcctctccgcgtctcctcgtctcccgcgcccgcgtcaggccgtcggcctcgcccgccgccccaagaagagcgcgccgggcgccgactgcccctctggacgccgggcggcggccctggacgtgcgggggcctctctgggccggccgcggcgcctgggccctgccctctagctcccgcgctcgctcccgccctcccggctctcggggcgcagcgcgcgggcccggcccggggcagggcggacatgggcgccaaacagagcggcccggccgccgctaacggccgcacgcgcgcgtactcgggctcggatctaccttccagtagcagcggaggcgccaatgggaccgcgggcggcggcgggggcgctcgggccgccgccgcggggaggttcccggctcaggtgcccagcgcgcaccagcccagcgcctccggcggcgccgcggcggccgcggcggccccggcagccccggcggccccgcgcagccgctccctcggcggggccgtggggagcgtggcgtcgggggcccgcgcggcgcagtcccccttcagcatcccgaacagcagcagcggcccgtacggctcgcaggactcggtgcacagcagccctgaggacggcggcggcggccgggaccggccggtgggcgggagccccggcgggccgcgcctggtgatcggctccttaccagctcacctctcgccgcacatgtttggaggatttaagtgccctgtatgctcaaaatttgtatcctcagatgaaatggatttgcatcttgtaatgtgtttaacaaagccacgaataacctataatgaggatgtactgagtaaagatgctggggaatgtgcaatatgccttgaagaattgcagcagggagatactatagcacgactgccttgtctatgcatatatcataaaggctgcatagatgaatggtttgaagtaaatagatcttgccctgagcacccttcagattaagcgtcagcttcctgttttataggttttcttgtcttgacaagatgcttgaaaaaccaagaggatatgaaacgccacggggggtgtcagacacgagacaggcataatcagcgcagaaatgtgaggcttgtaagactgcgtaataacatgagagggaactatcgaatgggggtatgtaaagccgtggcgaagggaagacagagacaacagaaatcagtgtacaatanatgcatactagggtcagaatgggatatggaaaatggtgcaaatcacgtaatagtcatttaaataaggttatagtgatatacatattcgtagtgctggtacgctgaagtaagtgaggtaaaaggtgattactgttctatgtagttttccagagct

SEQ ID NO: 325228 - DNA, 1640 bp, Homo sapiens
cagagacctgtccatcaccgagtccacgagtggcagcacctaccacaccgcagtaccttggcgaggcggagcaggggcaggcaggtcgcggaagggggaggcggagcaaggccggcgggagccaatcggcctggcggcacgagggggcgggggcggggtcaacgcgcgcgacccaaacacacgggccgggcgcaccctgcagccgcgccgctccgcggccttccggcgcggggccggggaacctcctccccatctgcgcaccccccgccttcgcggcccagatcctcccgccagcccggcccctccttcgcagggggagcgaggcgacggttgccgggaagcgcgcgccacctctccctcccatttttcgttctcccctcgcgcgccacccgtttttcctctttctccgttaataacagctgggtggctgggggaggagggaaggtggccccggcggagtctgggcgggcgcctcccactcagccgccagccgccgtgggagccggaggatggcggcggtagcagcggccgcccgagaggaggcggtgccgagatcgggggcgccgagcgcggcagcagagagcggtagcggcccgtcgtggcgcaccagaaccgaaaccagcggcagccgcacggccacttgagccgccccttcctgctggagccagcgaggggtgcctgcagccgggaccccttcctctccgcgtctcctcgtctcccgcgcccgcgtcaggccgtcggcctcgcccgccgccccaagaagagcgcgccgggcgccgactgcccctctggacgccgggcggcggccctggacgtgcgggggcctctctgggccggccgcggcgcctgggccctgccctctagctcccgcgctcgctcccgccctcccggctctcggggcgcagcgcgcgggcccggcccggggcagggcggacatgggcgccaaacagagcggcccggccgccgctaacggccgcacgcgcgcgtactcgggctcggatctaccttccagtagcagcggaggcgccaatgggaccgcgggcggcggcgggggcgctcgggccgccgccgcggggaggttcccggctcaggtgcccagcgcgcaccagcccagcgcctccggcggcgccgcggcggccgcggcggccccggcagccccggcggccccgcgcagccgctccctcggcggggccgtggggagcgtggcgtcgggggcccgcgcggcgcagtcccccttcagcatcccgaacagcagcagcggcccgtacggctcgcaggactcggtgcacagcagccctgaggacggcggcggcggccgggaccggccggtgggcgggagccccggcgggccgcgcctggtgatcggctccttaccagctcacctctcgccgcacatgtttggagactgaggagtgttaaagtgaacagacgctttcttgactactgctagtgtcgtccatcacctttgttttaaaacaggtcttaagggtatttcctaatatttaaaaatgttgatggtattttagggtttgtttggctttaatttacgtctacgtttttttttccactgtcaagtagctgttgttcataagagcataatatgagtggtcaaatagcctttaatgatgcagcaaggatgg

SEQ ID NO: 325229 - DNA, 737 bp, Homo sapiens
gggtttgaggaggattcagtgttgttaaaacattttgtaaggcactgtgtagccataaagctcaacgtttctgatatccttcagcataagaatttaataatcaacccaaaatagagagacatgaatatttgtggtcttgattagttagaaaattgctgtacttattttggggtttttagttatttgggagaaatattttaaatctccgtgtgtgtgcattctttacttgcgtgtagtccttattgtgaaagggggatgactttgttatgtattttttgtgactaaactttaattgatccttctgtttcttaatctgttcttctccagatcactgattttatgagttttcagaatagtaagtaagggtatgaagacttacagtaactaaagcaatgttcatggggaaatctatttttacacaggttttcttgtcttgacaagatgcttgaaaaaccaagaggatatgaaaatctgtctctggagaaacaaagacgcaggcatactcagccagaaatctgagttttgtgagacttggtaatacagagatggacaatcgtactggggtaaaaaaaccctgctgaagagaggacagtgaccacagaactcagtgtaccaaacatgcatacaaaggacacacagggattttgaaaatgctgcacatcccttaatagtcatctacataggtaatactgataaacattttgtattcagacgccaaagttaactgatttaaaagt

SEQ ID NO: 325230 - DNA, 3343 bp, Homo sapiens
cagagacctgtccatcaccgagtccacgagtggcagcacctaccacaccgcagtaccttggcgaggcggagcaggggcaggcaggtcgcggaagggggaggcggagcaaggccggcgggagccaatcggcctggcggcacgagggggcgggggcggggtcaacgcgcgcgacccaaacacacgggccgggcgcaccctgcagccgcgccgctccgcggccttccggcgcggggccggggaacctcctccccatctgcgcaccccccgccttcgcggcccagatcctcccgccagcccggcccctccttcgcagggggagcgaggcgacggttgccgggaagcgcgcgccacctctccctcccatttttcgttctcccctcgcgcgccacccgtttttcctctttctccgttaataacagctgggtggctgggggaggagggaaggtggccccggcggagtctgggcgggcgcctcccactcagccgccagccgccgtgggagccggaggatggcggcggtagcagcggccgcccgagaggaggcggtgccgagatcgggggcgccgagcgcggcagcagagagcggtagcggcccgtcgtggcgcaccagaaccgaaaccagcggcagccgcacggccacttgagccgccccttcctgctggagccagcgaggggtgcctgcagccgggaccccttcctctccgcgtctcctcgtctcccgcgcccgcgtcaggccgtcggcctcgcccgccgccccaagaagagcgcgccgggcgccgactgcccctctggacgccgggcggcggccctggacgtgcgggggcctctctgggccggccgcggcgcctgggccctgccctctagctcccgcgctcgctcccgccctcccggctctcggggcgcagcgcgcgggcccggcccggggcagggcggacatgggcgccaaacagagcggcccggccgccgctaacggccgcacgcgcgcgtactcgggctcggatctaccttccagtagcagcggaggcgccaatgggaccgcgggcggcggcgggggcgctcgggccgccgccgcggggaggttcccggctcaggtgcccagcgcgcaccagcccagcgcctccggcggcgccgcggcggccgcggcggccccggcagccccggcggccccgcgcagccgctccctcggcggggccgtggggagcgtggcgtcgggggcccgcgcggcgcagtcccccttcagcatcccgaacagcagcagcggcccgtacggctcgcaggactcggtgcacagcagccctgaggacggcggcggcggccgggaccggccggtgggcgggagccccggcgggccgcgcctggtgatcggctccttaccagctcacctctcgccgcacatgtttggaggatttaagtgccctgtatgctcaaaatttgtatcctcagatgaaatggatttgcatcttgtaatgtgtttaacaaagccacgaataacctataatgaggatgtactgagtaaagatgctggggaatgtgcaatatgccttgaagaattgcagcagggagatactatagcacgactgccttgtctatgcatatatcataaaggctgcatagatgaatggtttgaagtaaatagatcttgccctgagcacccttcagattaagcgtcagcttcctgttttataggttttcttgtcttgacaagatgcttgaaaaaccaagaggatatgaaaatctgtctctggagaaacaaagacgcaggcatactcagccagaaatctgagttttgtgagacttggtaatacagagatggacaatcgtactggggtaaaaaaaccctgctgaagagaggacagtgaccacagaactcagtgtaccaaacatgcatacaaaggacacacagggattttgaaaatgctgcacatcccttaatagtcatctacataggtaatactgataaacattttgtattcagacgccaaagttaactgatttaaaagttgatttactttttattaagttctccagagctgcacaactagttatgttttgatttgttttgttttttaatttggggtctctttgttttccccaacataatgttcataatgtttctgcattcatctgttcttaaattgaaaaacatataatttacttcttataaattgaagtcttaaatgtgaaaccaagaaatgtaatcaagcagtaaaaacatctgaatgtagaccatgatctcaagttcttccattttctcccccacgagtggaaaatagacttctacataggaaagctaaaatatgttaatatttttaaattaaaggtttaatatcagaatgcagtccaaagagcaaatcatattacataattacattttaattaaatatagaatattctactgaattgcaatttattaaatattcttatcctcttaaataaaactgctcaacagttaatcagcagtgaatcatcttgcagctatgcaatttaaaaaaaatacagattaccaatttcaagtgctgccagctaaaataactgttttaacgggtatcttttgtttgttcttttcacttaattattttattgtgctttgcatctccaggcagttctctcacatttgggtaaaatgtttagcaggctgtaaacttaagaaaagggtaaaataaaattttctggagaggaacttggaatttgagggagattttatatacctttaaaaactgtaatttaattgggatgccaggtttatagcaatttgcaactttaattttccagataatctggaggttagcatttgataaatgattttttaaagtagatatgaagattttgttaatttataatttattcatgtgttattactgtaattgaaaatgttatagacacttttaaattcagtttgtgtagaaagaaatgtgttaaacaaaattatgttaataaatattcccacataatacatctgaatggttaaaaatactggaagagttgtcagggctacaatagtgaatgtccttttttttaatatcaaaaatatcgataagtaggttttgtgttttcaacgtagggaaaatgttatcagtgaataggtggtgtactttacttggtataatttaaagttgcacagtaagtactgtttccttattttaatctttctttactcataatgtatttaagaatttgctgttttatttaacgctgctactcttaatcttctctaaatttttccccctactttcttgcttctgtttcacattttttaaaagggcaagtacaggagcaactgctgctacccagaaaaatgtgtgtattataaataattaaagagtttttaattgctttctgtatg

SEQ ID NO: 325231 - DNA, 3666 bp, Homo sapiens
cagagacctgtccatcaccgagtccacgagtggcagcacctaccacaccgcagtaccttggcgaggcggagcaggggcaggcaggtcgcggaagggggaggcggagcaaggccggcgggagccaatcggcctggcggcacgagggggcgggggcggggtcaacgcgcgcgacccaaacacacgggccgggcgcaccctgcagccgcgccgctccgcggccttccggcgcggggccggggaacctcctccccatctgcgcaccccccgccttcgcggcccagatcctcccgccagcccggcccctccttcgcagggggagcgaggcgacggttgccgggaagcgcgcgccacctctccctcccatttttcgttctcccctcgcgcgccacccgtttttcctctttctccgttaataacagctgggtggctgggggaggagggaaggtggccccggcggagtctgggcgggcgcctcccactcagccgccagccgccgtgggagccggaggatggcggcggtagcagcggccgcccgagaggaggcggtgccgagatcgggggcgccgagcgcggcagcagagagcggtagcggcccgtcgtggcgcaccagaaccgaaaccagcggcagccgcacggccacttgagccgccccttcctgctggagccagcgaggggtgcctgcagccgggaccccttcctctccgcgtctcctcgtctcccgcgcccgcgtcaggccgtcggcctcgcccgccgccccaagaagagcgcgccgggcgccgactgcccctctggacgccgggcggcggccctggacgtgcgggggcctctctgggccggccgcggcgcctgggccctgccctctagctcccgcgctcgctcccgccctcccggctctcggggcgcagcgcgcgggcccggcccggggcagggcggacatgggcgccaaacagagcggcccggccgccgctaacggccgcacgcgcgcgtactcgggctcggatctaccttccagtagcagcggaggcgccaatgggaccgcgggcggcggcgggggcgctcgggccgccgccgcggggaggttcccggctcaggtgcccagcgcgcaccagcccagcgcctccggcggcgccgcggcggccgcggcggccccggcagccccggcggccccgcgcagccgctccctcggcggggccgtggggagcgtggcgtcgggggcccgcgcggcgcagtcccccttcagcatcccgaacagcagcagcggcccgtacggctcgcaggactcggtgcacagcagccctgaggacggcggcggcggccgggaccggccggtgggcgggagccccggcgggccgcgcctggtgatcggctccttaccagctcacctctcgccgcacatgtttggaggatttaagtgccctgtatgctcaaaatttgtatcctcagatgaaatggatttgcatcttgtaatgtgtttaacaaagccacgaataacctataatgaggatgtactgagtaaagatgctggggaatgtgcaatatgccttgaagaattgcagcagggagatactatagcacgactgccttgtctatgcatatatcataaaggctgcatagatgaatggtttgaagtaaatagatcttgccctgagcacccttcagattaagcgtcagcttcctgttttataggttttcttgtcttgacaagatgcttgaaaaaccaagaggatatgaaaatctgtctctggagaaacaaagacgcaggcatactcagccagaaatctgagttttgtgagacttggtaatacagagatggacaatcgtactggggtaaaaaaaccctgctgaagagaggacagtgaccacagaactcagtgtaccaaacatgcatacaaaggacacacagggattttgaaaatgctgcacatcccttaatagtcatctacataggtaatactgataaacattttgtattcagacgccaaagttaactgatttaaaagttgatttactttttattaagttctccagagctgcacaactagttatgttttgatttgttttgttttttaatttggggtctctttgttttccccaacataatgttcataatgtttctgcattcatctgttcttaaattgaaaaacatataatttacttcttataaattgaagtcttaaatgtgaaaccaagaaatgtaatcaagcagtaaaaacatctgaatgtagaccatgatctcaagttcttccattttctcccccacgagtggaaaatagacttctacataggaaagctaaaatatgttaatatttttaaattaaaggtttaatatcagaatgcagtccaaagagcaaatcatattacataattacattttaattaaatatagaatattctactgaattgcaatttattaaatattcttatcctcttaaataaaactgctcaacagttaatcagcagtgaatcatcttgcagctatgcaatttaaaaaaaatacagattaccaatttcaagtgctgccagctaaaataactgttttaacgggtatcttttgtttgttcttttcacttaattattttattgtgctttgcatctccaggcagttctctcacatttgggtaaaatgtttagcaggctgtaaacttaagaaaagggtaaaataaaattttctggagaggaacttggaatttgagggagattttatatacctttaaaaactgtaatttaattgggatgccaggtttatagcaatttgcaactttaattttccagataatctggaggttagcatttgataaatgattttttaaagtagatatgaagattttgttaatttataatttattcatgtgttattactgtaattgaaaatgttatagacacttttaaattcagtttgtgtagaaagaaatgtgttaaacaaaattatgttaataaatattcccacataatacatctgaatggttaaaaatactggaagagttgtcagggctacaatagtgaatgtccttttttttaatatcaaaaatatcgataagtaggttttgtgttttcaacgtagggaaaatgttatcagtgaataggtggtgtactttacttggtataatttaaagttgcacagtaagtactgtttccttattttaatctttctttactcataatgtatttaagaatttgctgttttatttaacgctgctactcttaatcttctctaaatttttccccctactttcttgcttctgtttcacattttttaaaagggcaagtacaggagcaactgctgctacccagaaaaatgtgtgtattataaataattaaagagtttttaattgctttctgtatgattccagctcagataacattttccctgaagttatgctgtgaaatgccttttgttatgctgcaattgctaaaggaatccaaaacctccattgtgacagctgaaggcacagtttaataggtgcttttttactagttatgaaaaatattcgtcccttaaggaaacgattctttttctgtttttttctgttaccatgaagtcttaatttgatttcattttatttcacatttttgattttgtaagctttcataccctcctgctcaaccccctcaagtaaaacctcttagaatgtgaataattggttcattttctattgctggtatact

SEQ ID NO: 325232 - DNA, 2063 bp, Homo sapiens
cagagacctgtccatcaccgagtccacgagtggcagcacctaccacaccgcagtaccttggcgaggcggagcaggggcaggcaggtcgcggaagggggaggcggagcaaggccggcgggagccaatcggcctggcggcacgagggggcgggggcggggtcaacgcgcgcgacccaaacacacgggccgggcgcaccctgcagccgcgccgctccgcggccttccggcgcggggccggggaacctcctccccatctgcgcaccccccgccttcgcggcccagatcctcccgccagcccggcccctccttcgcagggggagcgaggcgacggttgccgggaagcgcgcgccacctctccctcccatttttcgttctcccctcgcgcgccacccgtttttcctctttctccgttaataacagctgggtggctgggggaggagggaaggtggccccggcggagtctgggcgggcgcctcccactcagccgccagccgccgtgggagccggaggatggcggcggtagcagcggccgcccgagaggaggcggtgccgagatcgggggcgccgagcgcggcagcagagagcggtagcggcccgtcgtggcgcaccagaaccgaaaccagcggcagccgcacggccacttgagccgccccttcctgctggagccagcgaggggtgcctgcagccgggaccccttcctctccgcgtctcctcgtctcccgcgcccgcgtcaggccgtcggcctcgcccgccgccccaagaagagcgcgccgggcgccgactgcccctctggacgccgggcggcggccctggacgtgcgggggcctctctgggccggccgcggcgcctgggccctgccctctagctcccgcgctcgctcccgccctcccggctctcggggcgcagcgcgcgggcccggcccggggcagggcggacatgggcgccaaacagagcggcccggccgccgctaacggccgcacgcgcgcgtactcgggctcggatctaccttccagtagcagcggaggcgccaatgggaccgcgggcggcggcgggggcgctcgggccgccgccgcggggaggttcccggctcaggtgcccagcgcgcaccagcccagcgcctccggcggcgccgcggcggccgcggcggccccggcagccccggcggccccgcgcagccgctccctcggcggggccgtggggagcgtggcgtcgggggcccgcgcggcgcagtcccccttcagcatcccgaacagcagcagcggcccgtacggctcgcaggactcggtgcacagcagccctgaggacggcggcggcggccgggaccggccggtgggcgggagccccggcgggccgcgcctggtgatcggctccttaccagctcacctctcgccgcacatgtttggaggatttaagtgccctgtatgctcaaaatttgtatcctcagatgaaatggatttgcatcttgtaatgtgtttaacaaagccacgaataacctataatgaggatgtactgagtaaagatgctggggaatgtgcaatatgccttgaagaattgcagcagggagatactatagcacgactgccttgtctatgcatatatcataaagggtaagttcaccaagttggtattagagtaaaagattgttctcacagtttcagacattgtaattagggctgaaaaggaatcttcgttgaaaccaccccctccctgtctcacacacacttcttaaaacttaatgatcttttttctctatttgaactaagacttgaacccacatctgtttgtatccaaaaggctactatttttaaagcatttgctatgacccagctgttgtccatagcttcttgaataaattatctcatgtaagccttgtaaccattgcattttacaattgagaaaataagctaagggacagtatggaattgccccaaggttacaaggctagtaaatggcagagttgagattccagtagatttggaatctgcttgactccaaaacctgtctgctttctcatatggtcttcttgcttttagagtgatacaggaaaaatttggggttaaaaaa

SEQ ID NO: 325233 - DNA, 485 bp, Homo sapiens
gcggccgcggcggccccggcagccccggcggccccgcgcagccgctccctcggcggggccgtggggagcgtggcgtcgggggcccgcgcggcgcagtcccccttcagcatcccgaacagcagcagcggcccgtacggctcgcaggactcggtgcacagcagccctgaggacggcggcggcggccgggaccggccggtgggcgggagccccggcgggccgcgcctggtgatcggctccttaccagctcacctctcgccgcacatgtttggaggtacggacccctctccgcgcacccgcgctcggtcctcccgcggctgcacgtgggccgtggccgccggctatttttacccttctccttttctccttctgccggggcgccgggggctgcctcccggaccagcccgcgtcggtctccatcctggaagaaacccggcgcttaacaccggcggtgccgctaccgcatagacgcgtggttttgtttttaa

SEQ ID NO: 325234 - DNA, 419 bp, Homo sapiens
ataaagacgcagagcctcagagaagttaaacgattgatcctatgtcagggggtagagtcaagactcatacctatgccttttaacttcaagattggacgactgattattggacagaatggcatcttgtcgacacctgcggtctcctgcattatcaggaagatcaaggcagctggtggaatcattctaacagccagccactgccctggaggaccagggggagagtttggagtgaagtttaatgttgccaatggagttctaaatggtgcactggatgttgaaaaagttgatgatgagcaagaacaaaattcctcctttcaggagacttacagttcaatatgggaaatgtaatttgttaaaatataaaagtgcaattgtgttacatgctgtacgaagtacatgttgacatgtgagtatataat

SEQ ID NO: 325235 - DNA, 182 bp, Homo sapiens
gcctccactttctcacttccctttccttctttaaccagctccaggcaggcgtttgtccccaccacgttatctactgaaattgctcttttcaaggtctccaggagcctctatcctgctggttatgattggttagttcttcgtcctcgtttgaccagtgggtaactcccattttttttgttttt

SEQ ID NO: 325236 - DNA, 196 bp, Homo sapiens
gggaaggagtattcctggagaggggaagagcaaatggaaaagcacgaagcaactctgacatatggaagttcttgagatcgacaatggctgactacaggagctatctggaaatgccacaaagcaattttttcccctagaaatacatgtgcacagaaagaaccatccagcttggcgtcaaggtttactatgctttcca

SEQ ID NO: 325237 - DNA, 609 bp, Homo sapiens
attcgcggccgcgtcgacggaatgctcatctcaagatctatccagttttatttatgttttgtatgttagatattttatcaataaattctagcttcacaactaagttagaaggccctttcacacctttttatgtacatagtgcccttctgtgacgtggaggttgaatagcaatgatggattccaggcatttgtgtggtggttactaggtattggggcattgacttttgctcttctgatgtcagcaaggatggggatattccaagagactctctacaaacgatttgggaaacactccaaggaggctttgttttataatcacgcccttccacttccgggtttcgtcttcttggcttctgatatttatgaccatgcagttctattcaataagtctggtgagtttggggttagacagtagaattacctgacagtttctgaggcagagtctcagttttactcttgacttgacctcggcctttttcataatcctattcaaatcatgtgttcctttcgaaaatgtctccattccactttccagtcatcgcagcagcaaaagcttttacaggggtttctcaattatttacaaatgaagtaaaagaatatcttcgaaaa

SEQ ID NO: 325238 - DNA, 2677 bp, Homo sapiens
agcggctctatggcggagctgcctggcggaagcgggaacgtcgcatcctgaggtaaaggtgcacggcatcctgggacatgtagtctggccggggctcggacgccccctcggatgaatgggaccgaagctgactgcgaactacagcttcttggcagcgtcggtgttggccgcgggagaaggggagaccgcggcggcccccagtgagagcggctttccaggacggtgcgatgtgctgcgcagcgaagaggcaggaggccggcttcctggggtagcggtacaggcgggcgcttactctgtgcgcttgcttccccaaccctgcaccggccatgcgcccggccttggcggtgggcctggtgttcgcaggctgctgcagtaacgtgatcttcctagagctcctggcccggaagcatccaggatgtgggaacattgtgacatttgcacaatttttatttattgctgtggaaggcttcctctttgaagctgatttgggaaggaagccaccagctatcccaataaggtactatgccataatggtgaccatgttcttcaccgtgagcgtggtgaacaactatgccctgaatctcaacattgccatgcccctgcatatgatatttagatccggttctctaattgccaacatgattctaggaattatcattttgaagaaaagatacagtatattcaaatatacctccattgccctggtgtctgtggggatatttatttgcacttttatgtcagcaaagcaggtgacttcccagtccagcttgagtgagaatgatggattccaggcatttgtgtggtggttactaggtattggggcattgacttttgctcttctgatgtcagcaaggatggggatattccaagagactctctacaaacgatttgggaaacactccaaggaggctttgttttataatcacgcccttccacttccgggtttcgtcttcttggcttctgatatttatgaccatgcagttctattcaataagtctgagttatatgaaattcccgtcatcggagtgaccctgcccatcatgtggttctacctcctcatgaacatcatcactcagtacgtgtgcatccggggtgtgtttatcctcaccacagaatgcgcctccctcaccgtcacgctcgtcgtgaccctacgcaaatttgtgagcctcatcttttccatcttgtacttccagaaccccttcaccctgtggcactggctgggcaccttgtttgtcttcattgggaccttaatgtacacagaggtgtggaacaacctagggaccacaaaaagtgagcctcagaaggacagcaagaagaactgaggcctgtctggagtacgtagaccagtgtcgtcgtgagggtgggaccctgtgaaggtctgaccaccgtttcgcttttgttaatgccgagctacccgcagtgctgagccagccgtgcaaaaggaaatcttcaggaggggacttctcacgttgctcagactgacacatgtagactaaatagaaacccctcagccctaaaatagaaaaaagaacagttctggactattgaacagcccattcatttatttctgttttgtttaccgacatattcagtattattcttgttttctgaattctgagtctcctgaacaaaaggcttactatccatggtcttggaaaagattgtcccttctcttgctgttgtaatgcatctctgctacagcagtcattgtcatcctgtgaccttatcccttttgtctcccatcaccttttccttcttcagcagcacctcacagtcagtcagacgctgcaggcaccactatcaccaggagtggccaagtaaaccgagacaccagtaacagcagggctggacttcctccagcgttttgggaaggaaagagatgttcccctgagctgattcccagtgacagtgcagcaagactagtgggactcctctttcccacattttgcttttttttttttctatgcaaaagtcagatgcttctatccattgctttctgtgattagggcggccctgcagcatatctcacagcagacacagtgttcataacaaagaaaggttgtgccgggcacggtggctcacacctgtaatcccagccctttgggaggctgaggtgggtgtatcacttgaggtcaggagttcaagaccaatctggccaacatggtgaaaccccatctctactaaaaatacgaaaattagctgggtgtgatggcgcatgcctgtaatcccagctacttgggaggctgaggcaggagaatcacttgaacccgggagatgaaggttgcagtgagctgaggtcgtgctactgcactcccgcctgggtgacagagtgagactctatctcaaaaaaaaaaaaaagtggtgacggcaggatggccctgctcagcaccgcaagagccatggctgtccctgttggcccagccgggcactcacggggcagaagggtgggtctcaagtgggaggataaggcttcaccaccaggagattcccctctgcccgatgactctgataagagtcacgacccatcaagggaatgcatagatggagatatatagtgtgtgatgtgtaaatcaggtcaaacctcaacgacaattgaaagttgttattgtcctatgaggtatcttagcattctcgatgggtattgaggatggttggatgtgctttattgtgtgtggaa

SEQ ID NO: 325239 - DNA, 3544 bp, Homo sapiens
agcggctctatggcggagctgcctggcggaagcgggaacgtcgcatcctgaggtaaaggtgcacggcatcctgggacatgtagtctggccggggctcggacgccccctcggatgaatgggaccgaagctgactgcgaactacagcttcttggcagcgtcggtgttggccgcgggagaaggggagaccgcggcggcccccagtgagagcggctttccaggacggtgcgatgtgctgcgcagcgaagaggcaggaggccggcttcctggggtagcggtacaggcgggcgcttactctgtgcgcttgcttccccaaccctgcaccggccatgcgcccggccttggcggtgggcctggtgttcgcaggctgctgcagtaacgtgatcttcctagagctcctggcccggaagcatccaggatgtgggaacattgtgacatttgcacaatttttatttattgctgtggaaggcttcctctttgaagctgatttgggaaggaagccaccagctatcccaataaggtactatgccataatggtgaccatgttcttcaccgtgagcgtggtgaacaactatgccctgaatctcaacattgccatgcccctgcatatgatatttagatccggttctctaattgccaacatgattctaggaattatcattttgaagaaaagatacagtatattcaaatatacctccattgccctggtgtctgtggggatatttatttgcacttttatgtcagcaaagcaggtgacttcccagtccagcttgagtgagaatgatggattccaggcatttgtgtggtggttactaggtattggggcattgacttttgctcttctgatgtcagcaaggatggggatattccaagagactctctacaaacgatttgggaaacactccaaggaggctttgttttataatcacgcccttccacttccgggtttcgtcttcttggcttctgatatttatgaccatgcagttctattcaataagtctgagttatatgaaattcccgtcatcggagtgaccctgcccatcatgtggttctacctcctcatgaacatcatcactcaatcagactcctacttaactggaagagaaatgtctattaaatgtctctcctctttctctgggtcaagaccatgtaattttatgcttcagagatgaagatactgtttgtttacaaagagtttagtttttaagacatccaaaactctatgctagagcaaaaatcaaatagcaaaggacactagccagaaaatacagtgtgtgtgtgtgcacctgtgtgcctgctgaacaacttgacagtgtaacagataaggtaactgaagatggtggatatttgaattgtattagcttaatgtctacatatctttggccaaaactctattgtcatattagaaacatgttatctttttcatgtttattagtaatttatttttgattctttgttttctttttcgtccaactaaaacaactgtaatgtacttgatacatttatatcaagttctaaagtatttagacaaatccaaatactttgtttttagttttttcctcctttccatcctgttaaccacagtgaaacgctgcagtattttgatttggtcagtgctacggaggaagaccatgaaagctgaattggtctgtgccacccagagtaaacctcttctcttcttctggaaagatggcgtgatgtttttcaaggattctaataaatatcccgcagtcatctcctgagcagctttcctctgtttcacttcggaactccttcccccactttcttcactccagtttcttcacttgcagcgttttctgctaagaaagacttatcatcttgtatctgtttatgcctctcttctttggggcccctggatgtttttgtggatttttacagagtatttatatctgcacagcgtgtattttgttatacattcttacaagcattgatattggggggtacatttataatagtgagaatatctggcagaatgtgtgaatgccatatctgtagatgacgatgaatgtgaagggttaatgtagaaatgtttgtttattctgttacagctcaaaatggaggctgagaatctctaccaccattcccttctctatttgagaatctctaccaccattcccttctctatttgggaaacaatactctcttattttgctatttttaccttcccattaactggcttcactcaacagtgccagatacctatggagaggggaagtaaaacaccttaggtcaggaataataaaccaatgagttagctcagggccggtggacatgttcactggtggaccagttggcattgacctaaacggacagagaaatgcacatggaggagaactacgttgaaatcaagatcctatgtctgttgtattttctctttgcctggagtaaatagcattataagtcattccacccttattagataaccaaagcatattggtctcaatagctttctcctgaaaaatgtgattgaatcttacctgtagcagttcactcttaaggttgaaagaactgtcaatatagataaaatccattccttattattattgattggtgtgacatttgaaaatgtgtctaaacaatatttgtaagtaaaagaaccagtcataagcctcaaatgtgttcagtgtgtaccaagctggaatgggagactggcccctcttggctttaaagtagcatgttgtctttttctagcagcttcttcctagtagacattccagggatgggaggggccagggatcatgtcttactcatttctgtatcgccagcccctggcatagtgtctggcttatgttatgtgaataaatgaatgcttgccaagatctcttcttccctcaagtttctggaaaacctgagggttcgtgatacctgttcccactcctcatcagcgggttggcaagaaagcaaataaggggaaacatttttaacattccaagcaagagaaggaagaacgactattgggaggaggtacaccagagattgctcagtgtgcagcctgctacctcacttttggctctggattgcctggtggtagaagggaagagtattatgtagttagcaccttacatatttgatgctcaggaagaaagtgcaagaagatccctaatagaacattaaagattcttaaaagtttttgaagtaggctgcttggggtgaccagccccacccttacatctccatagttggtacagttagcttgtagcagctgaagctgatgcctggagatcactgtctgttggtctgatctcagtatcatactgagacacctcccctgagccttacctacttaaattggtaaccgtcctaccaaaatttgtcaattttaatcaagtgaggcaagttgcaagggagccagagatacgtgaaaaaagaaaagcagaaatactgatactttctaagaaagaagttgtaataatttctttggcacattgacttactgatatcttttgaaatgcatagatgactcttgtgaaccaaagagagcagtagtggttattccccggcgcaataaaaatgcctttgtgtatca

SEQ ID NO: 325240 - DNA, 3427 bp, Homo sapiens
cacacattgtgttcttaaactgagacgtggctctgcaggtctcctgggctcattccatggtgtggtatgtttattccactgtccagagctattctctgatggatttgagcaacagcagtggagataaatgtcctagagtcaccaggtcgcttggagaagtcatttaagctgcctcgggtttttgttacttaaaatgtggatattatttctccacctaaatcactgagtttacagagtaataatgtgttgctctggacattgacagctttctagagccagtaatgggctcttctgaaggatgctgaattagaagtgaacctattcataggatcaaaagccacttgctttgaaatatgtagagttcctcagaattgacggtgctagaaatatccaagtgttaaataaccttttaaaagcaacaaaagctacttttttcttaccacttaatagaagaacctgtccctagaggcgacttcattgctatggatctggagtctctgaactcttaataggatgcagcctcacatacataatgtcacccattttatgttgatgaaaacattacaagttttcatcattgggtatgtgttgatgttcacagacagtacttgggcccattaggttttcgcgtctggtcttagagcatgtgtattcatctcagcgtgaatacctcagccagtcttatgaataggaggctatgtatgggcagggaatagattagattagaacactcgcacaagatgaccacatatagaagcagaaagccccaaattccctgggaactgttttttctctagtagctgaatataaggaaatatgtctaatggacaccagttaatactttttaaaactactctttaaaaaaaaaatacgttccccttggttaactgattttttaatccagggtggacattttttcaacctttattaaaaagacaaataaactattttgtagaagatcagactcctacttaactggaagagaaatgtctattaaatgtctctcctctttctctgggtcaagaccatgtaattttatgcttcagagatgaagatactgtttgtttacaaagagtttagtttttaagacatccaaaactctatgctagagcaaaaatcaaatagcaaaggacactagccagaaaatacagtgtgtgtgtgtgcacctgtgtgcctgctgaacaacttgacagtgtaacagataaggtaactgaagatggtggatatttgaattgtattagcttaatgtctacatatctttggccaaaactctattgtcatattagaaacatgttatctttttcatgtttattagtaatttatttttgattctttgttttctttttcgtccaactaaaacaactgtaatgtacttgatacatttatatcaagttctaaagtatttagacaaatccaaatactttgtttttagttttttcctcctttccatcctgttaaccacagtgaaacgctgcagtattttgatttggtcagtgctacggaggaagaccatgaaagctgaattggtctgtgccacccagagtaaacctcttctcttcttctggaaagatggcgtgatgtttttcaaggattctaataaatatcccgcagtcatctcctgagcagctttcctctgtttcacttcggaactccttcccccactttcttcactccagtttcttcacttgcagcgttttctgctaagaaagacttatcatcttgtatctgtttatgcctctcttctttggggcccctggatgtttttgtggatttttacagagtatttatatctgcacagcgtgtattttgttatacattcttacaagcattgatattggggggtacatttataatagtgagaatatctggcagaatgtgtgaatgccatatctgtagatgacgatgaatgtgaagggttaatgtagaaatgtttgtttattctgttacagctcaaaatggaggctgagaatctctaccaccattcccttctctatttgagaatctctaccaccattcccttctctatttgggaaacaatactctcttattttgctatttttaccttcccattaactggcttcactcaacagtgccagatacctatggagaggggaagtaaaacaccttaggtcaggaataataaaccaatgagttagctcagggccggtggacatgttcactggtggaccagttggcattgacctaaacggacagagaaatgcacatggaggagaactacgttgaaatcaagatcctatgtctgttgtattttctctttgcctggagtaaatagcattataagtcattccacccttattagataaccaaagcatattggtctcaatagctttctcctgaaaaatgtgattgaatcttacctgtagcagttcactcttaaggttgaaagaactgtcaatatagataaaatccattccttattattattgattggtgtgacatttgaaaatgtgtctaaacaatatttgtaagtaaaagaaccagtcataagcctcaaatgtgttcagtgtgtaccaagctggaatgggagactggcccctcttggctttaaagtagcatgttgtctttttctagcagcttcttcctagtagacattccagggatgggaggggccagggatcatgtcttactcatttctgtatcgccagcccctggcatagtgtctggcttatgttatgtgaataaatgaatgcttgccaagatctcttcttccctcaagtttctggaaaacctgagggttcgtgatacctgttcccactcctcatcagcgggttggcaagaaagcaaataaggggaaacatttttaacattccaagcaagagaaggaagaacgactattgggaggaggtacaccagagattgctcagtgtgcagcctgctacctcacttttggctctggattgcctggtggtagaagggaagagtattatgtagttagcaccttacatatttgatgctcaggaagaaagtgcaagaagatccctaatagaacattaaagattcttaaaagtttttgaagtaggctgcttggggtgaccagccccacccttacatctccatagttggtacagttagcttgtagcagctgaagctgatgcctggagatcactgtctgttggtctgatctcagtatcatactgagacacctcccctgagccttacctacttaaattggtaaccgtcctaccaaaatttgtcaattttaatcaagtgaggcaagttgcaagggagccagagatacgtgaaaaaagaaaagcagaaatactgatactttctaagaaagaagttgtaataatttctttggcacattgacttactgatatcttttgaaatgcatagatgactcttgtgaaccaaagagagcagtagtggttattccccggcgcaataaaaatgcctttgtgtatca

SEQ ID NO: 325241 - DNA, 3706 bp, Homo sapiens
agcggctctatggcggagctgcctggcggaagcgggaacgtcgcatcctgaggtaaaggtgcacggcatcctgggacatgtagtctggccggggctcggacgccccctcggatgaatgggaccgcagagcgtggacgtgcccggagacctaccaggcctctcgttggcggcagccgctcggggtgctgcggcgcgcgagtgatgaagggggtagaaccgccgagcgtggcccgctgtgagagcgagctttctgagcgacggtgcagcatgtgctgcgcatgcggacagcagggcacgtgagggccgggcattcactaggcgggctaggtcggtgcagcacgtgcggtgccgcttgacctcgtgttcggctgcgtttgcttgtctcgcctgttccccttggcgtcccggctcactgtcgccccagttcccttgtgttgccgagtcgcgcgtctagggtggtttactgccacgcggctgttctgtccactgagaacggctgaatcattacactgaagagcgtctctggggccccgggagacgacgatccaaggtatgtcggtagacagttgatggacgcttgtctggcaacaaacttttatatttaattgcttgtgcgaaggcttccctctttgaaagctgactttgggaacggcaagccaccaagctatccccaataaaggtactatgccataatggtgaccatgttcttcaccgtgagcgtggtgaacaactatgccctgaatctcaacattgccatgcccctgcatatgatatttagatccggttctctaattgccaacatgattctaggaattatcattttgaagaaaagatacagtatattcaaatatacctccattgccctggtgtctgtggggatatttatttgcacttttatgtcagcaaagcaggtgacttcccagtccagcttgagtgagaatgatggattccaggcatttgtgtggtggttactaggtattggggcattgacttttgctcttctgatgtcagcaaggatggggatattccaagagactctctacaaacgatttgggaaacactccaaggaggctttgttttataatcacgcccttccacttccgggtttcgtcttcttggcttctgatatttatgaccatgcagttctattcaataagtctgagttatatgaaattcccgtcatcggagtgaccctgcccatcatgtggttctacctcctcatgaacatcatcactcaatcagactcctacttaactggaagagaaatgtctattaaatgtctctcctctttctctgggtcaagaccatgtaattttatgcttcagagatgaagatactgtttgtttacaaagagtttagtttttaagacatccaaaactctatgctagagcaaaaatcaaatagcaaaggacactagccagaaaatacagtgtgtgtgtgtgcacctgtgtgcctgctgaacaacttgacagtgtaacagataaggtaactgaagatggtggatatttgaattgtattagcttaatgtctacatatctttggccaaaactctattgtcatattagaaacatgttatctttttcatgtttattagtaatttatttttgattctttgttttctttttcgtccaactaaaacaactgtaatgtacttgatacatttatatcaagttctaaagtatttagacaaatccaaatactttgtttttagttttttcctcctttccatcctgttaaccacagtgaaacgctgcagtattttgatttggtcagtgctacggaggaagaccatgaaagctgaattggtctgtgccacccagagtaaacctcttctcttcttctggaaagatggcgtgatgtttttcaaggattctaataaatatcccgcagtcatctcctgagcagctttcctctgtttcacttcggaactccttcccccactttcttcactccagtttcttcacttgcagcgttttctgctaagaaagacttatcatcttgtatctgtttatgcctctcttctttggggcccctggatgtttttgtggatttttacagagtatttatatctgcacagcgtgtattttgttatacattcttacaagcattgatattggggggtacatttataatagtgagaatatctggcagaatgtgtgaatgccatatctgtagatgacgatgaatgtgaagggttaatgtagaaatgtttgtttattctgttacagctcaaaatggaggctgagaatctctaccaccattcccttctctatttgagaatctctaccaccattcccttctctatttgggaaacaatactctcttattttgctatttttaccttcccattaactggcttcactcaacagtgccagatacctatggagaggggaagtaaaacaccttaggtcaggaataataaaccaatgagttagctcagggccggtggacatgttcactggtggaccagttggcattgacctaaacggacagagaaatgcacatggaggagaactacgttgaaatcaagatcctatgtctgttgtattttctctttgcctggagtaaatagcattataagtcattccacccttattagataaccaaagcatattggtctcaatagctttctcctgaaaaatgtgattgaatcttacctgtagcagttcactcttaaggttgaaagaactgtcaatatagataaaatccattccttattattattgattggtgtgacatttgaaaatgtgtctaaacaatatttgtaagtaaaagaaccagtcataagcctcaaatgtgttcagtgtgtaccaagctggaatgggagactggcccctcttggctttaaagtagcatgttgtctttttctagcagcttcttcctagtagacattccagggatgggaggggccagggatcatgtcttactcatttctgtatcgccagcccctggcatagtgtctggcttatgttatgtgaataaatgaatgcttgccaagatctcttcttccctcaagtttctggaaaacctgagggttcgtgatacctgttcccactcctcatcagcgggttggcaagaaagcaaataaggggaaacatttttaacattccaagcaagagaaggaagaacgactattgggaggaggtacaccagagattgctcagtgtgcagcctgctacctcacttttggctctggattgcctggtggtagaagggaagagtattatgtagttagcaccttacatatttgatgctcaggaagaaagtgcaagaagatccctaatagaacattaaagattcttaaaagtttttgaagtaggctgcttggggtgaccagccccacccttacatctccatagttggtacagttagcttgtagcagctgaagctgatgcctggagatcactgtctgttggtctgatctcagtatcatactgagacacctcccctgagccttacctacttaaattggtaaccgtcctaccaaaatttgtcaattttaatcaagtgaggcaagttgcaagggagccagagatacgtgaaaaaagaaaagcagaaatactgatactttctaagaaagaagttgtaataatttctttggcacattgacttactgatatcttttgaaatgcatagatgactcttgtgaaccaaagagagcagtagtggttattccccggcgcaataaaaatgcctttgtgtatca

SEQ ID NO: 325242 - DNA, 2937 bp, Homo sapiens
attcgcggccgcgtcgacggaatgctcatctcaagatctatccagttttatttatgttttgtatgttagatattttatcaataaattctagcttcacaactaagttagaaggccctttcacacctttttatgtacatagtgcccttctgtgacgtggaggttgaatagcaatgatggattccaggcatttgtgtggtggttactaggtattggggcattgacttttgctcttctgatgtcagcaaggatggggatattccaagagactctctacaaacgatttgggaaacactccaaggaggctttgttttataatcacgcccttccacttccgggtttcgtcttcttggcttctgatatttatgaccatgcagttctattcaataagtctgagttatatgaaattcccgtcatcggagtgaccctgcccatcatgtggttctacctcctcatgaacatcatcactcaatcagactcctacttaactggaagagaaatgtctattaaatgtctctcctctttctctgggtcaagaccatgtaattttatgcttcagagatgaagatactgtttgtttacaaagagtttagtttttaagacatccaaaactctatgctagagcaaaaatcaaatagcaaaggacactagccagaaaatacagtgtgtgtgtgtgcacctgtgtgcctgctgaacaacttgacagtgtaacagataaggtaactgaagatggtggatatttgaattgtattagcttaatgtctacatatctttggccaaaactctattgtcatattagaaacatgttatctttttcatgtttattagtaatttatttttgattctttgttttctttttcgtccaactaaaacaactgtaatgtacttgatacatttatatcaagttctaaagtatttagacaaatccaaatactttgtttttagttttttcctcctttccatcctgttaaccacagtgaaacgctgcagtattttgatttggtcagtgctacggaggaagaccatgaaagctgaattggtctgtgccacccagagtaaacctcttctcttcttctggaaagatggcgtgatgtttttcaaggattctaataaatatcccgcagtcatctcctgagcagctttcctctgtttcacttcggaactccttcccccactttcttcactccagtttcttcacttgcagcgttttctgctaagaaagacttatcatcttgtatctgtttatgcctctcttctttggggcccctggatgtttttgtggatttttacagagtatttatatctgcacagcgtgtattttgttatacattcttacaagcattgatattggggggtacatttataatagtgagaatatctggcagaatgtgtgaatgccatatctgtagatgacgatgaatgtgaagggttaatgtagaaatgtttgtttattctgttacagctcaaaatggaggctgagaatctctaccaccattcccttctctatttgagaatctctaccaccattcccttctctatttgggaaacaatactctcttattttgctatttttaccttcccattaactggcttcactcaacagtgccagatacctatggagaggggaagtaaaacaccttaggtcaggaataataaaccaatgagttagctcagggccggtggacatgttcactggtggaccagttggcattgacctaaacggacagagaaatgcacatggaggagaactacgttgaaatcaagatcctatgtctgttgtattttctctttgcctggagtaaatagcattataagtcattccacccttattagataaccaaagcatattggtctcaatagctttctcctgaaaaatgtgattgaatcttacctgtagcagttcactcttaaggttgaaagaactgtcaatatagataaaatccattccttattattattgattggtgtgacatttgaaaatgtgtctaaacaatatttgtaagtaaaagaaccagtcataagcctcaaatgtgttcagtgtgtaccaagctggaatgggagactggcccctcttggctttaaagtagcatgttgtctttttctagcagcttcttcctagtagacattccagggatgggaggggccagggatcatgtcttactcatttctgtatcgccagcccctggcatagtgtctggcttatgttatgtgaataaatgaatgcttgccaagatctcttcttccctcaagtttctggaaaacctgagggttcgtgatacctgttcccactcctcatcagcgggttggcaagaaagcaaataaggggaaacatttttaacattccaagcaagagaaggaagaacgactattgggaggaggtacaccagagattgctcagtgtgcagcctgctacctcacttttggctctggattgcctggtggtagaagggaagagtattatgtagttagcaccttacatatttgatgctcaggaagaaagtgcaagaagatccctaatagaacattaaagattcttaaaagtttttgaagtaggctgcttggggtgaccagccccacccttacatctccatagttggtacagttagcttgtagcagctgaagctgatgcctggagatcactgtctgttggtctgatctcagtatcatactgagacacctcccctgagccttacctacttaaattggtaaccgtcctaccaaaatttgtcaattttaatcaagtgaggcaagttgcaagggagccagagatacgtgaaaaaagaaaagcagaaatactgatactttctaagaaagaagttgtaataatttctttggcacattgacttactgatatcttttgaaatgcatagatgactcttgtgaaccaaagagagcagtagtggttattccccggcgcaataaaaatgcctttgtgtatca

SEQ ID NO: 325243 - DNA, 2483 bp, Homo sapiens
agcggctctatggcggagctgcctggcggaagcgggaacgtcgcatcctgaggtaaaggtgcacggcatcctgggacatgtagtctggccggggctcggacgccccctcggatgaatgggaccgaagctgactgcgaactacagcttcttggcagcgtcggtgttggccgcgggagaaggggagaccgcggcggcccccagtgagagcggctttccaggacggtgcgatgtgctgcgcagcgaagaggcaggaggccggcttcctggggtagcggtacaggcgggcgcttactctgtgcgcttgcttccccaaccctgcaccggccatgcgcccggccttggcggtgggcctggtgttcgcaggctgctgcagtaacgtgatcttcctagagctcctggcccggaagcatccaggatgtgggaacattgtgacatttgcacaatttttatttattgctgtggaaggcttcctctttgaagctgatttgggaaggaagccaccagctatcccaataaggtactatgccataatggtgaccatgttcttcaccgtgagcgtggtgaacaactatgccctgaatctcaacattgccatgcccctgcatatgatatttagatccggttctctaattgccaacatgattctaggaattatcattttgaagaaaagatacagtatattcaaatatacctccattgccctggtgtctgtggggatatttatttgcacttttatgtcagcaaagcaggtgacttcccagtccagcttgagtgagaatgatggattccaggcatttgtgtggtggttactaggtattggggcattgacttttgctcttctgatgtcagcaaggatggggatattccaagagactctctacaaacgatttgggaaacactccaaggaggctttgttttataatcacgcccttccacttccgggtttcgtcttcttggcttctgatatttatgaccatgcagttctattcaataagtctgaaccccttcaccctgtggcactggctgggcaccttgtttgtcttcattgggaccttaatgtacacagaggtgtggaacaacctagggaccacaaaaagtgagcctcagaaggacagcaagaagaactgaggcctgtctggagtacgtagaccagtgtcgtcgtgagggtgggaccctgtgaaggtctgaccaccgtttcgcttttgttaatgccgagctacccgcagtgctgagccagccgtgcaaaaggaaatcttcaggaggggacttctcacgttgctcagactgacacatgtagactaaatagaaacccctcagccctaaaatagaaaaaagaacagttctggactattgaacagcccattcatttatttctgttttgtttaccgacatattcagtattattcttgttttctgaattctgagtctcctgaacaaaaggcttactatccatggtcttggaaaagattgtcccttctcttgctgttgtaatgcatctctgctacagcagtcattgtcatcctgtgaccttatcccttttgtctcccatcaccttttccttcttcagcagcacctcacagtcagtcagacgctgcaggcaccactatcaccaggagtggccaagtaaaccgagacaccagtaacagcagggctggacttcctccagcgttttgggaaggaaagagatgttcccctgagctgattcccagtgacagtgcagcaagactagtgggactcctctttcccacattttgcttttttttttttctatgcaaaagtcagatgcttctatccattgctttctgtgattagggcggccctgcagcatatctcacagcagacacagtgttcataacaaagaaaggttgtgccgggcacggtggctcacacctgtaatcccagccctttgggaggctgaggtgggtgtatcacttgaggtcaggagttcaagaccaatctggccaacatggtgaaaccccatctctactaaaaatacgaaaattagctgggtgtgatggcgcatgcctgtaatcccagctacttgggaggctgaggcaggagaatcacttgaacccgggagatgaaggttgcagtgagctgaggtcgtgctactgcactcccgcctgggtgacagagtgagactctatctcaaaaaaaaaaaaaagtggtgacggcaggatggccctgctcagcaccgcaagagccatggctgtccctgttggcccagccgggcactcacggggcagaagggtgggtctcaagtgggaggataaggcttcaccaccaggagattcccctctgcccgatgactctgataagagtcacgacccatcaagggaatgcatagatggagatatatagtgtgtgatgtgtaaatcaggtcaaacctcaacgacaattgaaagttgttattgtcctatgaggtatcttagcattctcgatgggtattgaggatggttggatgtgctttattgtgtgtggaa

SEQ ID NO: 325244 - DNA, 2101 bp, Homo sapiens
agcggctctatggcggagctgcctggcggaagcgggaacgtcgcatcctgaggtaaaggtgcacggcatcctgggacatgtagtctggccggggctcggacgccccctcggatgaatgggaccgaagctgactgcgaactacagcttcttggcagcgtcggtgttggccgcgggagaaggggagaccgcggcggcccccagtgagagcggctttccaggacggtgcgatgtgctgcgcagcgaagaggcaggaggccggcttcctggggtagcggtacaggcgggcgcttactctgtgcgcttgcttccccaaccctgcaccggccatgcgcccggccttggcggtgggcctggtgttcgcaggctgctgcagtaacgtgatcttcctagagctcctggcccggaagcatccaggatgtgggaacattgtgacatttgcacaatttttatttattgctgtggaaggcttcctctttgaagctgatttgggaaggaagccaccagctatcccaataaggtactatgccataatggtgaccatgttcttcaccgtgagcgtggtgaacaactatgccctgaatctcaacattgccatgcccctgcatatgatatttagatccggttctctaattgccaacatgattctaggaattatcattttgaagaaaagatacagtatattcaaatatacctccattgccctggtgtctgtggggatatttatttgcacttttatgtcagcaaagcaggtgacttcccagtccagcttgagtgagaatgatggattccaggcatttgtgtggtggttactaggtattggggcattgacttttgctcttctgatgtcagcaaggatggggatattccaagagactctctacaaacgatttgggaaacactccaaggaggctttgttttataatcacgcccttccacttccgggtttcgtcttcttggcttctgatatttatgaccatgcagttctattcaataagtctgagttatatgaaattcccgtcatcggagtgaccctgcccatcatgtggttctacctcctcatgaacatcatcactcaatcagactcctacttaactggaagagaaatgtctattaaatgtctctcctctttctctgggtcaagaccatgtaattttatgcttcagagatgaagatactgtttgtttacaaagagtttagtttttaagacatccaaaactctatgctagagcaaaaatcaaatagcaaaggacactagccagaaaatacagtgtgtgtgtgtgcacctgtgtgcctgctgaacaacttgacagtgtaacagataaggtaactgaagatggtggatatttgaattgtattagcttaatgtctacatatctttggccaaaactctattgtcatattagaaacatgttatctttttcatgtttattagtaatttatttttgattctttgttttctttttcgtccaactaaaacaactgtaatgtacttgatacatttatatcaagttctaaagtatttagacaaatccaaatactttgtttttagttttttcctcctttccatcctgttaaccacagtgaaacgctgcagtattttgatttggtcagtgctacggaggaagaccatgaaagctgaattggtctgtgccacccagagtaaacctcttctcttcttctggaaagatggcgtgatgtttttcaaggattctaataaatatcccgcagtcatctcctgagcagctttcctctgtttcacttcggaactccttcccccactttcttcactccagtttcttcacttgcagcgttttctgctaagaaagacttatcatcttgtatctgtttatgcctctcttctttggggcccctggatgtttttgtggatttttacagagtatttatatctgcacagcgttccgttgtggaacgctgcccctcatttacataaatattatactagcatttaccatctcacttctaggaatactagtatctcgctcacacctcatatcctctcttactatgcctataatggaataatgtctatctctgttcattattaagctactcttataaccctcatcaccctcattccttt

SEQ ID NO: 325245 - DNA, 1582 bp, Homo sapiens
agaatatgagaagttaaaccagggaccatgccagaaggttctctcactgatcccccaagtacagtctacagaaaactaccttgactccactcctccagaaccccttcaccctgtggcactggctgggcaccttgtttgtcttcattgggaccttaatgtacacagaggtgtggaacaacctagggaccacaaaaagtgagcctcagaaggacagcaagaagaactgaggcctgtctggagtacgtagaccagtgtcgtcgtgagggtgggaccctgtgaaggtctgaccaccgtttcgcttttgttaatgccgagctacccgcagtgctgagccagccgtgcaaaaggaaatcttcaggaggggacttctcacgttgctcagactgacacatgtagactaaatagaaacccctcagccctaaaatagaaaaaagaacagttctggactattgaacagcccattcatttatttctgttttgtttaccgacatattcagtattattcttgttttctgaattctgagtctcctgaacaaaaggcttactatccatggtcttggaaaagattgtcccttctcttgctgttgtaatgcatctctgctacagcagtcattgtcatcctgtgaccttatcccttttgtctcccatcaccttttccttcttcagcagcacctcacagtcagtcagacgctgcaggcaccactatcaccaggagtggccaagtaaaccgagacaccagtaacagcagggctggacttcctccagcgttttgggaaggaaagagatgttcccctgagctgattcccagtgacagtgcagcaagactagtgggactcctctttcccacattttgcttttttttttttctatgcaaaagtcagatgcttctatccattgctttctgtgattagggcggccctgcagcatatctcacagcagacacagtgttcataacaaagaaaggttgtgccgggcacggtggctcacacctgtaatcccagccctttgggaggctgaggtgggtgtatcacttgaggtcaggagttcaagaccaatctggccaacatggtgaaaccccatctctactaaaaatacgaaaattagctgggtgtgatggcgcatgcctgtaatcccagctacttgggaggctgaggcaggagaatcacttgaacccgggagatgaaggttgcagtgagctgaggtcgtgctactgcactcccgcctgggtgacagagtgagactctatctcaaaaaaaaaaaaaagtggtgacggcaggatggccctgctcagcaccgcaagagccatggctgtccctgttggcccagccgggcactcacggggcagaagggtgggtctcaagtgggaggataaggcttcaccaccaggagattcccctctgcccgatgactctgataagagtcacgacccatcaagggaatgcatagatggagatatatagtgtgtgatgtgtaaatcaggtcaaacctcaacgacaattgaaagttgttattgtcctatgaggtatcttagcattctcgatgggtattgaggatggttggatgtgctttattgtgtgtggaa

SEQ ID NO: 325246 - DNA, 942 bp, Homo sapiens
ggctcacacctgtaatcccagccctttgggaggctgaggtgggtgtatcacttgaggtcaggagttcaagaccaatctggccaacatggtgaaaccccatctctactaaaaatacgaaaattagctgggtgtgatggcgcatgcctgtaatcccagctacttgggaggctgaggcaggagaatcacttgaacccgggagatgaaggttgcagtgagctgaggtcgtgctactgcactcccgcctgggtgacagagtgagactctatctcaaaaaaaaaaaaaaaaaagaaaggttgttatggactggacacccctgaagcccattgcctaggccacagtggtgacggcaggatggccctgctcagcaccgcaagagccatggctgtccctgttggcccagccgggcactcacggggcagaagggtgggtctcaagtgggaggataaggcttcaccaccaggagattcccctctgcccgatgactctgataagagtcacgacccatcaagggaatgcatagatggagatatatagtgtgtgatgtgtaaatcaggtcaaacctcaacgacaattgaaagttgttattgtcctatgaggtatcttagcattctcgatgggtattgaggatggttggatgtgctttattgtgtgtggaaacatgcctctctttgctaatcatttcagaggtccagttttcctttcactggacaatcttgaataggaggaacgctgttgctgtaatatgcgtagcttgtgtgtgctcttgtgtagtctgtgtgtgatcaaagggcacggaagtggctgcactttcacatcccttttctttacttagctggaaccttacataccagtacatgctcctctgtaagcagctgaactcaccggccacttctctgtttgcctatagacaaagactgtgtgtgtgtgtgtgtgtgtgtatgt

SEQ ID NO: 325247 - DNA, 2833 bp, Homo sapiens
agcggctctatggcggagctgcctggcggaagcgggaacgtcgcatcctgaggtaaaggtgcacggcatcctgggacatgtagtctggccggggctcggacgccccctcggatgaatgggaccgaagctgactgcgaactacagcttcttggcagcgtcggtgttggccgcgggagaaggggagaccgcggcggcccccagtgagagcggctttccaggacggtgcgatgtgctgcgcagcgaagaggcaggaggccggcttcctggggtagcggtacaggcgggcgcttactctgtgcgcttgcttccccaaccctgcaccggccatgcgcccggccttggcggtgggcctggtgttcgcaggctgctgcagtaacgtgatcttcctagagctcctggcccggaagcatccaggatgtgggaacattgtgacatttgcacaatttttatttattgctgtggaaggcttcctctttgaagctgatttgggaaggaagccaccagctatcccaataaggtactatgccataatggtgaccatgttcttcaccgtgagcgtggtgaacaactatgccctgaatctcaacattgccatgcccctgcatatgatatttagatccggttctctaattgccaacatgattctaggaattatcattttgaagaaaagatacagtatattcaaatatacctccattgccctggtgtctgtggggatatttatttgcacttttatgtcagcaaagcaggtgacttcccagtccagcttgagtgagaatgatggattccaggcatttgtgtggtggttactaggtattggggcattgacttttgctcttctgatgtcagcaaggatggggatattccaagagactctctacaaacgatttgggaaacactccaaggaggctttgttttataatcacgcccttccacttccgggtttcgtcttcttggcttctgatatttatgaccatgcagttctattcaataagtctgagttatatgaaattcccgtcatcggagtgaccctgcccatcatgtggttctacctcctcatgaacatcatcactcaatcagactcctacttaactggaagagaaatgtctattaaatgtctctcctctttctctgggtcaagaccatgtaattttatgcttcagagatgaagatactgtttgtttacaaagagtttagtttttaagacatccaaaactctatgctagagcaaaaatcaaatagcaaaggacactagccagaaaatacagtgtgtgtgtgtgcacctgtgtgcctgctgaacaacttgacagtgtaacagataaggtaactgaagatggtggatatttgaattgtattagcttaatgtctacatatctttggccaaaactctattgtcatattagaaacatgttatctttttcatgtttattagtaatttatttttgattctttgttttctttttcgtccaactaaaacaactgtaatgtacttgatacatttatatcaagttctaaagtatttagacaaatccaaatactttgtttttagttttttcctcctttccatcctgttaaccacagtgaaacgctgcagtattttgatttggtcagtgctacggaggaagaccatgaaagctgaattggtctgtgccacccagagtaaacctcttctcttcttctggaaagatggcgtgatgtttttcaaggattctaataaatatcccgcagtcatctcctgagcagctttcctctgtttcacttcggaactccttcccccactttcttcactccagtttcttcacttgcagcgttttctgctaagaaagacttatcatcttgtatctgtttatgcctctcttctttggggcccctggatgtttttgtggatttttacagagtatttatatctgcacagcgtgtattttgttatacattcttacaagcattgatattggggggtacatttataatagtgagaatatctggcagaatgtgtgaatgccatatctgtagatgacgatgaatgtgaagggttaatgtagaaatgtttgtttattctgttacagctcaaaatggaggctgagaatctctaccaccattcccttctctatttgagaatctctaccaccattcccttctctatttgggaaacaatactctcttattttgctatttttaccttcccattaactggcttcactcaacagtgccagatacctatggagaggggaagtaaaacaccttaggtcaggaataataaaccaatgagttagctcagggccggtggacatgttcactggtggaccagttggcattgacctaaacggacagagaaatgcacatggaggagaactacgttgaaatcaagatcctatgtctgttgtattttctctttgcctggagtaaatagcattataagtcattccacccttattagataaccaaagcatattggtctcaatagctttctcctgaaaaatgtgattgaatcttacctgtagcagttcactcttaaggttgaaagaactgtcaatatagataaaatccattccttattattattgattggtgtgacatttgaaaatgtgtctaaacaatatttgtaagtaaaagaaccagtcataagcctcaaatgtgttcagtgtgtaccaagctggaatgggagactggcccctcttggctttaaagtagcatgttgtctttttctagcagcttcttcctagtagacattccagggatgggaggggccagggatcatgtcttactcatttctgtatcgccagcccctggcatagtgtctggcttatgttatgtgaataaatgaatgcttgcc

SEQ ID NO: 325248 - DNA, 3910 bp, Homo sapiens
agcggctctatggcggagctgcctggcggaagcgggaacgtcgcatcctgaggtaaaggtgcacggcatcctgggacatgtagtctggccggggctcggacgccccctcggatgaatgggaccgaagctgactgcgaactacagcttcttggcagcgtcggtgttggccgcgggagaaggggagaccgcggcggcccccagtgagagcggctttccaggacggtgcgatgtgctgcgcagcgaagaggcaggaggccggcttcctggggtagcggtacaggcgggcgcttactctgtgcgcttgcttccccaaccctgcaccggccatgcgcccggccttggcggtgggcctggtgttcgcaggctgctgcagtaacgtgatcttcctagagctcctggcccggaagcatccaggatgtgggaacattgtgacatttgcacaatttttatttattgctgtggaaggcttcctctttgaagctgatttgggaaggaagccaccagctatcccaataaggtactatgccataatggtgaccatgttcttcaccgtgagcgtggtgaacaactatgccctgaatctcaacattgccatgcccctgcatatgatatttagatccggttctctaattgccaacatgattctaggaattatcattttgaagaaaagatacagtatattcaaatatacctccattgccctggtgtctgtggggatatttatttgcacttttatgtcagcaaagcaggtgacttcccagtccagcttgagtgagaatgatggattccaggcatttgtgtggtggttactaggtattggggcattgacttttgctcttctgatgtcagcaaggatggggatattccaagagactctctacaaacgatttgggaaacactccaaggaggctttgttttataatcacgcccttccacttccgggtttcgtcttcttggcttctgatatttatgaccatgcagttctattcaataagtctgagttatatgaaattcccgtcatcggagtgaccctgcccatcatgtggttctacctcctcatgaacatcatcactcaatcagactcctacttaactggaagagaaatgtctattaaatgtctctcctctttctctgggtcaagaccatgtaattttatgcttcagagatgaagatactgtttgtttacaaagagtttagtttttaagacatccaaaactctatgctagagcaaaaatcaaatagcaaaggacactagccagaaaatacagtgtgtgtgtgtgcacctgtgtgcctgctgaacaacttgacagtgtaacagataaggtaactgaagatggtggatatttgaattgtattagcttaatgtctacatatctttggccaaaactctattgtcatattagaaacatgttatctttttcatgtttattagtaatttatttttgattctttgttttctttttcgtccaactaaaacaactgtaatgtacttgatacatttatatcaagttctaaagtatttagacaaatccaaatactttgtttttagttttttcctcctttccatcctgttaaccacagtgaaacgctgcagtattttgatttggtcagtgctacggaggaagaccatgaaagctgaattggtctgtgccacccagagtaaacctcttctcttcttctggaaagatggcgtgatgtttttcaaggattctaataaatatcccgcagtcatctcctgagcagctttcctctgtttcacttcggaactccttcccccactttcttcactccagtttcttcacttgcagcgttttctgctaagaaagacttatcatcttgtatctgtttatgcctctcttctttggggcccctggatgtttttgtggatttttacagagtatttatatctgcacagcgtgtattttgttatacattcttacaagcattgatattggggggtacatttataatagtgagaatatctggcagaatgtgtgaatgccatatctgtagatgacgatgaatgtgaagggttaatgtagaaatgtttgtttattctgttacagctcaaaatggaggctgagaatctctaccaccattcccttctctatttgagaatctctaccaccattcccttctctatttgggaaacaatactctcttattttgctatttttaccttcccattaactggcttcactcaacagtgccagatacctatggagaggggaagtaaaacaccttaggtcaggaataataaaccaatgagttagctcagggccggtggacatgttcactggtggaccagttggcattgacctaaacggacagagaaatgcacatggaggagaactacgttgaaatcaagatcctatgtctgttgtattttctctttgcctggagtaaatagcattataagtcattccacccttattagataaccaaagcatattggtctcaatagctttctcctgaaaaatgtgattgaatcttacctgtagcagttcactcttaaggttgaaagaactgtcaatatagataaaatccattccttattattattgattggtgtgacatttgaaaatgtgtctaaacaatatttgtaagtaaaagaaccagtcataagcctcaaatgtgttcagtgtgtaccaagctggaatgggagactggcccctcttggctttaaagtagcatgttgtctttttctagcagcttcttcctagtagacattccagggatgggaggggccagggatcatgtcttactcatttctgtatcgccagcccctggcatagtgtctggcttatgttatgtgaataaatgaatgcttgccaagatctcttcttccctcaagtttctggaaaacctgagggttcgtgatacctgttcccactcctcatcagcgggttggcaagaaagcaaataaggggaaacatttttaacattccaagcaagagaaggaagaacgactattgggaggaggtacaccagagattgctcagtgtgcagcctgctacctcacttttggctctggattgcctggtggtagaagggaagagtattatgtagttagcaccttacatatttgatgctcaggaagaaagtgcaagaagatccctaatagaacattaaagattcttaaaagtttttgaagtaggctgcttggggtgaccagccccacccttacatctccatagttggtacagttagcttgtagcagctgaagctgatgcctggagatcactgtctgttggtctgatctcagtatcatactgagacacctcccctgagccttacctacttaaattggtaaccgtcctaccaaaatttgtcaattttaatcaagtgaggcaagttgcaagggagccagagatacgtgaaaaaagaaaagcagaaatactgatactttctaagaaagaagttgtaataatttctttggcacattgacttactgatatcttttgaaatgcatagatgactcttgtgaaccaaagagagcagtagtggttattccccggcgcaataaaaatgcctttgtgtatcacttgcgattgccagtcatttctgtgccagttgctttcattccagagaatggcctcattctccaaaaaaagatgatgattttagaagtaggatttcctaacaaattatgtggtggggagggacggcggggattttattcatcccgtctgagctcttcatacagtattaccattaggttttaagaacaaagatgggggaggagggagtagaaagctgagagtacgtagaacagctacaagacattagtgggtattcagattttgagctgtgtaaatatcaaacatcggcttccagccttaagagttatttgagcagagagttaaggaggaatgggagattttgtgaataaaatgttttgccaaactga

SEQ ID NO: 325249 - DNA, 4029 bp, Homo sapiens
agcggctctatggcggagctgcctggcggaagcgggaacgtcgcatcctgaggtaaaggtgcacggcatcctgggacatgtagtctggccggggctcggacgccccctcggatgaatgggaccgaagctgactgcgaactacagcttcttggcagcgtcggtgttggccgcgggagaaggggagaccgcggcggcccccagtgagagcggctttccaggacggtgcgatgtgctgcgcagcgaagaggcaggaggccggcttcctggggtagcggtacaggcgggcgcttactctgtgcgcttgcttccccaaccctgcaccggccatgcgcccggccttggcggtgggcctggtgttcgcaggctgctgcagtaacgtgatcttcctagagctcctggcccggaagcatccaggatgtgggaacattgtgacatttgcacaatttttatttattgctgtggaaggcttcctctttgaagctgatttgggaaggaagccaccagctatcccaataaggtactatgccataatggtgaccatgttcttcaccgtgagcgtggtgaacaactatgccctgaatctcaacattgccatgcccctgcatatgatatttagatccggttctctaattgccaacatgattctaggaattatcattttgaagaaaagatacagtatattcaaatatacctccattgccctggtgtctgtggggatatttatttgcacttttatgtcagcaaagcaggtgacttcccagtccagcttgagtgagaatgatggattccaggcatttgtgtggtggttactaggtattggggcattgacttttgctcttctgatgtcagcaaggatggggatattccaagagactctctacaaacgatttgggaaacactccaaggaggctttgttttataatcacgcccttccacttccgggtttcgtcttcttggcttctgatatttatgaccatgcagttctattcaataagtctgagttatatgaaattcccgtcatcggagtgaccctgcccatcatgtggttctacctcctcatgaacatcatcactcaatcagactcctacttaactggaagagaaatgtctattaaatgtctctcctctttctctgggtcaagaccatgtaattttatgcttcagagatgaagatactgtttgtttacaaagagtttagtttttaagacatccaaaactctatgctagagcaaaaatcaaatagcaaaggacactagccagaaaatacagtgtgtgtgtgtgcacctgtgtgcctgctgaacaacttgacagtgtaacagataaggtaactgaagatggtggatatttgaattgtattagcttaatgtctacatatctttggccaaaactctattgtcatattagaaacatgttatctttttcatgtttattagtaatttatttttgattctttgttttctttttcgtccaactaaaacaactgtaatgtacttgatacatttatatcaagttctaaagtatttagacaaatccaaatactttgtttttagttttttcctcctttccatcctgttaaccacagtgaaacgctgcagtattttgatttggtcagtgctacggaggaagaccatgaaagctgaattggtctgtgccacccagagtaaacctcttctcttcttctggaaagatggcgtgatgtttttcaaggattctaataaatatcccgcagtcatctcctgagcagctttcctctgtttcacttcggaactccttcccccactttcttcactccagtttcttcacttgcagcgttttctgctaagaaagacttatcatcttgtatctgtttatgcctctcttctttggggcccctggatgtttttgtggatttttacagagtatttatatctgcacagcgtgtattttgttatacattcttacaagcattgatattggggggtacatttataatagtgagaatatctggcagaatgtgtgaatgccatatctgtagatgacgatgaatgtgaagggttaatgtagaaatgtttgtttattctgttacagctcaaaatggaggctgagaatctctaccaccattcccttctctatttgagaatctctaccaccattcccttctctatttgggaaacaatactctcttattttgctatttttaccttcccattaactggcttcactcaacagtgccagatacctatggagaggggaagtaaaacaccttaggtcaggaataataaaccaatgagttagctcagggccggtggacatgttcactggtggaccagttggcattgacctaaacggacagagaaatgcacatggaggagaactacgttgaaatcaagatcctatgtctgttgtattttctctttgcctggagtaaatagcattataagtcattccacccttattagataaccaaagcatattggtctcaatagctttctcctgaaaaatgtgattgaatcttacctgtagcagttcactcttaaggttgaaagaactgtcaatatagataaaatccattccttattattattgattggtgtgacatttgaaaatgtgtctaaacaatatttgtaagtaaaagaaccagtcataagcctcaaatgtgttcagtgtgtaccaagctggaatgggagactggcccctcttggctttaaagtagcatgttgtctttttctagcagcttcttcctagtagacattccagggatgggaggggccagggatcatgtcttactcatttctgtatcgccagcccctggcatagtgtctggcttatgttatgtgaataaatgaatgcttgccaagatctcttcttccctcaagtttctggaaaacctgagggttcgtgatacctgttcccactcctcatcagcgggttggcaagaaagcaaataaggggaaacatttttaacattccaagcaagagaaggaagaacgactattgggaggaggtacaccagagattgctcagtgtgcagcctgctacctcacttttggctctggattgcctggtggtagaagggaagagtattatgtagttagcaccttacatatttgatgctcaggaagaaagtgcaagaagatccctaatagaacattaaagattcttaaaagtttttgaagtaggctgcttggggtgaccagccccacccttacatctccatagttggtacagttagcttgtagcagctgaagctgatgcctggagatcactgtctgttggtctgatctcagtatcatactgagacacctcccctgagccttacctacttaaattggtaaccgtcctaccaaaatttgtcaattttaatcaagtgaggcaagttgcaagggagccagagatacgtgaaaaaagaaaagcagaaatactgatactttctaagaaagaagttgtaataatttctttggcacattgacttactgatatcttttgaaatgcatagatgactcttgtgaaccaaagagagcagtagtggttattccccggcgcaataaaaatgcctttgtgtatcacttgcgattgccagtcatttctgtgccagttgctttcattccagagaatggcctcattctccaaaaaaagatgatgattttagaagtaggatttcctaacaaattatgtggtggggagggacggcggggattttattcatcccgtctgagctcttcatacagtattaccattaggttttaagaacaaagatgggggaggagggagtagaaagctgagagtacgtagaacagctacaagacattagtgggtattcagattttgagctgtgtaaatatcaaacatcggcttccagccttaagagttatttgagcagagagttaaggaggaatgggagattttgtgaataaaatgttttgccaaactgaatgagtctttttgccattattatagagagctattttttaccttctgaaacaactcatcagacatctggggtttatcttgaattgtaccatcattgtttcttaataaaagtgataaattt

SEQ ID NO: 325250 - DNA, 1543 bp, Homo sapiens
agcggctctatggcggagctgcctggcggaagcgggaacgtcgcatcctgaggtaaaggtgcacggcatcctgggacatgtagtctggccggggctcggacgccccctcggatgaatgggaccgaagctgactgcgaactacagcttcttggcagcgtcggtgttggccgcgggagaaggggagaccgcggcggcccccagtgagagcggctttccaggacggtgcgatgtgctgcgcagcgaagaggcaggaggccggcttcctggggtagcggtacaggcgggcgcttactctgtgcgcttgcttccccaaccctgcaccggccatgcgcccggccttggcggtgggcctggtgttcgcaggctgctgcagtaacgtgatcttcctagagctcctggcccggaagcatccaggatgtgggaacattgtgacatttgcacaatttttatttattgctgtggaaggcttcctctttgaagctgatttgggaaggaagccaccagctatcccaataaggtactatgccataatggtgaccatgttcttcaccgtgagcgtggtgaacaactatgccctgaatctcaacattgccatgcccctgcatatgatatttagatccggttctctaattgccaacatgattctaggaattatcattttgaagaaaagatacagtatattcaaatatacctccattgccctggtgtctgtggggatatttatttgcacttttatgtcagcaaagcaggtgacttcccagtccagcttgagtgagaatgatggattccaggcatttgtgtggtggttactaggtattggggcattgacttttgctcttctgatgtcagcaaggatggggatattccaagagactctctacaaacgatttgggaaacactccaaggaggctttgttttataatcacgcccttccacttccgggtttcgtcttcttggcttctgatatttatgaccatgcagttctattcaataagtctgagttatatgaaattcccgtcatcggagtgaccctgcccatcatgtggttctacctcctcatgaacatcatcactcagtacgtgtgcatccggggtgtgtttatcctcaccacagaatgcgcctccctcaccgtcacgctcgtcgtgaccctacgcaaatttgtgagcctcatcttttccatcttgtacttccagaaccccttcaccctgtggcactggctgggcaccttgtttgtcttcattgggaccttaatgtacacagaggtgtggaacaacctagggaccacaaaaagtgagcctcagaaggacagcaagaagaactgaggcctgtctggagtacgtagaccagtgtcgtcgtgagggtgggaccctgtgaaggtctgaccaccgtttcgcttttgttaatgccgagctacccgcagtgctgagccagccgtgcaaaaggaaatcttcaggaggggacttctcacgttgctcagactgacacatgtagactaaatagaaacccctcagccctaaaatagaaaaaagaacagttctggact

SEQ ID NO: 325251 - DNA, 614 bp, Homo sapiens
agactctcattcaactccaggttgcactgtggacacagtcccctcttgagcaggtacctccttgcagtggttgggacgtcctacttggctcatagttgggaagtgcatatgctggagctgaagcctcttgccttcccgggatagggcgtcctcacatcccctctgagaagttccccagcttccctctgttccccgtttccacacttagcgaggctcttgtccactgctacatcccccatagccagtccctcagccttgccactgcttatgctggtctggaaacaattcctagacttgtggggcatctggggaagttctccatctttttttagctggcatgacccaagtggtgtgggcagggctgtggattctatggtgtggctggaagccaggtagcctctctctactgtacatggaactcagcaacttctgagtcaagcaagatcttagctctgcaggtgtcttgccctgtccaaagttatggccacaccagtaccttttaactctagaagcccagtaagtgttttgtgggaccgcaaagatcattttctagacctgctgaatatgcctagaacgggtagggatggctttcacgctgttcctagggctgacaa

SEQ ID NO: 325252 - DNA, 3792 bp, Homo sapiens
acctggcaggaagcgagaaagagttcggcgaagaaggagtgagttctagagacgccccgcgagcaggacccgcgcctgcaggagagcctggccgacccgctcctcgccttctctgcgcgctctcccgcgtccgctttcagcaccccgagcggagaacagttcccggcagcccgcagcgctgccgagtggccgccggccggccgagtacccggagctccagggggctcaggagcaccctctgagaacccgctgtgcacccaccttttcccctcttttggtgggcaagtaagcacgggggaaaagcatccggtggcctcagggagccctgaagaaaccgaagcagaatgtaccagggacacatgcagaaaagtaaagaacaaggatatggaaaactaagcagtgatgaagacctcgaaataattgttgatcaaaagcagggaaaaggctctagggcggcagataaggctgttgccatggtgatgaaggagataccgagggaggagtctgctgaagaaaagcccctccttactatgacatcacagctggtgaatgagcaacaagaaagcagacccctcctgagtccctccatcgatgactttctctgtgaaaccaaatcggaagcaatagcaaggccagtaacatccaatacagctgtattgaccactggcttagatctcctcgacctgagtgaaccagtctctcaaacccaaaccaaagccaagaagtcagagccctcatcaaaaacctcatccctcaagaaaaaggccgatggatctgacctcatcagcacggatgctgagcagagaggccagcctctcagagtcccggagacttcatccttagatctagacattcaaacacaactggaaaaatgggacgatgttaagtttcatggagatcgaaataccaagggacatccaatggcagagagaaaatcatcctcatctagaactggatcaaaagagctcttatggtcctcagaacacagatctcaaccagaactgagtggtggaaaaagcgccctcaactctgagtcggcttcagaattggaattagtggctccgactcaggctcgactgaccaaagaacatcgctggggaagcgcattactttctagaaaccactccttagaagaagagtttgaaagggcaaaagcagcagtggagtcagatacagagttttgggataagatgcaagcagaatgggaagaaatggctcggaggaactggatatctgagaaccaagaagcccagaaccaagtaaccatctcggctagtgagaagggatattactttcacactgaaaaccccttcaaggactggcctggagcatttgaagaaggcttaaaaaggctgaaggaaggggatctgccagtcaccatcctgttcatggaagcagcaattcttcaggaccctggagatgcagaggcatggcagttcctcgggataacccaggcggagaatgaaaatgaacaagcagctattgtcgccctccagaggtgcttagaattacagcccaacaacttaaaagctttgatggccttggctgtgagttatactaacactggccatcagcaggatgcctgtgacgctctgaagaattggattaagcaaaatccaaagtacaaataccttgtgaaaagcaagaagggatctccaggcctcacccggcggatgtctaagtccccagttgatagctctgttctggaaggggtgaaggaattatatctggaagctgcccaccaaaatggagatatgatcgacccagacctgcagacaggtctaggggttctgttccacctgagtggagaatttaatagagcaatagatgcatttaacgctgccttaactgttcggccagaggactattcactatggaaccgcctcggggcgaccttggcgaacggagaccgcagcgaggaagccgtggaggcctatacgcgagcactggagattcagccaggattcatccggtccagatacaacctaggaataagctgcatcaacctgggcgcctacagagaagcggtcagcaattttctcactgccctcagtttgcaaagaaagagcaggaatcagcagcaagttcctcatcctgcaatctctgggaatatctgggctgccctcagaattgcgctctctctgatggaccaaccagaactcttccaggcggctaatcttggtgacctggatgtcctcttaagagctttcaacttggatccttgaagaaagaataataccagtactaataatccctgatctgtgtgattgtactgaaaaatcaaaaactattttattatgaatttcaaaaggataaatcaaatattcaaaaggccatggtcatatagcccaaggaaattaattcctgtggacaatgcccagtctctgttcagatccaaaagcacaaaatgttgtatatagagtcaaagtcaggctcaaaagaagaattaagagactcaagacaaaccaagataaagtaactgtgtgttgaatactctttccacaagttgcaagcatattgcaacacatgttctttgggttttttgtctcccccttgcagctgatgacacatctgaggaacttgttcatgggaaacatggaaaaagcactgcctcagattgggaaattctgactgtttctgaactgtcttcttttgcaagactgaacatagtttgggccattggtgcatgcacatatattaacttgtgactaaagacagacattgcttaaacctgttccaattttaacttttactgtagccctttgattccagagagggagctttgctggcaaaagcagtttttgcactagaaatttttgctgttcccaatctaaacttttctggtattgtatatatgcactttaatatcttatttatgccttgctggagttttgttttgttgctccaatttttaacttgggggtgaaagatttaagaactcagcctcactagatcaacggaccaaataaacaattcctgaagacagtttttcatagtgtaggattttgaagaagtgtttttcttaaagcagatacgatgacataaggcgtaaatatggcaaacagatcttttcattcacgtgctttctgggtctgtatgaacataagtaagacacaaggtactgtctcttcatgcattctctgcaggaagaaagtttgatggtatcgtgatttctattgagttcaaattaacttgcttaagtgtcatactttactggctttgccctgcacaccaatattccttttaaaccataaatattttaaataatatttcttaagagtgataaataacattttttcctaaaaattatgttttcttagtttcataataatctgcactgttcatccccttgcattctaagtgatagaagagcaacactttcaaaccaaatctcactgaatgccagtgatttcatatgaaagatgcatgcctctttggctctttgaacatttagcaagtattgggaattttctattagcagtggtgttttaattggttgaattccacttagttctccacagtgttttgtatgtgtttggggcttggtgattattttgaaagatacattttttaaagaattaggaacattttttgcaaaatgctaatcagaatataattttcccaatgtcaggtatagaagttatcccattcttctttacctggtctccttccttcgtctagaaccttccccacagtagctaatcctaacaactttttatttatgttctttgataataatagctcatcccgctcatgattatagctacccacaaaaaataaaacaacaacaac

SEQ ID NO: 325253 - DNA, 779 bp, Homo sapiens
  misc_feature (752)..(752): n is a, c, g, or t
tgtaaaagaatggaaatcacatttattgagtacctattgtatgcctggcactttaccatacattagatcatttaatcctcatcttatccctaaaagacaattaattccccattttcaaatgaggaaactgaaactcagagagatcaagaaacttacttcaagtcacacactaagccgtgacagagccagatgtttccacttcaccaacaacatccaaccactgtgacttggaattggaatcagaaagcaagattattaagagtaaagtttgacacaccatcctaaagatcccataggaatggttaactcatgaagcccatgcactactaaagaaatccaggttgtgagttcaatggagcccggcccctgccttgagtacaagggagaagcagacagaagagtattgagacatcagcaaaaatccatcccccacctagaggaaaagcttggagattaaagaggagtgctgcagtcattgttgtagactgccacaaagggttaatgcaagtggtttctttgtctttctgtggctttcctacgtgagctgggtgaagagattccaggccagggagccaccgatcttgctcagaagctagtctctccagtgcagtgccagggccagtgaaacagcagggactggtggaaaggtagagctgtagggaccttctccaatttgaattttctatctctcacaatgagctagtcaaacactggttacgtgcagtcgccctacacggcctttggctgctcgnactttggcatatgaattccgttttgga

SEQ ID NO: 325254 - DNA, 774 bp, Homo sapiens
  misc_feature (729)..(729): n is a, c, g, or t
tgtaaaagaatggaaatcacatttattgagtacctattgtatgcctggcactttaccatacattagatcatttaatcctcatcttatccctaaaagacaattaattccccattttcaaatgaggaaactgaaactcagagagatcaagaaacttacttcaagtcacacactaagccgtgacagagccagatgtttccacttcaccaacaacatccaaccactgtgacttggaattggaatcagaaagcaagattattaagagtaaagtttgacacaccatcctaaagatcccataggaatggttaactcatgaagcccatgcactactaaagaaatccaggttgtgagttcaatggagcccggcccctgccttgagtacaagggagaagcagacagaagagtattgagacatcagcaaaaatccatcccccacctagaggaaaagcttggagattaaagaggagtgctgcagtcattgttgtagactgccacaaagggttaatgcaagtggtttctttgtctttctgtggctttcctacgtgagctgggtgaagagattccaggccagggagccaccgatcttgctcagaagctagtctctccagtgcagtgccagggccagtgaaacagcagggactggtggaaaggtagagctgtagggaccttctccaatttgaattttctatctctcacaatgagctagtcaaacactggttacgtgcatcacgnaatttcatccttttccttatcccatacctccgagcagcggggcct

SEQ ID NO: 325255 - DNA, 776 bp, Homo sapiens
tgtaaaagaatggaaatcacatttattgagtacctattgtatgcctggcactttaccatacattagatcatttaatcctcatcttatccctaaaagacaattaattccccattttcaaatgaggaaactgaaactcagagagatcaagaaacttacttcaagtcacacactaagccgtgacagagccagatgtttccacttcaccaacaacatccaaccactgtgacttggaattggaatcagaaagcaagattattaagagtaaagtttgacacaccatcctaaagatcccataggaatggttaactcatgaagcccatgcactactaaagaaatccaggttgtgagttcaatggagcccggcccctgccttgagtacaagggagaagcagacagaagagtattgagacatcagcaaaaatccatcccccacctagaggaaaagcttggagattaaagaggagtgctgcagtcattgttgtagactgccacaaagggttaatgcaagtggtttctttgtctttctgtggctttcctacgtgagctgggtgaagagattccaggccagggagccaccgatcttgctcagaagctagtctctccagtgcagtgccagggccagtgaaacagcagggactggtggaaaggtagagctgtagggaccttctccaatttgaattttctatctctcacaatgagctagtcaaacactggttacgtgcagtcggctacaaatctcccactattacagacgtatttaaagtgagcggagcgcg

SEQ ID NO: 325256 - DNA, 777 bp, Homo sapiens
  misc_feature (730)..(730): n is a, c, g, or t
tgtaaaagaatggaaatcacatttattgagtacctattgtatgcctggcactttaccatacattagatcatttaatcctcatcttatccctaaaagacaattaattccccattttcaaatgaggaaactgaaactcagagagatcaagaaacttacttcaagtcacacactaagccgtgacagagccagatgtttccacttcaccaacaacatccaaccactgtgacttggaattggaatcagaaagcaagattattaagagtaaagtttgacacaccatcctaaagatcccataggaatggttaactcatgaagcccatgcactactaaagaaatccaggttgtgagttcaatggagcccggcccctgccttgagtacaagggagaagcagacagaagagtattgagacatcagcaaaaatccatcccccacctagaggaaaagcttggagattaaagaggagtgctgcagtcattgttgtagactgccacaaagggttaatgcaagtggtttctttgtctttctgtggctttcctacgtgagctgggtgaagagattccaggccagggagccaccgatcttgctcagaagctagtctctccagtgcagtgccagggccagtgaaacagcagggactggtggaaaggtagagctgtagggaccttctccaatttgaattttctatctctcacaatgagctagtcaaacactggttacgtgcaggtggcnctgaggtgttgtttcttgttatagactataagtatagtagggttaag

SEQ ID NO: 325257 - DNA, 3666 bp, Homo sapiens
tgtaaaagaatggaaatcacatttattgagtacctattgtatgcctggcactttaccatacattagatcatttaatcctcatcttatccctaaaagacaattaattccccattttcaaatgaggaaactgaaactcagagagatcaagaaacttacttcaagtcacacactaagccgtgacagagccagatgtttccacttcaccaacaacatccaaccactgtgacttggaattggaatcagaaagcaagattattaagagtaaagtttgacacaccatcctaaagatcccataggaatggttaactcatgaagcccatgcactactaaagaaatccaggttgtgagttcaatggagcccggcccctgccttgagtacaagggagaagcagacagaagagtattgagacatcagcaaaaatccatcccccacctagaggaaaagcttggagattaaagaggagtgctgcagtcattgttgtagactgccacaaagggttaatgcaagtggtttctttgtctttctgtggctttcctacgtgagctgggtgaagagattccaggccagggagccaccgatcttgctcagaagctagtctctccagtgcagtgccagggccagtgaaacagcagggactggtggaaaggtagagctgtagggaccttctccaatttgaattttctatctctcacaatgagctagtcaaacactggttacgtgcaacattcaaacacaactggaaaaatgggacgatgttaagtttcatggagatcgaaataccaagggacatccaatggcagagagaaaatcatcctcatctagaactggatcaaaagagctcttatggtcctcagaacacagatctcaaccagaactgagtggtggaaaaagcgccctcaactctgagtcggcttcagaattggaattagtggctccgactcaggctcgactgaccaaagaacatcgctggggaagcgcattactttctagaaaccactccttagaagaagagtttgaaagggcaaaagcagcagtggagtcagatacagagttttgggataagatgcaagcagaatgggaagaaatggctcggaggaactggatatctgagaaccaagaagcccagaaccaagtaaccatctcggctagtgagaagggatattactttcacactgaaaaccccttcaaggactggcctggagcatttgaagaaggcttaaaaaggctgaaggaaggggatctgccagtcaccatcctgttcatggaagcagcaattcttcaggaccctggagatgcagaggcatggcagttcctcgggataacccaggcggagaatgaaaatgaacaagcagctattgtcgccctccagaggtgcttagaattacagcccaacaacttaaaagctttgatggccttggctgtgagttatactaacactggccatcagcaggatgcctgtgacgctctgaagaattggattaagcaaaatccaaagtacaaataccttgtgaaaagcaagaagggatctccaggcctcacccggcggatgtctaagtccccagttgatagctctgttctggaaggggtgaaggaattatatctggaagctgcccaccaaaatggagatatgatcgacccagacctgcagacaggtctaggggttctgttccacctgagtggagaatttaatagagcaatagatgcatttaacgctgccttaactgttcggccagaggactattcactatggaaccgcctcggggcgaccttggcgaacggagaccgcagcgaggaagccgtggaggcctatacgcgagcactggagattcagccaggattcatccggtccagatacaacctaggaataagctgcatcaacctgggcgcctacagagaagcggtcagcaattttctcactgccctcagtttgcaaagaaagagcaggaatcagcagcaagttcctcatcctgcaatctctgggaatatctgggctgccctcagaattgcgctctctctgatggaccaaccagaactcttccaggcggctaatcttggtgacctggatgtcctcttaagagctttcaacttggatccttgaagaaagaataataccagtactaataatccctgatctgtgtgattgtactgaaaaatcaaaaactattttattatgaatttcaaaaggataaatcaaatattcaaaaggccatggtcatatagcccaaggaaattaattcctgtggacaatgcccagtctctgttcagatccaaaagcacaaaatgttgtatatagagtcaaagtcaggctcaaaagaagaattaagagactcaagacaaaccaagataaagtaactgtgtgttgaatactctttccacaagttgcaagcatattgcaacacatgttctttgggttttttgtctcccccttgcagctgatgacacatctgaggaacttgttcatgggaaacatggaaaaagcactgcctcagattgggaaattctgactgtttctgaactgtcttcttttgcaagactgaacatagtttgggccattggtgcatgcacatatattaacttgtgactaaagacagacattgcttaaacctgttccaattttaacttttactgtagccctttgattccagagagggagctttgctggcaaaagcagtttttgcactagaaatttttgctgttcccaatctaaacttttctggtattgtatatatgcactttaatatcttatttatgccttgctggagttttgttttgttgctccaatttttaacttgggggtgaaagatttaagaactcagcctcactagatcaacggaccaaataaacaattcctgaagacagtttttcatagtgtaggattttgaagaagtgtttttcttaaagcagatacgatgacataaggcgtaaatatggcaaacagatcttttcattcacgtgctttctgggtctgtatgaacataagtaagacacaaggtactgtctcttcatgcattctctgcaggaagaaagtttgatggtatcgtgatttctattgagttcaaattaacttgcttaagtgtcatactttactggctttgccctgcacaccaatattccttttaaaccataaatattttaaataatatttcttaagagtgataaataacattttttcctaaaaattatgttttcttagtttcataataatctgcactgttcatccccttgcattctaagtgatagaagagcaacactttcaaaccaaatctcactgaatgccagtgatttcatatgaaagatgcatgcctctttggctctttgaacatttagcaagtattgggaattttctattagcagtggtgttttaattggttgaattccacttagttctccacagtgttttgtatgtgtttggggcttggtgattattttgaaagatacattttttaaagaattaggaacattttttgcaaaatgctaatcagaatataattttcccaatgtcaggtatagaagttatcccattcttctttacctggtctccttccttcgtctagaaccttccccacagtagctaatcctaacaactttttatttatgttctttgataataatagctcatcccgctcatgattatagctacccacaaaaaataaaacaacaacaac

SEQ ID NO: 325258 - DNA, 3572 bp, Homo sapiens
ccctcacacttggaaggtggagagattagctttctttttccttctagttcagtcctttggctactgtgaaagaccacgcagaagctgtggacttgctttttgtgcttgacaaaagtgcatagatagaagacagggattcccggctgggaggagggaggagagctgaagatccctgcctgggctggctgagctaagcaaagtgggaagctgagtgcttgaaagaggattatgctcgcactagaaataagcaaaaagtaaagaacaaggatatggaaaactaagcagtgatgaagacctcgaaataattgttgatcaaaagcagctggtgaatgagcaacaagaaagcagacccctcctgagtccctccatcgatgactttctctgtgaaaccaaatcggaagcaatagcaaggccagtaacatccaatacagctgtattgaccactggcttagatctcctcgacctgagtgaaccagtctctcaaacccaaaccaaagccaagaagtcagagccctcatcaaaaacctcatccctcaagaaaaaggccgatggatctgacctcatcagcacggatgctgagcagagaggccagcctctcagagtcccggagacttcatccttagatctagacattcaaacacaactggaaaaatgggacgatgttaagtttcatggagatcgaaataccaagggacatccaatggcagagagaaaatcatcctcatctagaactggatcaaaagagctcttatggtcctcagaacacagatctcaaccagaactgagtggtggaaaaagcgccctcaactctgagtcggcttcagaattggaattagtggctccgactcaggctcgactgaccaaagaacatcgctggggaagcgcattactttctagaaaccactccttagaagaagagtttgaaagggcaaaagcagcagtggagtcagatacagagttttgggataagatgcaagcagaatgggaagaaatggctcggaggaactggatatctgagaaccaagaagcccagaaccaagtaaccatctcggctagtgagaagggatattactttcacactgaaaaccccttcaaggactggcctggagcatttgaagaaggcttaaaaaggctgaaggaaggggatctgccagtcaccatcctgttcatggaagcagcaattcttcaggaccctggagatgcagaggcatggcagttcctcgggataacccaggcggagaatgaaaatgaacaagcagctattgtcgccctccagaggtgcttagaattacagcccaacaacttaaaagctttgatggccttggctgtgagttatactaacactggccatcagcaggatgcctgtgacgctctgaagaattggattaagcaaaatccaaagtacaaataccttgtgaaaagcaagaagggatctccaggcctcacccggcggatgtctaagtccccagttgatagctctgttctggaaggggtgaaggaattatatctggaagctgcccaccaaaatggagatatgatcgacccagacctgcagacaggtctaggggttctgttccacctgagtggagaatttaatagagcaatagatgcatttaacgctgccttaactgttcggccagaggactattcactatggaaccgcctcggggcgaccttggcgaacggagaccgcagcgaggaagccgtggaggcctatacgcgagcactggagattcagccaggattcatccggtccagatacaacctaggaataagctgcatcaacctgggcgcctacagagaagcggtcagcaattttctcactgccctcagtttgcaaagaaagagcaggaatcagcagcaagttcctcatcctgcaatctctgggaatatctgggctgccctcagaattgcgctctctctgatggaccaaccagaactcttccaggcggctaatcttggtgacctggatgtcctcttaagagctttcaacttggatccttgaagaaagaataataccagtactaataatccctgatctgtgtgattgtactgaaaaatcaaaaactattttattatgaatttcaaaaggataaatcaaatattcaaaaggccatggtcatatagcccaaggaaattaattcctgtggacaatgcccagtctctgttcagatccaaaagcacaaaatgttgtatatagagtcaaagtcaggctcaaaagaagaattaagagactcaagacaaaccaagataaagtaactgtgtgttgaatactctttccacaagttgcaagcatattgcaacacatgttctttgggttttttgtctcccccttgcagctgatgacacatctgaggaacttgttcatgggaaacatggaaaaagcactgcctcagattgggaaattctgactgtttctgaactgtcttcttttgcaagactgaacatagtttgggccattggtgcatgcacatatattaacttgtgactaaagacagacattgcttaaacctgttccaattttaacttttactgtagccctttgattccagagagggagctttgctggcaaaagcagtttttgcactagaaatttttgctgttcccaatctaaacttttctggtattgtatatatgcactttaatatcttatttatgccttgctggagttttgttttgttgctccaatttttaacttgggggtgaaagatttaagaactcagcctcactagatcaacggaccaaataaacaattcctgaagacagtttttcatagtgtaggattttgaagaagtgtttttcttaaagcagatacgatgacataaggcgtaaatatggcaaacagatcttttcattcacgtgctttctgggtctgtatgaacataagtaagacacaaggtactgtctcttcatgcattctctgcaggaagaaagtttgatggtatcgtgatttctattgagttcaaattaacttgcttaagtgtcatactttactggctttgccctgcacaccaatattccttttaaaccataaatattttaaataatatttcttaagagtgataaataacattttttcctaaaaattatgttttcttagtttcataataatctgcactgttcatccccttgcattctaagtgatagaagagcaacactttcaaaccaaatctcactgaatgccagtgatttcatatgaaagatgcatgcctctttggctctttgaacatttagcaagtattgggaattttctattagcagtggtgttttaattggttgaattccacttagttctccacagtgttttgtatgtgtttggggcttggtgattattttgaaagatacattttttaaagaattaggaacattttttgcaaaatgctaatcagaatataattttcccaatgtcaggtatagaagttatcccattcttctttacctggtctccttccttcgtctagaaccttccccacagtagctaatcctaacaactttttatttatgttctttgataataatagctcatcccgctcatgattatagctacccacaaaaaataaaacaacaacaac

SEQ ID NO: 325259 - DNA, 3786 bp, Homo sapiens
acctggcaggaagcgagaaagagttcggcgaagaaggagtgagttctagagacgccccgcgagcaggacccgcgcctgcaggagagcctggccgacccgctcctcgccttctctgcgcgctctcccgcgtccgctttcagcaccccgagcggagaacagttcccggcagcccgcagcgctgccgagtggccgccggccggccgagtacccggagctccagggggctcaggagcaccctctgagaacccgctgtgcacccaccttttcccctcttttggtgggcaagtaagcacgggggaaaagcatccggtggcctcagggagccctgaagaaaccgaagcagaatgtaccagggacacatgcaggtagtaggtgtaaccttgaagaaaaagtggcactgtcttcaaaaaagtgacctgaccctggctttgggaaaaggctctagggcggcagataaggctgttgccatggtgatgaaggagataccgagggaggagtctgctgaagaaaagcccctccttactatgacatcacagctggtgaatgagcaacaagaaagcagacccctcctgagtccctccatcgatgactttctctgtgaaaccaaatcggaagcaatagcaaggccagtaacatccaatacagctgtattgaccactggcttagatctcctcgacctgagtgaaccagtctctcaaacccaaaccaaagccaagaagtcagagccctcatcaaaaacctcatccctcaagaaaaaggccgatggatctgacctcatcagcacggatgctgagcagagaggccagcctctcagagtcccggagacttcatccttagatctagacattcaaacacaactggaaaaatgggacgatgttaagtttcatggagatcgaaataccaagggacatccaatggcagagagaaaatcatcctcatctagaactggatcaaaagagctcttatggtcctcagaacacagatctcaaccagaactgagtggtggaaaaagcgccctcaactctgagtcggcttcagaattggaattagtggctccgactcaggctcgactgaccaaagaacatcgctggggaagcgcattactttctagaaaccactccttagaagaagagtttgaaagggcaaaagcagcagtggagtcagatacagagttttgggataagatgcaagcagaatgggaagaaatggctcggaggaactggatatctgagaaccaagaagcccagaaccaagtaaccatctcggctagtgagaagggatattactttcacactgaaaaccccttcaaggactggcctggagcatttgaagaaggcttaaaaaggctgaaggaaggggatctgccagtcaccatcctgttcatggaagcagcaattcttcaggaccctggagatgcagaggcatggcagttcctcgggataacccaggcggagaatgaaaatgaacaagcagctattgtcgccctccagaggtgcttagaattacagcccaacaacttaaaagctttgatggccttggctgtgagttatactaacactggccatcagcaggatgcctgtgacgctctgaagaattggattaagcaaaatccaaagtacaaataccttgtgaaaagcaagaagggatctccaggcctcacccggcggatgtctaagtccccagttgatagctctgttctggaaggggtgaaggaattatatctggaagctgcccaccaaaatggagatatgatcgacccagacctgcagacaggtctaggggttctgttccacctgagtggagaatttaatagagcaatagatgcatttaacgctgccttaactgttcggccagaggactattcactatggaaccgcctcggggcgaccttggcgaacggagaccgcagcgaggaagccgtggaggcctatacgcgagcactggagattcagccaggattcatccggtccagatacaacctaggaataagctgcatcaacctgggcgcctacagagaagcggtcagcaattttctcactgccctcagtttgcaaagaaagagcaggaatcagcagcaagttcctcatcctgcaatctctgggaatatctgggctgccctcagaattgcgctctctctgatggaccaaccagaactcttccaggcggctaatcttggtgacctggatgtcctcttaagagctttcaacttggatccttgaagaaagaataataccagtactaataatccctgatctgtgtgattgtactgaaaaatcaaaaactattttattatgaatttcaaaaggataaatcaaatattcaaaaggccatggtcatatagcccaaggaaattaattcctgtggacaatgcccagtctctgttcagatccaaaagcacaaaatgttgtatatagagtcaaagtcaggctcaaaagaagaattaagagactcaagacaaaccaagataaagtaactgtgtgttgaatactctttccacaagttgcaagcatattgcaacacatgttctttgggttttttgtctcccccttgcagctgatgacacatctgaggaacttgttcatgggaaacatggaaaaagcactgcctcagattgggaaattctgactgtttctgaactgtcttcttttgcaagactgaacatagtttgggccattggtgcatgcacatatattaacttgtgactaaagacagacattgcttaaacctgttccaattttaacttttactgtagccctttgattccagagagggagctttgctggcaaaagcagtttttgcactagaaatttttgctgttcccaatctaaacttttctggtattgtatatatgcactttaatatcttatttatgccttgctggagttttgttttgttgctccaatttttaacttgggggtgaaagatttaagaactcagcctcactagatcaacggaccaaataaacaattcctgaagacagtttttcatagtgtaggattttgaagaagtgtttttcttaaagcagatacgatgacataaggcgtaaatatggcaaacagatcttttcattcacgtgctttctgggtctgtatgaacataagtaagacacaaggtactgtctcttcatgcattctctgcaggaagaaagtttgatggtatcgtgatttctattgagttcaaattaacttgcttaagtgtcatactttactggctttgccctgcacaccaatattccttttaaaccataaatattttaaataatatttcttaagagtgataaataacattttttcctaaaaattatgttttcttagtttcataataatctgcactgttcatccccttgcattctaagtgatagaagagcaacactttcaaaccaaatctcactgaatgccagtgatttcatatgaaagatgcatgcctctttggctctttgaacatttagcaagtattgggaattttctattagcagtggtgttttaattggttgaattccacttagttctccacagtgttttgtatgtgtttggggcttggtgattattttgaaagatacattttttaaagaattaggaacattttttgcaaaatgctaatcagaatataattttcccaatgtcaggtatagaagttatcccattcttctttacctggtctccttccttcgtctagaaccttccccacagtagctaatcctaacaactttttatttatgttctttgataataatagctcatcccgctcatgattatagctacccacaaaaaataaaacaacaacaac

SEQ ID NO: 325260 - DNA, 3687 bp, Homo sapiens
acctggcaggaagcgagaaagagttcggcgaagaaggagtgagttctagagacgccccgcgagcaggacccgcgcctgcaggagagcctggccgacccgctcctcgccttctctgcgcgctctcccgcgtccgctttcagcaccccgagcggagaacagttcccggcagcccgcagcgctgccgagtggccgccggccggccgagtacccggagctccagggggctcaggagcaccctctgagaacccgctgtgcacccaccttttcccctcttttggtgggcaagtaagcacgggggaaaagcatccggtggcctcagggagccctgaagaaaccgaagcagaatgtaccagggacacatgcagaaaagtaaagaacaaggatatggaaaactaagcagtgatgaagacctcgaaataattgttgatcaaaagcagctggtgaatgagcaacaagaaagcagacccctcctgagtccctccatcgatgactttctctgtgaaaccaaatcggaagcaatagcaaggccagtaacatccaatacagctgtattgaccactggcttagatctcctcgacctgagtgaaccagtctctcaaacccaaaccaaagccaagaagtcagagccctcatcaaaaacctcatccctcaagaaaaaggccgatggatctgacctcatcagcacggatgctgagcagagaggccagcctctcagagtcccggagacttcatccttagatctagacattcaaacacaactggaaaaatgggacgatgttaagtttcatggagatcgaaataccaagggacatccaatggcagagagaaaatcatcctcatctagaactggatcaaaagagctcttatggtcctcagaacacagatctcaaccagaactgagtggtggaaaaagcgccctcaactctgagtcggcttcagaattggaattagtggctccgactcaggctcgactgaccaaagaacatcgctggggaagcgcattactttctagaaaccactccttagaagaagagtttgaaagggcaaaagcagcagtggagtcagatacagagttttgggataagatgcaagcagaatgggaagaaatggctcggaggaactggatatctgagaaccaagaagcccagaaccaagtaaccatctcggctagtgagaagggatattactttcacactgaaaaccccttcaaggactggcctggagcatttgaagaaggcttaaaaaggctgaaggaaggggatctgccagtcaccatcctgttcatggaagcagcaattcttcaggaccctggagatgcagaggcatggcagttcctcgggataacccaggcggagaatgaaaatgaacaagcagctattgtcgccctccagaggtgcttagaattacagcccaacaacttaaaagctttgatggccttggctgtgagttatactaacactggccatcagcaggatgcctgtgacgctctgaagaattggattaagcaaaatccaaagtacaaataccttgtgaaaagcaagaagggatctccaggcctcacccggcggatgtctaagtccccagttgatagctctgttctggaaggggtgaaggaattatatctggaagctgcccaccaaaatggagatatgatcgacccagacctgcagacaggtctaggggttctgttccacctgagtggagaatttaatagagcaatagatgcatttaacgctgccttaactgttcggccagaggactattcactatggaaccgcctcggggcgaccttggcgaacggagaccgcagcgaggaagccgtggaggcctatacgcgagcactggagattcagccaggattcatccggtccagatacaacctaggaataagctgcatcaacctgggcgcctacagagaagcggtcagcaattttctcactgccctcagtttgcaaagaaagagcaggaatcagcagcaagttcctcatcctgcaatctctgggaatatctgggctgccctcagaattgcgctctctctgatggaccaaccagaactcttccaggcggctaatcttggtgacctggatgtcctcttaagagctttcaacttggatccttgaagaaagaataataccagtactaataatccctgatctgtgtgattgtactgaaaaatcaaaaactattttattatgaatttcaaaaggataaatcaaatattcaaaaggccatggtcatatagcccaaggaaattaattcctgtggacaatgcccagtctctgttcagatccaaaagcacaaaatgttgtatatagagtcaaagtcaggctcaaaagaagaattaagagactcaagacaaaccaagataaagtaactgtgtgttgaatactctttccacaagttgcaagcatattgcaacacatgttctttgggttttttgtctcccccttgcagctgatgacacatctgaggaacttgttcatgggaaacatggaaaaagcactgcctcagattgggaaattctgactgtttctgaactgtcttcttttgcaagactgaacatagtttgggccattggtgcatgcacatatattaacttgtgactaaagacagacattgcttaaacctgttccaattttaacttttactgtagccctttgattccagagagggagctttgctggcaaaagcagtttttgcactagaaatttttgctgttcccaatctaaacttttctggtattgtatatatgcactttaatatcttatttatgccttgctggagttttgttttgttgctccaatttttaacttgggggtgaaagatttaagaactcagcctcactagatcaacggaccaaataaacaattcctgaagacagtttttcatagtgtaggattttgaagaagtgtttttcttaaagcagatacgatgacataaggcgtaaatatggcaaacagatcttttcattcacgtgctttctgggtctgtatgaacataagtaagacacaaggtactgtctcttcatgcattctctgcaggaagaaagtttgatggtatcgtgatttctattgagttcaaattaacttgcttaagtgtcatactttactggctttgccctgcacaccaatattccttttaaaccataaatattttaaataatatttcttaagagtgataaataacattttttcctaaaaattatgttttcttagtttcataataatctgcactgttcatccccttgcattctaagtgatagaagagcaacactttcaaaccaaatctcactgaatgccagtgatttcatatgaaagatgcatgcctctttggctctttgaacatttagcaagtattgggaattttctattagcagtggtgttttaattggttgaattccacttagttctccacagtgttttgtatgtgtttggggcttggtgattattttgaaagatacattttttaaagaattaggaacattttttgcaaaatgctaatcagaatataattttcccaatgtcaggtatagaagttatcccattcttctttacctggtctccttccttcgtctagaaccttccccacagtagctaatcctaacaactttttatttatgttctttgataataatagctcatcccgctcatgattatagctacccacaaaaaataaaacaacaacaac

SEQ ID NO: 325261 - DNA, 282 bp, Homo sapiens
tgcactccagcccgggcaacagggtgagaccctgtctcaaaaaaaagaatagcccagaagttcttactactaaaaatttaatctttatattgccaaaattaaaaatgaatacacatacgaaaaattaagtttcatgtaggactaaatttgggtatgtgcagaaaaactgtaaagaaaactagtgaaatgtttgcttcataaaatatctttaaagaaataaaattctagactcacacttgtaaccccagagttttgggaagctgaggtgggaaaatcacttaa

SEQ ID NO: 325262 - DNA, 397 bp, Homo sapiens
caagaaactgaaaagacaacccacagaatggcagaaaatatttgtaaatcatgtatccgataagggacttgtatcccaaacataaagaactcttacaactcagcaataaaaagacaaataatccaattcaaaaatgggcaaaggatgttaatagacatttctccaaaggaaatatacaaatgatcaactggcacatgaaatgatgctcactaccattgttcattagggaaatgtagatcaaaaccacaatgcaatacttcttcacatccactaggatggctaaaatcaaaaaaaagaaaataagttttggatgtagacagaacagaaaccctcatacattgcaggtaagaatataaaatggggcagctactgtggaaaacagtttggaagttgctca

SEQ ID NO: 325263 - DNA, 96 bp, Homo sapiens
tgaccactttccttgtgaaacttaagttccaatgggagaatgacagtaaacagacaactattataataagtgcatggaagattttggtgtatgtta

SEQ ID NO: 325264 - DNA, 1333 bp, Homo sapiens
tgttaataagagattctaactattgcttttaccttcagtgtgaactagtgtggtaacaactttgaaaaggcaggccgggtgcggtggctcacgcctgtaatcccagcactttgggaggccaaggcgggtggatcacttgaggtcagaagtttgagaccagcctggccaacatggcgaaaccccatctctactaaaaatacaaaaaactagccgggtatggtggcacatgcctgtgatcccggctacccaggaggctgaggcaggagaatcgcttgaacctgggaggcggaggttgcagtgagccgagattgcgccactgcactccagcctgggcaacagagtgaaactctgtctcaaaaaaaaaaattgaaaaggcaaatgtgattgaatatctgaaaagctttaaaagtggcctttctgttacgtctgtggcacaaatggctcatgagcgcaggacacttatggtcttgtgtcctatacttcatgtgtgatgccaccagaaatgttatggattccgtattgaacacactgagagtggtatgagccctcaggactgcaccacagagtaaacacaaccttgatatggtggcgaatatgtgtgtctttcttgtttcatttgtggttggggacaaaatcgatgtatttgtctaaatagtcgatattcatcttaacatggttggttgtgtaatcaccagctatattgtgaactgtgcaataaaacagaagcgtttgtgtatataattacctttggatacctgaaattcccaagcttggttacaatgtaatgctcagtataaggctgtgcaaacatgtaagggaataatggtggtcgatgggatatatgaaatgggatctagagggcttcgagtgaagccaatcatgttgaacgaacactggttcagtgtagatgaagtagagtgaggcgtatgcagtcataaaatgaagggtggacaggagattacatttgaagaaaggataagcactcagacttggtctcttttaaattaaaatatttcttttctcatgtgcaaatgtatatcaaagacttgaacaggtattctcttgaaatttgaggatttttagtttttaatgctgtctttgcttaatattaaatatgtgttgcctattggctcccaaattgtgtgggagtctctaaatgtttcctcttgaaggttcattattgaaagtggttaagtgcacaatgctatttttgtttgatagtttgagttttatgaccctatgagtttaaatgaaatctgttaaatgtttcagagttaacactttttttttgataatttggaataaagtttgttttttaagcccaaaaaaaatg

SEQ ID NO: 325265 - DNA, 1295 bp, Homo sapiens
  misc_feature (1250)..(1250): n is a, c, g, or t
  misc_feature (1258)..(1258): n is a, c, g, or t
  misc_feature (1260)..(1261): n is a, c, g, or t
  misc_feature (1273)..(1273): n is a, c, g, or t
  misc_feature (1275)..(1275): n is a, c, g, or t
  misc_feature (1281)..(1281): n is a, c, g, or t
  misc_feature (1283)..(1283): n is a, c, g, or t
tgttaataagagattctaactattgcttttaccttcagtgtgaactagtgtggtaacaactttgaaaaggcaggccgggtgcggtggctcacgcctgtaatcccagcactttgggaggccaaggcgggtggatcacttgaggtcagaagtttgagaccagcctggccaacatggcgaaaccccatctctactaaaaatacaaaaaactagccgggtatggtggcacatgcctgtgatcccggctacccaggaggctgaggcaggagaatcgcttgaacctgggaggcggaggttgcagtgagccgagattgcgccactgcactccagcctgggcaacagagtgaaactctgtctcaaaaaaaaaaattgaaaaggcaaatgtgattgaatatctgaaaagctttaaaagtggcctttctgttacgtctgtggcacaaatggctcatgagcgcaggacacttatggtcttgtgtcctatacttcatgtgtgatgccaccagaaatgttatggattccgtattgaacacactgagagtggtatgagccctcaggactgcaccacagagtaaacacaaccttgatatggtggcgaatatgtgtgtctttcttgtttcatttgtggttggggacaaaatcgatgtatttgtctaaatagtcgatattcatcttaacatggttggttgtgtaatcaccagctatattgtgaactgtgcaataaaacagaagcgtttgtgtatataattacctttggatacctgaaattcccaagcttggttacaatgtaatgctcagtataaggctgtgcaaacatgtaagggaataatggtggtcgatgggatatatgaaatgggatctagagggcttcgagtgaagccaatcatgttgaacgaacactggttcagtgtagatgaagtagagtgaggcgtatgcagtcataaaatgaagggtggacaggagattacatttgaagaaaggataagcactcagacttggtctcttttaaattaaaatatttcttttctcatgtgcaaatgtatatcaaagacttgaacaggtattctcttgaaatttgaggatttttagtttttaatgctgtctttgcttaatattaaatatgtgttgcctattggctcccaaattgtgtgggagtctctaaatgtttcctcttgaaggttcattattgaaagtggttaagtgcacaatgctatttttgtttgatagtttgagttttatgaccctatgagttaagnaccgtaantnnaagtaccttttngnatgganangtggtctcgccc

SEQ ID NO: 325266 - DNA, 554 bp, Homo sapiens
aaaaaagagagagggtcttgctctgtttcccaggctggaggacagtggtataatcctacctcattatagcctccaactccagggctcagtcgatcctcctgcctcagctacttgggaagctgaagtgggaggatcacctgagctctggaggtggaggctgccatgagccatgatcgtgccactacactccagcctgggtgacagagtgagatcctgtctcaaaaaaaaaaaaaaatcacccttaaatcaacaaaaagacctcatgctcatgcagtggacatttcttggcctgttttcctgtgggttttcttcagcatgatatgaagcaactgttggcatagccagtgggataaataagaaatggaatcatttggctgcctcgtcacttgtgctaatggtcagttgtacacacatgacatgtggaagtgacctgtagcagcggtcactcattttaacaattgaactctgctgggttgggtatttacctttgtctagaaaagaaatatgatatattttctctaaataaatttattttcatcattccatatggcatt

SEQ ID NO: 325267 - DNA, 1537 bp, Homo sapiens
atgatttatctgggttacacattctgtggctggattgtcttaggaccataccatgacaagtttgaaaatctgaacacagttgctgagtgtctgttttctctggtcaacggtgatgacatgtttgcaacctttgcccaaatccagcagaagagcatcttggtgtggctgttcagtcgtctgtatttatattccttcatcagcctttttatatatatgattctcagtctttttattgcacttattacagattcttatgacaccattaagaaattccaacagaatgggtttcctgaaacggatttgcaggaattcctgaaggaatgcagtagcaaagaagagtatcagaaagagtcctcagccttcctgtcctgcatctgctgtcggaggaggaaaagaagtgatgatcacttgatacctattagctaaagttctgctaaagatgattaaagttcaggcatccttatccagcggctgagcagaggaaccccaaatgacttggacaagcagttccaaaatgactctcttatttaattgtggagtgggaaagaggactcacagttagccagctgaccatgactgaagttccagctttactttttataaacttgaatgataaagaatagaccatgggctactactgggcattagtgcaatataacagcgataataaaattctctattagtctgttaatttatgacatgatctcggaatggaaaaagatcatttcagagtgtgcgaaataatagtctttaaccatgtaattaaatatgtgtgtttattgtcaaataaggatttgttttaaaggtgattcttgggtttgaagacatttgttaattcatggtctgtacagaaatgaagctggttgcaataccaatctagagagtccaagctggcgaactattaagctgtttaaagatcacccttggcctggcacagtggttcacacctgtaatcccagcactttgggaggcctaggcaggcagactgagctcaggagcttgagaccagcctgggcaacatggcaaaaacccacctctacaaaaagtacaaaaattagtcgggcgtgatggcaggcatctgtagtcccagctacttgggaagctgaagtgggaggatcacctgagctctggaggtggaggctgccatgagccatgatcgtgccactacactccagcctgggtgacagagtgagatcctgtctcaaaaaaaaaaaaaaatcacccttaaatcaacaaaaagacctcatgctcatgcagtggacatttcttggcctgttttcctgtgggttttcttcagcatgatatgaagcaactgttggcatagccagtgggataaataagaaatggaatcatttggctgcctcgtcacttgtgctaatggtcagttgtacacacatgacatgtggaagtgacctgtagcagcggtcactcattttaacaattgaactctgctgggttgggtatttacctttgtctagaaaagaaatatgatatattttctctaaataaatttattttcatcattccatatggcatt

SEQ ID NO: 325268 - DNA, 381 bp, Homo sapiens
tttgccaggaatcaccattaccaggatggtgtttccacatttatctgactttcttagaagcttccaattgctgtgtatgctttgtgagagaattctgtgcagctgttccccgatgctactggggataattaatcagtgaattagtgacacatttcaggtactgtcatgttctctaaggaatccaggcaataagaattgaggcatggtacctcctttctaggagttgacagtctaattgagaagctgaaatttatacacataagagatataagcaatgattcaaggcagatggaaataagtcatttataagtagagtaggtagtaagttgagaggaggtagagattgtccatgttggtgaaattgatcagggaaggcttcca

SEQ ID NO: 325269 - DNA, 545 bp, Homo sapiens
cacttagtaaattaatgaaagcctattgtgaacagggttaggcaatgaggttgatcagattctagacttcatgtgcaaccaatcaatgaaatagacacacctgtaaagttgaagatggaggctaaagatacaattaatgtgttccaaggacaggaggttttgactaaaaatggagcctgctactttattacagaactctgttcttacggaccaagaatgcattttcaattagaaaactgcgatttggttccatcacaccctgactactacagtatagttttctctatcattttcctcttccccattactttattatatgtatatattagttacaatgtaactatgtaaacaattaaatgtgtaactgcaagatctctaggagtaacagaattctacatcttcatatagtctttatggcatattgtatatgccatagttataatgcataaaagcgttttgcatttttttaaccaaatggtcaattttttttttttttttttttgagacggggtgttgctcttgttgcccaggctggagtgcagtgg

SEQ ID NO: 325270 - DNA, 336 bp, Homo sapiens
aaacttacgcacatatgaaaagtaagatcagacaactcagaagaaaaacgataatccactaaaaactatgtcaacattttcatttagtgctctggctgtaacataggattaaaaatttgaggattgtggttcagtagttaaagcagtaagctttgccaatagtgaggcatcttgagtatttgttgcggaaataaataaatgcctgctaacaatgtgtatatagggatgcaaaataaattctattggtcagtaatttctgaagtctttactccactagtcagtaagtgattttcagtagtgcatctggaaagcttgagtcatacagggaaaaaaaaa

SEQ ID NO: 325271 - DNA, 146 bp, Homo sapiens
cccctgtgtcctcagctcatcacagcatctcggcacctctgccctggggagccagaaagccttcattgcattagtctgttgcatcaggcattacagcaagacagccacctccttaagtcaggctggctcgggggccccagggcctg

SEQ ID NO: 325272 - DNA, 4646 bp, Homo sapiens
tttttattattgctgttattgaggttgagggagaagagatcggtctaaattctggctgggtaagtggggggattctcggcgatgagaaacgggggacttagaagccggaggaaaatcagcagccccacatctccacttctccagtccgccctactctccacccgtgacctccagtggagaccccaggcggcagcatcagtatttgatcggcccttcgtcagcacgctgccagccctggccggctgggttcgccaggcatcacccgctcggctctgaagcggacgcctggccctgcaccgggctttggaaggaccctctctgcgctcgccccctccccagggtggctccgctttcgagcccgggcgcggcgcccaccatgcgcggctgcctgcggctcgcgctgctctgcgcgctgccctggctcctgctggcggcgtcgcccgggcacccggcgaaatcccccaggcagcccccggcaccgcgccgcgaccccttcgacgctgccaggggcgccgatttcgatcatgtctacagcggggtggtgaacctcagcaccgagaacatctactctttcaactacaccagccagcccgaccaggtgacagccgtgagggtgtatgtgaacagttcctctgagaatctcaactacccggtccttgttgtggttcgccagcagaaagaggtgctgtcctggcaggttcctctgctcttccaaggactataccagaggagctacaattatcaagaagtgagccgcaccttatgtccctcagaagcaaccaatgagacgggacccttgcagcaactgatatttgtagatgtcgcatccatggcacccctgggtgctcagtacaaactgctagttaccaagctgaagcacttccagctccggacaaatgttgcctttcactttactgccagcccctctcaacctcagtattttctatacaagtttcccaaagacgtggactcagttatcattaaagtggtgtctgaaatggcttatccatgttctgttgtctcagtccagaatatcatgtgcccggtgtatgatctcgaccacaatgtggaatttaatggtgtctatcagtccatgaccaagaaagctgccatcacgctacagaagaaggattttccaggcgagcagttcttcgtggtatttgtgataaagcctgaagattatgcctgtggaggatctttcttcatccaggaaaaggaaaaccagacctggaatctacagcgaaaaaagaaccttgaagtgaccattgtcccttccattaaagaatctgtttatgtgaaatccagtcttttcagtgtcttcatcttcctgtccttctacttgggatgccttcttgttgggtttgttcattatctgaggtttcagagaaaatccattgatggaagctttgggtccaatgatggctctggaaatatggtggcatctcatcccattgctgccagcacacccgaagggagcaattatgggacaatagatgagtcaagctccagtcctggaaggcagatgtcctcctccgatggtgggccaccgggccagtcagacacagacagctccgtggaggagagcgacttcgacaccatgccagacattgagagtgataaaaacatcatccggaccaagatgttcctttacctgtcagatttgtccaggaaggaccggagaattgtcagcaaaaaatataaaatttatttttggaacatcatcaccattgctgtgttttacgcgctgcccgtgatccagctggtcattacctatcagacagtggtaaatgtcactggcaaccaggacatctgttactacaacttcctctgtgctcaccccttgggcgtcctgagtgccttcaacaacattctcagcaatctgggccacgtgcttctgggcttcctcttcctgctgatagtcttgcgccgcgacatcctccatcggagagccctggaagccaaggacatctttgctgtggagtacgggattcccaaacactttggtctcttctacgctatgggcattgcattgatgatggaaggggtgctcagtgcttgctaccatgtctgccctaattattccaacttccgattcgacacctccttcatgtacatgatcgctggcctgtgcatgctgaagctctatcagacccgccacccagacatcaatgccagcgcctactctgcctatgcctcctttgctgtggtcatcatggtcaccgtccttggagtggtgtttggaaaaaatgacgtatggttctgggtcatcttctctgcaatccacgttctggcctcgctagccctcagcacccagatatattatatgggtcgtttcaagatagatttgggaattttccggcgggctgccatggtgttctacacagactgtatccagcagtgtagccgacctctatatatggatagaatggtgttgctggttgtggggaatctggttaactggtccttcgccctctttggattgatataccgccccagggactttgcttcctacatgctgggcatcttcatctgtaaccttttgctgtacctggccttttacatcatcatgaagctccgcagctctgaaaaggtcctcccagtcccgctcttctgcatcgtggccaccgctgtgatgtgggctgccgccctatattttttcttccagaatctcagcagctgggagggaactccggccgaatcccgggagaagaaccgcgagtgcattctgctggatttcttcgatgaccatgacatctggcacttcctctctgctactgctctgtttttctcattcttggttttgttaactttggatgatgaccttgatgtggttcggagagaccagatccctgtcttctgaacctccaacattaagagaggggagggagcgatcaatcttggtgctgtttcacaaaaattacagtgaccacagcaaagtaaccactgccagatgctccactcaccctctgtagagccaactctgcattcacacaggaaggagaggggctgcgggagatttaaacctgcaagaaaggaggcagaaggggagccatgttttgaggacagacgcaaacctgaggagctgagaaacacttgctccttccatctgcagctttgggagtgcaacagggataggcactgcatccaagtcaactcaccatcttggggtccctcccaccctcacggagacttgccagcaatggcagaatgctgctgcacacttccctccagttgtcaccctgcccagaaaggccagcagcttggacttcctgcccagaaactgtgttggcccccttcacacctctgcaacacctgctgctccagcaagaggatgtgattctttagaatatggcggggaggtgaccccaggccctgccctactgggatagatgttttaatggcaccagctagtcacctcccagaagaaactctgtatatttcccccaggtttctgatgccatcagaagggctcaggagtggggtttgtcacacattcctcttaacaagtaactgtcactgggaccgagtcctgggtgcttacatattccttcgtgtcttcatctcactgacctgtgtggacctcatcactctgactctgccttcttggaaaggccctgtcactccacagatgtctggccagcttcaaggcagaaggaaaaacaggaaaagctcttttaacagcagcaggaacaagagaaatgactaaccatactaaaagactggtaacagcagcagcagccagacaggcctcaccttaaggacttgggctgccagagcaaattcagcagagcttatttggcctcccattcacacagctcagttctgtgcccacatcacctttggggaagaaatcagcattctaatcagggacactacttcaggagtcctccacagcgagtccgtcatctgtcactttatgtagatcagggttctagacttcttccctgaggttctcagaagcagctctcaggatgaacgtattgtcctcttcccctcttcttgcaaagtgcacagctaatctaatgttgtctctcggttgcacctgacattctctccccagtaaggtgttggcaagctcagcatctgggttccactctcacactgtctggcagctctgtgtctgagaagttctacattgaccaggcccccttgttgcctggagtatgacgtaatcagaaaatagacgtataaatgtgcacatgcgtatgtatttgcttgtgaaattaaagtcacctcttgcctctgctttcctgatcattcgttagagaaatggatcaggcatttttttaaattattattctttctctaaactatttgcattgtgttcaaaaacccattttagaagtttgaacagcaagcttttcctgattttaaaaacacaaagttgctttcaatgaaatattttgtgatttttttaaagtccccaaatgtgtacttagccttctgttattccttattctttaagcagtgttggcttccattgaccatatgaaggccaccaattaaatggttgtgttaatccaacatgtaaaaaactttttggcagggcacagtggctcacgcctgtaatcccaaagtgctggaatttacaggtaggaccaccacacttggtccacttacttataataaacattgatttggtcgtt

SEQ ID NO: 325273 - DNA, 476 bp, Homo sapiens
ctgtatgttctcactatattccagccagcaacaagtttcttgatcaaaagggcaagggggaggatgagtctagtgctaattcttgcctatgggaaggtggttaaaattattgaggaacaggcttatctgcttttcaatatggaattttcgtatgtcacattgaccacacagaaagaagtgaatcttatcacatgttatatctcacttacccttaatttaaagggggcaggatgcttcttaaacaggaaacaaactaaagtatagcaaagtttagttgagaaataaatgactatttcttttaccctagaaaaaggaatagcaacattgcattggctgttttgtcttatttactgctatattcttaatgcctggcacagagccctgcgcagatttagtttctcaatatgtatgagatgaagagctgactgaattcattaatggagattcacggagatttacgtataaattttgtgcct

SEQ ID NO: 325274 - DNA, 386 bp, Homo sapiens
accttgggccacttcagagtatttgtatttttgttgactaagccttctcaccatgcatttgtattatcagcagatttgggaattttccggcgggctgccatggtgttctacacagactgtatccagcagtgtagccgacctctatatatggatagaatggtgttgctggttgtggggaatctggttaactggtccttgtaagtagtcttatgaaaacatgtttttgcctttattaatgtcagtaacactgtggtttagctttccttgactgtcatttttacaaagaaatctgaaattaaggagaaggtaggactgcttgttctagagactcaaaaaaaggtagtaggacattctcgtgtagcaattgtagcctctcttaaaacact

SEQ ID NO: 325275 - DNA, 3523 bp, Homo sapiens
gttcatattttaacatatgaaacatgaaatagaagtataatattatttttgtatccaaatagttaacagagcagatgcccttagattctaatatgtgttcagtcctgaagatagccaagttaaatataaaaacaggagaagaggaaaaataaaagtccattgagaaggaatagagagaaagaacaggtcttgtgaatgagaagttcatttggatcaacacagcatttcctagaatgagtctgcactgtgctttttgcagagacgaatgggctccgtaggctctccacggcttttgatggcagatgagttgtctctgtttcagatgagtcaagctccagtcctggaaggcagatgtcctcctccgatggtgggccaccgggccagtcagacacagacagctccgtggaggagagcgacttcgacaccatgccagacattgagagtgataaaaacatcatccggaccaagatgttcctttacctgtcagatttgtccaggaaggaccggagaattgtcagcaaaaaatataaaatttatttttggaacatcatcaccattgctgtgttttacgcgctgcccgtgatccagctggtcattacctatcagacagtggtaaatgtcactggcaaccaggacatctgttactacaacttcctctgtgctcaccccttgggcgtcctgagtgccttcaacaacattctcagcaatctgggccacgtgcttctgggcttcctcttcctgctgatagtcttgcgccgcgacatcctccatcggagagccctggaagccaaggacatctttgctgtggagtacgggattcccaaacactttggtctcttctacgctatgggcattgcattgatgatggaaggggtgctcagtgcttgctaccatgtctgccctaattattccaacttccgattcgacacctccttcatgtacatgatcgctggcctgtgcatgctgaagctctatcagacccgccacccagacatcaatgccagcgcctactctgcctatgcctcctttgctgtggtcatcatggtcaccgtccttggagtggtgtttggaaaaaatgacgtatggttctgggtcatcttctctgcaatccacgttctggcctcgctagccctcagcacccagatatattatatgggtcgtttcaagatagatttgggaattttccggcgggctgccatggtgttctacacagactgtatccagcagtgtagccgacctctatatatggatagaatggtgttgctggttgtggggaatctggttaactggtccttcgccctctttggattgatataccgccccagggactttgcttcctacatgctgggcatcttcatctgtaaccttttgctgtacctggccttttacatcatcatgaagctccgcagctctgaaaaggtcctcccagtcccgctcttctgcatcgtggccaccgctgtgatgtgggctgccgccctatattttttcttccagaatctcagcagctgggagggaactccggccgaatcccgggagaagaaccgcgagtgcattctgctggatttcttcgatgaccatgacatctggcacttcctctctgctactgctctgtttttctcattcttggttttgttaactttggatgatgaccttgatgtggttcggagagaccagatccctgtcttctgaacctccaacattaagagaggggagggagcgatcaatcttggtgctgtttcacaaaaattacagtgaccacagcaaagtaaccactgccagatgctccactcaccctctgtagagccaactctgcattcacacaggaaggagaggggctgcgggagatttaaacctgcaagaaaggaggcagaaggggagccatgttttgaggacagacgcaaacctgaggagctgagaaacacttgctccttccatctgcagctttgggagtgcaacagggataggcactgcatccaagtcaactcaccatcttggggtccctcccaccctcacggagacttgccagcaatggcagaatgctgctgcacacttccctccagttgtcaccctgcccagaaaggccagcagcttggacttcctgcccagaaactgtgttggcccccttcacacctctgcaacacctgctgctccagcaagaggatgtgattctttagaatatggcggggaggtgaccccaggccctgccctactgggatagatgttttaatggcaccagctagtcacctcccagaagaaactctgtatatttcccccaggtttctgatgccatcagaagggctcaggagtggggtttgtcacacattcctcttaacaagtaactgtcactgggaccgagtcctgggtgcttacatattccttcgtgtcttcatctcactgacctgtgtggacctcatcactctgactctgccttcttggaaaggccctgtcactccacagatgtctggccagcttcaaggcagaaggaaaaacaggaaaagctcttttaacagcagcaggaacaagagaaatgactaaccatactaaaagactggtaacagcagcagcagccagacaggcctcaccttaaggacttgggctgccagagcaaattcagcagagcttatttggcctcccattcacacagctcagttctgtgcccacatcacctttggggaagaaatcagcattctaatcagggacactacttcaggagtcctccacagcgagtccgtcatctgtcactttatgtagatcagggttctagacttcttccctgaggttctcagaagcagctctcaggatgaacgtattgtcctcttcccctcttcttgcaaagtgcacagctaatctaatgttgtctctcggttgcacctgacattctctccccagtaaggtgttggcaagctcagcatctgggttccactctcacactgtctggcagctctgtgtctgagaagttctacattgaccaggcccccttgttgcctggagtatgacgtaatcagaaaatagacgtataaatgtgcacatgcgtatgtatttgcttgtgaaattaaagtcacctcttgcctctgctttcctgatcattcgttagagaaatggatcaggcatttttttaaattattattctttctctaaactatttgcattgtgttcaaaaacccattttagaagtttgaacagcaagcttttcctgattttaaaaacacaaagttgctttcaatgaaatattttgtgatttttttaaagtccccaaatgtgtacttagccttctgttattccttattctttaagcagtgttggcttccattgaccatatgaaggccaccaattaaatggttgtgttaatccaacatgtaaaaaactttttggcagggcacagtggctcacgcctgtaatcccaacactttgggaggctgaggcaggaggatcacttgagcccaggagattgacgccgcagtgaactatgattgtgcccctgcactccagcctggatgacagagtgagaccccatctcttaaaa

SEQ ID NO: 325276 - DNA, 316 bp, Homo sapiens
tcctctttctttctgcccctacccccagggactttctcccttctacctctttcttaccgcctatcataaggttgttatgtcttatgcagaagaaggattttccaggcgagcagttcttcgtggtatttgtgataaagcctgaagattatgcctgtggaggatctttcttcatccagggtaagagctagtgaggaacacttggctgcttagcaaaacctgaaggaagggagtgaaagggaagctgaaacctcctttctagttcccactaaacaagggttggttccatcatcatgatgggaaaggcatctgagagata

SEQ ID NO: 325277 - DNA, 468 bp, Homo sapiens
tctcagagagaaaacaggacttagtgtgacagtgactgtccattcctttcatttctctgtccctctcacttcaggttttgttaactttggatgatgaccttgatgtggttcggagagaccagatccctgtcttctgaacctccaacattaagagaggggagggagcgatcaatcttggtgctgtttcacaaaaattacagtgaccacagcaaagtaaccactgccagatgctccactcaccctctgtagagccaactctgcattcacacaggaaggagaggggctgcgggagatttaaacctgcaagaaaggaggcagaaggggagccatgttttgaggacagacgcaaacctgaggagctgagaaacacttgctccttccatctgcagctttgggagtgcaacagggataggcactgcatccaagtcaactcaccatcttggggtccctcccaccctcacggagact

SEQ ID NO: 325278 - DNA, 680 bp, Homo sapiens
cagccagcaacaagtttcttgatcaaaagggcaagggggaggatgagtctagtgctaattcttgcctatgggaaggtggttaaaattattgaggaacaggcttatctgcttttcaatatggaattttcgtatgtcacattgaccacacagaaagaagtgaatcttatcacatgttatatctcacttacccttaatttaaagggggcaggatgcttcttaaacaggaaacaaactaaagtatagcaaagtttagttgagaaataaatgactatttcttttaccctagaaaaaggaatagcaacattgcattggctgttttgtcttatttactgctatattcttaatgcctggcacagagccctgcgcagatttagtttctcaatatgtatgagatgaagagctgactgaattcattaatggagattcacggagatttacgtataaattttgtgcctaatagtagaggaaacaatcccattcatgtaaatataaatcatgtctttctttttcttattctcagtattttctatacaagtttcccaaagacgtggactcagttatcattaaagtggtgtctgaaatggcttatccatgttctgttgtctcagtccagaatatcatggtgagtgctgataacttgccaaccttctactatagagcattatattattccagaacaa

SEQ ID NO: 325279 - DNA, 4694 bp, Homo sapiens
tttttattattgctgttattgaggttgagggagaagagatcggtctaaattctggctgggtaagtggggggattctcggcgatgagaaacgggggacttagaagccggaggaaaatcagcagccccacatctccacttctccagtccgccctactctccacccgtgacctccagtggagaccccaggcggcagcatcagtatttgatcggcccttcgtcagcacgctgccagccctggccggctgggttcgccaggcatcacccgctcggctctgaagcggacgcctggccctgcaccgggctttggaaggaccctctctgcgctcgccccctccccagggtggctccgctttcgagcccgggcgcggcgcccaccatgcgcggctgcctgcggctcgcgctgctctgcgcgctgccctggctcctgctggcggcgtcgcccgggcacccggcgaaatcccccaggcagcccccggcaccgcgccgcgaccccttcgacgctgccaggggcgccgatttcgatcatgtctacagcggggtggtgaacctcagcaccgagaacatctactctttcaactacaccagccagcccgaccaggtgacagccgtgagggtgtatgtgaacagttcctctgagaatctcaactacccggtccttgttgtggttcgccagcagaaagaggtgctgtcctggcaggttcctctgctcttccaaggactataccagaggagctacaattatcaagaagtgagccgcaccttatgtccctcagaagcaaccaatgagacgggacccttgcagcaactgatatttgtagatgtcgcatccatggcacccctgggtgctcagtacaaactgctagttaccaagctgaagcacttccagctccggacaaatgttgcctttcactttactgccagcccctctcaacctcagtattttctatacaagtttcccaaagacgtggactcagttatcattaaagtggtgtctgaaatggcttatccatgttctgttgtctcagtccagaatatcatgtgcccggtgtatgatctcgaccacaatgtggaatttaatggtgtctatcagtccatgaccaagaaagctgccatcacgctacagaagaaggattttccaggcgagcagttcttcgtggtatttgtgataaagcctgaagattatgcctgtggaggatctttcttcatccaggaaaaggaaaaccagacctggaatctacagcgaaaaaagaaccttgaagtgaccattgtcccttccattaaagaatctgtttatgtgaaatccagtcttttcagtgtcttcatcttcctgtccttctacttgggatgccttcttgttgggtttgttcattatctgaggtttcagagaaaatccattgatggaagctttgggtccaatgatggctctggaaatatggtggcatctcatcccattgctgccagcacacccgaagggagcaattatgggacaatagatgagtcaagctccagtcctggaaggcagatgtcctcctccgatggtgggccaccgggccagtcagacacagacagctccgtggaggagagcgacttcgacaccatgccagacattgagagtgataaaaacatcatccggaccaagatgttcctttacctgtcagatttgtccaggaaggaccggagaattgtcagcaaaaaatataaaatttatttttggaacatcatcaccattgctgtgttttacgcgctgcccgtgatccagctggtcattacctatcagacagtggtaaatgtcactggcaaccaggacatctgttactacaacttcctctgtgctcaccccttgggcgtcctgagtgccttcaacaacattctcagcaatctgggccacgtgcttctgggcttcctcttcctgctgatagtcttgcgccgcgacatcctccatcggagagccctggaagccaaggacatctttgctgtggagtacgggattcccaaacactttggtctcttctacgctatgggcattgcattgatgatggaaggggtgctcagtgcttgctaccatgtctgccctaattattccaacttccgattcgacacctccttcatgtacatgatcgctggcctgtgcatgctgaagctctatcagacccgccacccagacatcaatgccagcgcctactctgcctatgcctcctttgctgtggtcatcatggtcaccgtccttggagtggtgtttggaaaaaatgacgtatggttctgggtcatcttctctgcaatccacgttctggcctcgctagccctcagcacccagatatattatatgggtcgtttcaagatagatttgggaattttccggcgggctgccatggtgttctacacagactgtatccagcagtgtagccgacctctatatatggatagaatggtgttgctggttgtggggaatctggttaactggtccttcgccctctttggattgatataccgccccagggactttgcttcctacatgctgggcatcttcatctgtaaccttttgctgtacctggccttttacatcatcatgaagctccgcagctctgaaaaggtcctcccagtcccgctcttctgcatcgtggccaccgctgtgatgtgggctgccgccctatattttttcttccagaatctcagcagctgggagggaactccggccgaatcccgggagaagaaccgcgagtgcattctgctggatttcttcgatgaccatgacatctggcacttcctctctgctactgctctgtttttctcattcttggttttgttaactttggatgatgaccttgatgtggttcggagagaccagatccctgtcttctgaacctccaacattaagagaggggagggagcgatcaatcttggtgctgtttcacaaaaattacagtgaccacagcaaagtaaccactgccagatgctccactcaccctctgtagagccaactctgcattcacacaggaaggagaggggctgcgggagatttaaacctgcaagaaaggaggcagaaggggagccatgttttgaggacagacgcaaacctgaggagctgagaaacacttgctccttccatctgcagctttgggagtgcaacagggataggcactgcatccaagtcaactcaccatcttggggtccctcccaccctcacggagacttgccagcaatggcagaatgctgctgcacacttccctccagttgtcaccctgcccagaaaggccagcagcttggacttcctgcccagaaactgtgttggcccccttcacacctctgcaacacctgctgctccagcaagaggatgtgattctttagaatatggcggggaggtgaccccaggccctgccctactgggatagatgttttaatggcaccagctagtcacctcccagaagaaactctgtatatttcccccaggtttctgatgccatcagaagggctcaggagtggggtttgtcacacattcctcttaacaagtaactgtcactgggaccgagtcctgggtgcttacatattccttcgtgtcttcatctcactgacctgtgtggacctcatcactctgactctgccttcttggaaaggccctgtcactccacagatgtctggccagcttcaaggcagaaggaaaaacaggaaaagctcttttaacagcagcaggaacaagagaaatgactaaccatactaaaagactggtaacagcagcagcagccagacaggcctcaccttaaggacttgggctgccagagcaaattcagcagagcttatttggcctcccattcacacagctcagttctgtgcccacatcacctttggggaagaaatcagcattctaatcagggacactacttcaggagtcctccacagcgagtccgtcatctgtcactttatgtagatcagggttctagacttcttccctgaggttctcagaagcagctctcaggatgaacgtattgtcctcttcccctcttcttgcaaagtgcacagctaatctaatgttgtctctcggttgcacctgacattctctccccagtaaggtgttggcaagctcagcatctgggttccactctcacactgtctggcagctctgtgtctgagaagttctacattgaccaggcccccttgttgcctggagtatgacgtaatcagaaaatagacgtataaatgtgcacatgcgtatgtatttgcttgtgaaattaaagtcacctcttgcctctgctttcctgatcattcgttagagaaatggatcaggcatttttttaaattattattctttctctaaactatttgcattgtgttcaaaaacccattttagaagtttgaacagcaagcttttcctgattttaaaaacacaaagttgctttcaatgaaatattttgtgatttttttaaagtccccaaatgtgtacttagccttctgttattccttattctttaagcagtgttggcttccattgaccatatgaaggccaccaattaaatggttgtgttaatccaacatgtaaaaaactttttggcagggcacagtggctcacgcctgtaatcccaacactttgggaggctgaggcaggaggatcacttgagcccaggagattgacgccgcagtgaactatgattgtgcccctgcactccagcctggatgacagagtgagaccccatctcttaaaa

SEQ ID NO: 325280 - DNA, 4015 bp, Homo sapiens
tttttattattgctgttattgaggttgagggagaagagatcggtctaaattctggctgggtaagtggggggattctcggcgatgagaaacgggggacttagaagccggaggaaaatcagcagccccacatctccacttctccagtccgccctactctccacccgtgacctccagtggagaccccaggcggcagcatcagtatttgatcggcccttcgtcagcacgctgccagccctggccggctgggttcgccaggcatcacccgctcggctctgaagcggacgcctggccctgcaccgggctttggaaggaccctctctgcgctcgccccctccccagggtggctccgctttcgagcccgggcgcggcgcccaccatgcgcggctgcctgcggctcgcgctgctctgcgcgctgccctggctcctgctggcggcgtcgcccgggcacccggcgaaatcccccaggcagcccccggcaccgcgccgcgaccccttcgacgctgccaggggcgccgatttcgatcatgtctacagcggggtggtgaacctcagcaccgagaacatctactctttcaactacaccagccagcccgaccaggtgacagccgtgagggtgtatgtgaacagttcctctgagaatctcaactacccggtccttgttgtggttcgccagcagaaagaggtgctgtcctggcaggttcctctgctcttccaaggactataccagaggagctacaattatcaagaagtgagccgcaccttatgtccctcagaagcaaccaatgagacgggacccttgcagcaactgatatttgtagatgtcgcatccatggcacccctgggtgctcagtacaaactgctagttaccaagctgaagcacttccagctccggacaaatgttgcctttcactttactgccagcccctctcaacctcagtattttctatacaagtttcccaaagacgtggactcagttatcattaaagtggtgtctgaaatggcttatccatgttctgttgtctcagtccagaatatcatgtgcccggtgtatgatctcgaccacaatgtggaatttaatggtgtctatcagtccatgaccaagaaagctgccatcacgctacagaagaaggattttccaggcgagcagttcttcgtggtatttgtgataaagcctgaagattatgcctgtggaggatctttcttcatccaggaaaaggaaaaccagacctggaatctacagcgaaaaaagaaccttgaagtgaccattgtcccttccattaaagaatctgtttatgtgaaatccagtcttttcagtgtcttcatcttcctgtccttctacttgggatgccttcttgttgggtttgttcattatctgaggtttcagagaaaatccattgatggaagctttgggtccaatgatggctctggaaatatggtggcatctcatcccattgctgccagcacacccgaagggagcaattatgggacaatagatgagtcaagctccagtcctggaaggcagatgtcctcctccgatggtgggccaccgggccagtcagacacagacagctccgtggaggagagcgacttcgacaccatgccagacattgagagtgataaaaacatcatccggaccaagatgttcctttacctgtcagatttgtccaggaaggaccggagaattgtcagcaaaaaatataaaatttatttttggaacatcatcaccattgctgtgttttacgcgctgcccgtgatccagctggtcattacctatcagacagtggtaaatgtcactggcaaccaggacatctgttactacaacttcctctgtgctcaccccttgggcgtcctgagtgccttcaacaacattctcagcaatctgggccacgtgcttctgggcttcctcttcctgctgatagtcttgcgccgcgacatcctccatcggagagccctggaagccaaggacatctttgctgtggagtacgggattcccaaacactttggtctcttctacgctatgggcattgcattgatgatggaaggggtgctcagtgcttgctaccatgtctgccctaattattccaacttccgattcgacacctccttcatgtacatgatcgctggcctgtgcatgctgaagctctatcagacccgccacccagacatcaatgccagcgcctactctgcctatgcctcctttgctgtggtcatcatggtcaccgtccttggagtggtgtttggaaaaaatgacgtatggttctgggtcatcttctctgcaatccacgttctggcctcgctagccctcagcacccagatatattatatgggtcgtttcaagatagatttgggaattttccggcgggctgccatggtgttctacacagactgtatccagcagtgtagccgacctctatatatggatagaatggtgttgctggttgtggggaatctggttaactggtccttcgccctctttggattgatataccgccccagggactttgcttcctacatgctgggcatcttcatctgtaaccttttgctgtacctggccttttacatcatcatgaagctccgcagctctgaaaaggtcctcccagtcccgctcttctgcatcgtggccaccgctgtgatgtgggctgccgccctatattttttcttccagaatctcagcagctgggagggaactccggccgaatcccgggagaagaaccgcgagtgcattctgctggatttcttcgatgaccatgacatctggcacttcctctctgctactgctctgtttttctcattcttggttttgttaactttggatgatgaccttgatgtggttcggagagaccagatccctgtcttctgaacctccaacattaagagaggggagggagcgatcaatcttggtgctgtttcacaaaaattacagtgaccacagcaaagtaaccactgccagatgctccactcaccctctgtagagccaactctgcattcacacaggaaggagaggggctgcgggagatttaaacctgcaagaaaggaggcagaaggggagccatgttttgaggacagacgcaaacctgaggagctgagaaacacttgctccttccatctgcagctttgggagtgcaacagggataggcactgcatccaagtcaactcaccatcttggggtccctcccaccctcacggagacttgccagcaatggcagaatgctgctgcacacttccctccagttgtcaccctgcccagaaaggccagcagcttggacttcctgcccagaaactgtgttggcccccttcacacctctgcaacacctgctgctccagcaagaggatgtgattctttagaatatggcggggaggtgaccccaggccctgccctactgggatagatgttttaatggcaccagctagtcacctcccagaagaaactctgtatatttcccccaggtttctgatgccatcagaagggctcaggagtggggtttgtcacacattcctcttaacaagtaactgtcactgggaccgagtcctgggtgcttacatattccttcgtgtcttcatctcactgacctgtgtggacctcatcactctgactctgccttcttggaaaggccctgtcactccacagatgtctggccagcttcaaggcagaaggaaaaacaggaaaagctcttttaacagcagcaggaggaggaccctgccacaaaccaaggtaactttctcctagagcaatgtcaaggtgattctccatgcagatctggaaatgatctggcccagaccttcactctccaccagtagcgtcactcctgctggacttctgctctggttcagtgtgaccgcactgagcttgccctgcctacctggtttgtttcttttgtttcattgctcctcctgtggtcttcgcgacagctgacatgctgacgttattcccacggctttgcttcagccagcaggaggaggacagcagcaggaggagtacagcagcaggagaaggacgggatcctctagaacacta

SEQ ID NO: 325281 - DNA, 315 bp, Homo sapiens
tggaagagaggctgggagccagatatgatttgggaatgcagtgaggggcaatggaggggaatagattcaatacaaccctgcccagtttctctgctgggctgggaaattgatttagggggagctaagcaggagatcctcaaaggccctgcacagtctttggtggtaagttgggcagatttgctatgggtccagctttaaatgcttccaggcactgctctccaggaaagtcacttgggtgaagacactgaatattgatccccagctgccaccgaagttctactatgggctagtgcacatgtcacttaaggaaaagca

SEQ ID NO: 325282 - DNA, 843 bp, Homo sapiens
gtgggcggcccctttcttgagcgcagaaacacttacttttccccctaccctgctcctcctcctccacagccgtctttctctttgcctcagccacttccttccttcgcctcaccctccccagtgcactgaagaaggtaaccgggtccagacccacgcggcgccagttctccggcgggaaggaaaaccgcgcagagaggcagcaatgaatgtggatcacgaggttaacctcttagtggaggaaattcatcgtttgggttcaaaaaatgctgatggaaagttaagcgtgaaatttggggtcctcttccgtgatgataaatgtgccaacctctttgaagcattggtaggaactcttaaagctgcaaaacgaaggaagattgtaacatatccaggagagctgcttctgcaaggtgttcatgatgatgttgacattatattactgcaagattaatgtggtttacatatctttatgtactgccattttttgtttctggtaaactggaatataaagtgaaagaacaaacatttgaacatacttaatgtatttttatagaactttgtaaacgaaaggagattcatgttttagaagtctgtccttttttatatcttgaaagaaaatctatgtatgatgctataaaataaatcctattatttttctcaggaatctggttaggaattgcaggcaatgagattttttgcggggcagggatgggaatgtttgttcataaataattagacattttctatagatatttgacattctgcgaaagcaacaagcaaactgaagaccaactcctatgagaaatattatgatgtttatgtaataaagacatgtaactgtcttaa

SEQ ID NO: 325283 - DNA, 1523 bp, Homo sapiens
  misc_feature (855)..(855): n is a, c, g, or t
  misc_feature (870)..(870): n is a, c, g, or t
  misc_feature (875)..(875): n is a, c, g, or t
  misc_feature (882)..(882): n is a, c, g, or t
gtgggcggcccctttcttgagcgcagaaacacttacttttccccctaccctgctcctcctcctccacagccgtctttctctttgcctcagccacttccttccttcgcctcaccctccccagtgcactgaagaaggtaaccgggtccagacccacgcggcgccagttctccggcgggaaggaaaaccgcgcagagaggcagcaatgaatgtggatcacgaggttaacctcttagtggaggaaattcatcgtttgggttcaaaaaatgctgatggaaagttaagcgtgaaatttggggtcctcttccgtgatgataaatgtgccaacctctttgaagcattggtaggaactcttaaagctgcaaaacgaaggaagattgtaacatatccaggagagctgcttctgcaaggtgttcatgatgatgttgacattatattactgcaagattaatgtggtttacatatctttatgtactgccattttttgtttctggtaaactggaatataaagtgaaagaacaaacatttgaacatacttaatgtatttttatagaactttgtaaacgaaaggagattcatgttttagaagtctgtccttttttatatcttgaaagaaaatctatgtatgatgctataaaataaatcctattatttttctcaggaatctggttaggaattgcaggcaatgagattttttgcggggcagggatgggaatgtttgttcataaataattagacattttctatagatatttgacattctgcgaaagcaacaagcaaactgaagaccaactcctatgaggtaaataaaacactttatttgtaaaaaacaaaaaaaaaaacaaaacaaaacaaaancaaaaaaaaaaaaanaaaanaaaaaanaaaaagaaaaaacaaaaaaaaaagaaagaggggcgcgcgcgcgcgcgccacaaaaacacacccaccaccgagggcgcgcgcccacacacgacgcgccgcgccccacgcgtaattttctgataaacaacgaaaggggcgcgcccactcataagaggaggagcgcagctgtatatatatatataacgatacgcgcgagacgagcgagcgggcgcgcggtatattaataacaaaagaagcaatagtgcagggggaaaccaaacgcggcaacctcgcggggatcaatatcttggagagaaaagagaacaacatatctatcgtcgacgggggagggggagggacaaacaagagtaggtgaggaaaaacaaacctccaccccaggaagaataataataaaagcgcagccacggagggagagaaaatcaataaaacaaaattttctaaaggagtggacaataaagtgggtgtaaaaacacaaacaaacgagtagaatcaataatatgctaggggactccatggcgacaaagaaaaaaattgttgcgcgacgaacagcgagggagagatatatatatgttagcaatgaaaaacatatatattttctacaccagaggagagacaagtatgaataaaaaacaagggggggt

SEQ ID NO: 325284 - DNA, 1458 bp, Homo sapiens
  misc_feature (790)..(790): n is a, c, g, or t
  misc_feature (805)..(805): n is a, c, g, or t
  misc_feature (810)..(810): n is a, c, g, or t
  misc_feature (817)..(817): n is a, c, g, or t
gtgggcggcccctttcttgagcgcagaaacacttacttttccccctaccctgctcctcctcctccacagccgtctttctctttgcctcagccacttccttccttcgcctcaccctccccagtgcactgaagaaggtaaccgggtccagacccacgcggcgccagttctccggcgggaaggaaaaccgcgcagagaggcagcaatgaatgtggatcacgaggttaacctcttagtggaggaaattcatcgtttgggttcaaaaaatgctgatggaaagttaagcgtgaaatttggggtcctcttccgtgatgataaatgtgccaacctctttgaagcattggtaggaactcttaaagctgcaaaacgaaggaagattgtaacatatccaggagagctgcttctgcaaggtgttcatgatgatgttgacattatattactgcaagattaatgtggtttacatatctttatgtactgccattttttgtttctggtaaactggaatataaagtgaaagaacaaacatttgaacatacttaatgtatttttatagaactttgtaaacgaaaggagattcatgttttagaagtctgtccttttttatatcttgaaagaaaatctatgtatgatgctataattttttgcggggcagggatgggaatgtttgttcataaataattagacattttctatagatatttgacattctgcgaaagcaacaagcaaactgaagaccaactcctatgagaaatattatgatgtttatgtaataaagacatgtaactgtcttaancaaaaaaaaaaaaanaaaanaaaaaanaaaaagaaaaaacaaaaaaaaaagaaagaggggcgcgcgcgcgcgcgccacaaaaacacacccaccaccgagggcgcgcgcccacacacgacgcgccgcgccccacgcgtaattttctgataaacaacgaaaggggcgcgcccactcataagaggaggagcgcagctgtatatatatatataacgatacgcgcgagacgagcgagcgggcgcgcggtatattaataacaaaagaagcaatagtgcagggggaaaccaaacgcggcaacctcgcggggatcaatatcttggagagaaaagagaacaacatatctatcgtcgacgggggagggggagggacaaacaagagtaggtgaggaaaaacaaacctccaccccaggaagaataataataaaagcgcagccacggagggagagaaaatcaataaaacaaaattttctaaaggagtggacaataaagtgggtgtaaaaacacaaacaaacgagtagaatcaataatatgctaggggactccatggcgacaaagaaaaaaattgttgcgcgacgaacagcgagggagagatatatatatgttagcaatgaaaaacatatatattttctacaccagaggagagacaagtatgaataaaaaacaagggggggt

SEQ ID NO: 325285 - DNA, 786 bp, Homo sapiens
gtgggcggcccctttcttgagcgcagaaacacttacttttccccctaccctgctcctcctcctccacagccgtctttctctttgcctcagccacttccttccttcgcctcaccctccccagtgcactgaagaaggtaaccgggtccagacccacgcggcgccagttctccggcgggaaggaaaaccgcgcagagaggcagcaatgaatgtggatcacgaggttaacctcttagtggaggaaattcatcgtttgggttcaaaaaatgctgatggaaagttaagcgtgaaatttggggtcctcttccgtgatgataaatgtgccaacctctttgaagcattggtaggaactcttaaagctgatgatgttgacattatattactgcaagattaatgtggtttacatatctttatgtactgccattttttgtttctggtaaactggaatataaagtgaaagaacaaacatttgaacatacttaatgtatttttatagaactttgtaaacgaaaggagattcatgttttagaagtctgtccttttttatatcttgaaagaaaatctatgtatgatgctataaaataaatcctattatttttctcaggaatctggttaggaattgcaggcaatgagattttttgcggggcagggatgggaatgtttgttcataaataattagacattttctatagatatttgacattctgcgaaagcaacaagcaaactgaagaccaactcctatgagaaatattatgatgtttatgtaataaagacatgtaactgtcttaa

SEQ ID NO: 325286 - DNA, 1512 bp, Homo sapiens
  misc_feature (844)..(844): n is a, c, g, or t
  misc_feature (859)..(859): n is a, c, g, or t
  misc_feature (864)..(864): n is a, c, g, or t
  misc_feature (871)..(871): n is a, c, g, or t
gtgggcggcccctttcttgagcgcagaaacacttacttttccccctaccctgctcctcctcctccacagccgtctttctctttgcctcagccacttccttccttcgcctcaccctccccagtgcactgaagaaggtaaccgggtccagacccacgcggcgccagttctccggcgggaaggaaaaccgcgcagagaggcagcaatgaatgtggatcacgaggttaacctcttagtggaggaaattcatcgtttgggttcaaaaaatgctgatggaaagttaagcgtgaaatttggggtcctcttccgtgatgataaatgtgccaacctctttgaagcattggtaggaactcttaaagctgcaaaacgaaggaagattgtaacatatccaggagagctgcttctgcaaggtgttcatgatgatgttgacattatattactgcaagattaatgtggtttacatatctttatgtactgccattttttgtttctggtaaactggaatataaagtgaaagaacaaacatttgaacatacttaatgtatttttatagaactttgtaaacgaaaggagattcatgttttagaagtctgtccttttttatatcttgaaagaaaatctatgtatgatgctataaaataaatcctattatttttctcaggaatctggttaggaattgcaggcaatgagattttttgcggggcagggatgggaatgtttgttcataaataattagacattttctatagatatttgacattctgcgaaagcaacaagcaaactgaagaccaactcctatgagaaatattatgatgtttatgtaataaagacatgtaactgtcttaancaaaaaaaaaaaaanaaaanaaaaaanaaaaagaaaaaacaaaaaaaaaagaaagaggggcgcgcgcgcgcgcgccacaaaaacacacccaccaccgagggcgcgcgcccacacacgacgcgccgcgccccacgcgtaattttctgataaacaacgaaaggggcgcgcccactcataagaggaggagcgcagctgtatatatatatataacgatacgcgcgagacgagcgagcgggcgcgcggtatattaataacaaaagaagcaatagtgcagggggaaaccaaacgcggcaacctcgcggggatcaatatcttggagagaaaagagaacaacatatctatcgtcgacgggggagggggagggacaaacaagagtaggtgaggaaaaacaaacctccaccccaggaagaataataataaaagcgcagccacggagggagagaaaatcaataaaacaaaattttctaaaggagtggacaataaagtgggtgtaaaaacacaaacaaacgagtagaatcaataatatgctaggggactccatggcgacaaagaaaaaaattgttgcgcgacgaacagcgagggagagatatatatatgttagcaatgaaaaacatatatattttctacaccagaggagagacaagtatgaataaaaaacaagggggggt

SEQ ID NO: 325287 - DNA, 850 bp, Homo sapiens
gtgggcggcccctttcttgagcgcagaaacacttacttttccccctaccctgctcctcctcctccacagccgtctttctctttgcctcagccacttccttccttcgcctcaccctccccagtgcactgaagaaggtaaccgggtccagacccacgcggcgccagttctccggcgggaaggaaaaccgcgcagagaggcagcaatgaatgtggatcacgaggttaacctcttagtggaggaaattcatcgtttgggttcaaaaaatgctgatggaaagttaagcgtgaaatttggggtcctcttccgtgatgataaatgtgccaacctctttgaagcattggtaggaactcttaaagctgcaaaacgaaggaagattgtaacatatccaggagagctgcttctgcaaggtgttcatgatgatgttgacattatattactgcaagattaatgtggtttacatatctttatgtactgccattttttgtttctggtaaactggaatataaagtgaaagaacaaacatttgaacatacttaatgtatttttatagaactttgtaaacgaaaggagattcatgttttagaagtctgtccttttttatatcttgaaagaaaatctatgtatgatgctataaaataaatcctattatttttctcaggaatctggttaggaattgcaggcaatgagattttttgcggggcagggatgggaatgtttgttcataaataattagacattttctatagatatttgacattctgcgaaagcaacaagcaaactgaagaccaactcctatgaggttgatctctcataaataaagagcgattcgcacagaaaacctttcggcccc

SEQ ID NO: 325288 - DNA, 744 bp, Homo sapiens
tcttgatgcagcttttgggctgggcaaggggattttattttatttctttcagaaaacaatcatttctcctttttacttatttgttttctactcattaatttctggctttatcttcataattctccctactttttaaaatgcactttattgttctcattctagtttcttagggtggcacaaagtccctctcgtttattttttcctctaaaaaataagagctgtgctgggggctctgggcgctgcattagctgagtcctcgatatttatggattgatatttatggcttctcggcttttcagagagtgcacgttcagatttaatatcctgttttacccaagggctacctgggagtgtgttggtttctaagtttctgggggaagaggtggcactttccgttatttattttacaattttttggataacaggatcattttaattattctactttttagttccttgaggttttctttgcagccaatacacaacagacatggacttatcggaagtcggaacgtttggaagctctgtttcccgtgaggaatcttcggaagcgctgtttcccatgaggaacgtgagcatgaccatccatattgatctgtctgcatttttctgttgccactagacctaattatggagagagagacacggagggagctcctgtgaccctcaagtcccctcatcatgtccccgtcctgttggctttccgagtttagctcccatgtttggaccatggaggtttatgtc

SEQ ID NO: 325289 - DNA, 791 bp, Homo sapiens
atgtcaataaatataatttgactcatatgcataaaatagtctgtattgccccaaagctttgctgttctgaaggattataaaatcattggttgtaaatattaaccagctcctaatataatctgacatctacttatgaaatttgcaaaaacagttaataatgttagctatgcaagttaacaaatcagtgtaaccaaataacaaactatttttattttgaacaagcattatactgatatgaatgcaaatataagtattcaatgacataggtaaatttttattttgagaattactgttatatttatgtctagtatgtctataattttgttctttatattctgtgtaaatgaggcaacagcgttctgtgtgtgtgtatatatatatacacaaaggatatatatatacaaagaatatgtgtatatatatgtgtgtatatatatatacacaaagaacgtgtgtgtgtgtgtatatatatatatatatatatacatacatacacaaaggatatatatgtacatgttattgatagaaacaatcagaaaaggaacaataaaataaagaagcctgtgttaggaaaatcagtttaataacacaaaggcaaaataggctcagattttttaagtgagatgctgagtcagataattaaacaaggctgttaatatccaggtttttaacccaaggaagccaaataattttcagagttaagtctccattcaagtggcaaaatgaaatatatgaaatattgatgtccatcaatccagggcaaaggtccttggatataaatcgttggcagg

SEQ ID NO: 325290 - DNA, 673 bp, Homo sapiens
gatcaaaaccatgaagaagctccatctaaaagaaagttcctctcttaacttccatcttagagctctcatctaaaagaacataacatttgtaggcactgaagagtataatttttgtaagagtgaaataattaatgttgtatatagcaagtctagcttctttttagttcagtcttctatagcatgctaagaggaaaaaaagtcagactacaaggatttaataattctatgaaatgtcttatattttccaaaaatggcttttgaatagattgttcattgagtctagcagaacatacatataaccaaaagtggtatctctgttactatgttaggtattttgacagttaattttagatgtgaacttgactgaattaaggaatacctagagaagtggtaaagcaattacttctgggtgtgccagaggaaactggcacatgtgccagtgaaccaggtggggaagattcactctcactgtgggcaagtaccatccaattggccggaggcccagacagaacaaaaaatgagagaaagggatttcctctctctcctggagctgggacactcttctccttctgcccttggacatcagaactccaggctctttggctatgggactctgcaccttataccagcagtccctcagatcttctcaaggctttggcctgggactaagaat

SEQ ID NO: 325291 - DNA, 1770 bp, Homo sapiens
ccgggccggtgcgccgcctagaaaaacttgtgcggggccatttttggggcagtaagatcgagcgaggagcccaagagcgagcgcgcagcacgaagctcgagccgcctccgccgcgcgaccccacctcggccgccgccgcctgcgccgcgagatccgccccggcctccccgagagcgagccccggccgccgcgaccaccagccgcgctaaccgccgaccaaccgccaccgaggcgcctgagcgagagcagaggaggaggaggcatgagtgaggcgggcgaggccaccaccaccaccaccaccaccctcccgcaggctccgacggaggcggccgccgcggctccccaggaccccgcgcccaagagcccggtgggcagcggtgcgccccaggccgcggccccggcgcccgccgcccacgtcgcaggaaaccccggtggggacgcggcccccgcagccacgggcaccgcggccgccgcctctttagccaccgccgccggcagcgaagacgcggagaaaaaagttctcgccaccaaagtccttggcactgtcaaatggttcaacgtcagaaatggatatggatttataaatcgaaatgacaccaaagaagatgtatttgtacatcagactgccatcaagaagaataacccacggaaatatctgcgcagtgtaggagatggagaaactgtagagtttgatgtggttgaaggagagaagggtgcagaagctgccaatgtgactggcccggatggagttcctgtggaagggagtcgttacgctgcagatcggcgccgttacagacgtggctactatggaaggcgccgtggccctccccggaatgctggtgagattggagagatgaaggatggagtcccagagggagcacaacttcagggaccggttcatcgaaatccaacttaccgcccaaggtaccgtagcaggggacctcctcgcccacgacctgccccagcagttggagaggctgaagataaagaaaatcagcaagccaccagtggtccaaaccagccgtctgttcgccgtggataccggcgtccctacaattaccggcgtcgcccgcgtcctcctaacgctccttcacaagatggcaaagaggccaaggcaggtgaagcaccaactgagaaccctgctccacccacccagcagagcagtgctgagtaacaccaggctcctcaggcaccttcaccatcggcaggtgacctaaagaattaatgaccattcagaaataaagcaaaaagcaggccacaaccttaaccaacaccaaagaaacatccaagcaataaagtggaagactaaccaagatttggacattggaatgtttactgttattctttaagaaacaactacaaaaagaaaatgtcaacaaatttttccagcaagctgagaacctgggaattcctgcacggaagacaagagagtagcctctccagtttcagcaaccgctaggtttctattttttttcctggtttttactgttttggtaatatatatattgaaacaagaaatattaataccacatggggagaaccccaaccaaagaaatctgaaatatatagtaaatgcttttttttccgtttttgttcattttggatgctggtgctaaacctccaagtgtcatgatttaaaaaaaaaaaaaatttatgtccttcttatttatttctaggatgaggggaggataacatttttgctttcttatgtgactctctttgaaaatgtgcagtaagaaattcctcaaaaataaaatttttacccttcag

SEQ ID NO: 325292 - DNA, 1345 bp, Homo sapiens
caacttcttcctgaatgatgtttatgctaccttgaaatttgtcagtatggctttattgaaggataaaaagtatattatattgggaaaggattccaccaatataattgtaaaaggatcgtatcctttttcttcacaaggttccctccagctttaggcataatcactaatgattaagtactagggactttgaaaataaaagagacggcatagaaatgtcttactggaacaaaaaggattcagtagcgtgtgaggctcagctttgtcagtccctggatatgtgatcttggaaagtcatatttgaccttttttaacctataaaagcagcacttttatatagctcagccgtatactttatcatgtaaacctcttggttttcttgttataaatctcatccacagaattaccattcaaattaaatatttaattttaaaaccgactagcacaggctctggcacataataatgtttcttctcatgtttaattcccttagtctctgctaaattctgttcatggaaggcagataccagactactcttcttttcttttttaattttcctattcttagtgcttatcaaagggcctgataggaacagagtatgtgttcagtatatgtatgttccttacaaatatgtattcaaatgaaaggggaaaatgatggaaaattaagatttttttttcgtgaaacctctattccatttgttgcattgacctgcgaataattctagcaataagtactcatcacttgacttttttttttttttaattttgagatggagtctccctctgtcacccaggctggagtgtgccaatctcgggttgctgcaacctctgcctcatggattcaagcaattcttatgcctcagcctcccaggtagctgggattacaggcttgtgccaccacgcccggctaatttttgtatttttagtagagatggagtttcaccatgttggccaggctggtctcaaactcctgacctcaagtgatccgcctgcctcagcctcctgaagtgctgggattacagggcaggggacctcctcgcccacgacctgccccagcagttggagaggctgaagataaagaaaatcagcaagccaccagtggtccaaaccagccgtctgttcgccgtggataccggcgtccctacaattaccggcgtcgcccgcgtcctcctaacgctccttcacaagatggcaaagaggccaaggcaggtgaagcaccaactgagaaccctgctccacccacccagcagagcagtgctgagtaacaccaggctcctcaggcaccttcaccatcggcaggtgacctaaagaattaatgaccattcagaaataaagcaaaaagcag

SEQ ID NO: 325293 - DNA, 1495 bp, Homo sapiens
tggttaaatatttctgggattgacctcattttgataagctttggtgagggtataagcattcagacagagttgatgatactcaacttcttttttctagacaggcagttttttaactactagtaccacttaggaaaactgatgctaaaagtccctaacaaaggcctggttttagtaatcagaaacagtttcagaacctgtttagtaatcagaaacagtagaataaactaaaggattttttttccttccctttttctttgataatcaactttatttattttgaggcggtgcagcatagtgtataagagccaaggtttatctacccattgcaggctctactgtacctctcatttgctgggtgatcttgagcagtttatcctctgtctcagtactatctgctactggtaaaaattaggatactaattatatttactagggtcgttgcaaggattattaagtgaaataacagggagtgtttacaatagggtatggtaaagaataacctctcgtaaaaggatagcttgttattttcttgtcattttctacttttttctgtcttttaaaggtcttggacattttatttacatagaattatagccagaaagatcaactcaattataaattctgggtttgtttttttttaacctataacccttttaactgagactttagttcttatacttcttggttatcaccctttccattagcttttagttaagagagaggttgtaaactcagtgtcaatgctatttttcaaaaattgttaaaatttcatcaatgaagttttgggattattataagttcttgtgtcttaaggccatctgcttttatatccagtgatgtgggattttaatcagccattaattaggtaagcattcactttgaggacaatattctgttttatcttgggtagcatggacagtttgtcacagaaataagttccctattcaaacttggaattagctgattcagagtaacatattaataatataaaaatggccatacccttttatggcgtaacattatttctaggtattgtttctaaggaaataattttaaatattgggaaaaaatatttttacaatttacagtctgtctgacatttggtaaatagctaattgtgatatattcatattaggagatagggtgcagccactaaaatgattttgagtattgttcattagtaatggtaattttcttttatacaattttataaaatttttgctcttatgtactgacttttctggtttataaaaatactttattaaaaagtgagagtttccatttaattaacatatagcttacagatctatacaagatgtgattgtatttagagcatttgaagtactctttttctaattatatgaaaagcatataatttctgcctttttattctttaactcatggttactttgtcactctttataagtttgattttaatttttcccaggtgtgacctaaagaattaatgaccattcagaaataaagcaaaaagcag

SEQ ID NO: 325294 - DNA, 560 bp, Homo sapiens
atctgcggtgaaaaaagttctcgccaccaaagtccttggcactgtcaaatggttcaacgtcagaaatggatatggatttataaatcgaaatgacaccaaagaagatgtatttgtacatcagactgccatcaagaagaataacccacggaaatatctgcgcagtgtaggagatggagaaactgtagagtttgatgtggttgaaggagagaagggtgcagaagctgccaatgtgactggcccggatggagttcctgtggaagggagtcgttacgctgcagatcggcgccgttacagacgtggctactatggaaggcgccgtggccctccccggaatgtacgttgtctctgttacttaaccagtgattgagaaattgttcatgcatggaattaagtgtatgtacttggagcagataaatgccttgtcttctcctggagacaaatgatttaagtgatttttattttttctttagaggaaatttttatcttattttttaaaatgtgtattattgatttccataggtttttgggaaaccggtggtgattagttacatgaataagtt

SEQ ID NO: 325295 - DNA, 308 bp, Homo sapiens
ggaggctcctcagattgccaaccctagatgtgagtcagctcctggatgtggtgtctggcagcgacctgtgattgacaaccccaaccaaagaaatctgaaatatatagtaaatgcttttttttccgtttttgttcattttggatgctggtgctaaacctccaagtgtcatgatttaaaaaaaaaaaaaatttatgtccttcttatttatttctaggatgaggggaggataacatttttgctttcttatgtgactctctttgaaaatgtgcagtaagaaattcctcaaaaataaaatttttacccttcag

SEQ ID NO: 325296 - DNA, 410 bp, Homo sapiens
agacagatacgaatcgagctcggtaccgacagcatcctaactggtccaaaccagccgtctgttcgccgtggataccggcgtccctacaattaccggcgtcgcccgcgtcctcctaacgctccttcacaagatggcaaagaggccaaggcaggtgaagcaccaactgagaaccctgctccacccacccagcagagcagtgctgagtaacaccaggctcctcaggcaccttcaccatcggcagctgccttcgtaaggcacctcggtctggcattcggaaaaccaccccatcttgccagagtcccttggtccttggttagcaaaagccgtatccgatctaaatcatgctttcaatcatgagagaccacattccttctttttcctttctaatatctccagcaggtaacacaggg

SEQ ID NO: 325297 - DNA, 2076 bp, Homo sapiens
ccgggccggtgcgccgcctagaaaaacttgtgcggggccatttttggggcagtaagatcgagcgaggagcccaagagcgagcgcgcagcacgaagctcgagccgcctccgccgcgcgaccccacctcggccgccgccgcctgcgccgcgagatccgccccggcctccccgagagcgagccccggccgccgcgaccaccagccgcgctaaccgccgaccaaccgccaccgaggcgcctgagcgagagcagaggaggaggaggcatgagtgaggcgggcgaggccaccaccaccaccaccaccaccctcccgcaggctccgacggaggcggccgccgcggctccccaggaccccgcgcccaagagcccggtgggcagcggtgcgccccaggccgcggccccggcgcccgccgcccacgtcgcaggaaaccccggtggggacgcggcccccgcagccacgggcaccgcggccgccgcctctttagccaccgccgccggcagcgaagacgcggagaaaaaagttctcgccaccaaagtccttggcactgtcaaatggttcaacgtcagaaatggatatggatttataaatcgaaatgacaccaaagaagatgtatttgtacatcagactgccatcaagaagaataacccacggaaatatctgcgcagtgtaggagatggagaaactgtagagtttgatgtggttgaaggagagaagggtgcagaagctgccaatgtgactggcccggatggagttcctgtggaagggagtcgttacgctgcagatcggcgccgttacagacgtggctactatggaaggcgccgtggccctccccggaattacgctggggaggaggaggaggaagggagcggcagcagtgaaggatttgacccccctgccactgataggcagttctctggggcccggaatcagctgcgccgcccccagtatcgccctcagtaccggcagcggcggttcccgccttaccacgtgggacagacctttgaccgtcgctcacgggtcttaccccatcccaacagaatacaggctggtgagattggagagatgaaggatggagtcccagagggagcacaacttcagggaccggttcatcgaaatccaacttaccgcccaaggtaccgtagcaggggacctcctcgcccacgacctgccccagcagttggagaggctgaagataaagaaaatcagcaagccaccagtggtccaaaccagccgtctgttcgccgtggataccggcgtccctacaattaccggcgtcgcccgcgtcctcctaacgctccttcacaagatggcaaagaggccaaggcaggtgaagcaccaactgagaaccctgctccacccacccagcagagcagtgctgagtaacaccaggctcctcaggcaccttcaccatcggcaggtgacctaaagaattaatgaccattcagaaataaagcaaaaagcaggccacaaccttaaccaacaccaaagaaacatccaagcaataaagtggaagactaaccaagatttggacattggaatgtttactgttattctttaagaaacaactacaaaaagaaaatgtcaacaaatttttccagcaagctgagaacctgggaattcctgcacggaagacaagagagtagcctctccagtttcagcaaccgctaggtttctattttttttcctggtttttactgttttggtaatatatatattgaaacaagaaatattaataccacatggggagaaccccaaccaaagaaatctgaaatatatagtaaatgcttttttttccgtttttgttcattttggatgctggtgctaaacctccaagtgtcatgatttaaaaaaaaaaaaaatttatgtccttcttatttatttctaggatgaggggaggataacatttttgctttcttatgtgactctctttgaaaatgtgcagtaagaaattcctcaaaaataaaatttttacccttcagaaaaaaacaacaaaaaacaacacaacaaaaaacacacaacacacaacaacaaacaacaaacaccacatcccaccacacgcaccacaacacacccacgcc

SEQ ID NO: 325298 - DNA, 2280 bp, Homo sapiens
ccgggccggtgcgccgcctagaaaaacttgtgcggggccatttttggggcagtaagatcgagcgaggagcccaagagcgagcgcgcagcacgaagctcgagccgcctccgccgcgcgaccccacctcggccgccgccgcctgcgccgcgagatccgccccggcctccccgagagcgagccccggccgccgcgaccaccagccgcgctaaccgccgaccaaccgccaccgaggcgcctgagcgagagcagaggaggaggaggcatgagtgaggcgggcgaggccaccaccaccaccaccaccaccctcccgcaggctccgacggaggcggccgccgcggctccccaggaccccgcgcccaagagcccggtgggcagcggtgcgccccaggccgcggccccggcgcccgccgcccacgtcgcaggaaaccccggtggggacgcggcccccgcagccacgggcaccgcggccgccgcctctttagccaccgccgccggcagcgaagacgcggagaaaaaagttctcgccaccaaagtccttggcactgtcaaatggttcaacgtcagaaatggatatggatttataaatcgaaatgacaccaaagaagatgtatttgtacatcagactgccatcaagaagaataacccacggaaatatctgcgcagtgtaggagatggagaaactgtagagtttgatgtggttgaaggagagaagggtgcagaagctgccaatgtgactggcccggatggagttcctgtggaagggagtcgttacgctgcagatcggcgccgttacagacgtggctactatggaaggcgccgtggccctccccggaattacgctggggaggaggaggaggaagggagcggcagcagtgaaggatttgacccccctgccactgataggcagttctctggggcccggaatcagctgcgccgcccccagtatcgccctcagtaccggcagcggcggttcccgccttaccacgtgggacagacctttgaccgtcgctcacgggtcttaccccatcccaacagaatacaggctggtgagattggagagatgaaggatggagtcccagagggagcacaacttcagggaccggttcatcgaaatccaacttaccgcccaaggtaccgtagcaggggacctcctcgcccacgacctgccccagcagttggagaggctgaagataaagaaaatcagcaagccaccagtggtccaaaccagccgtctgttcgccgtggataccggcgtccctacaattaccggcgtcgcccgcgtcctcctaacgctccttcacaagatggcaaagaggccaaggcaggtgaagcaccaactgagaaccctgctccacccacccagcagagcagtgctgagtaacaccaggctcctcaggcaccttcaccatcggcaggtgacctaaagaattaatgaccattcagaaataaagcaaaaagcaggccacaaccttaaccaacaccaaagaaacatccaagcaataaagtggaagactaaccaagatttggacattggaatgtttactgttattctttaagaaacaactacaaaaagaaaatgtcaacaaatttttccagcaagctgagaacctgggaattcctgcacggaagacaagagagtagcctctccagtttcagcaaccgctaggtttctattttttttcctggtttttactgttttggtaatatatatattgaaacaagaaatattaataccacatggggagaaccccaaccaaagaaatctgaaatatatagtaaatgcttttttttccgtttttgttcattttggatgctggtgctaaacctccaagtgtcatgatttaaaaaaaaaaaaaatttatgtccttcttatttatttctaggatgaggggaggataacatttttgctttcttatgtgactctctttgaaaatgtgcagtaagaaattcctcaaaaataaaatttttacccttcagaaaaaaaaaaagaaaaaaaaaaaaaaaaaaaaaaaaagaaaaaaaaaaaaaaagaaaaaaagaaagaaacaagaaaagaaagaaggggggcggcagagtagagaataagaatgacacacaaggaaaagagcgcgacgcgacagatgagggagacgcagccggggagagtcagaggaggacggaggggggtggtcatccaaacagaagagagggatggtagatatcaaacgagaaggagagcgaggcgggcgtcgacggtgacaaagagctgacgagaggaggcgagcacagggcgcgaggagg

SEQ ID NO: 325299 - DNA, 1940 bp, Homo sapiens
ccgggccggtgcgccgcctagaaaaacttgtgcggggccatttttggggcagtaagatcgagcgaggagcccaagagcgagcgcgcagcacgaagctcgagccgcctccgccgcgcgaccccacctcggccgccgccgcctgcgccgcgagatccgccccggcctccccgagagcgagccccggccgccgcgaccaccagccgcgctaaccgccgaccaaccgccaccgaggcgcctgagcgagagcagaggaggaggaggcatgagtgaggcgggcgaggccaccaccaccaccaccaccaccctcccgcaggctccgacggaggcggccgccgcggctccccaggaccccgccacgtcgcaggaaaccccggtggggacgcggcccccgcagccacgggcaccgcggccgccgcctctttagccaccgccgccggcagcgaagacgcggagaaaaaagttctcgccaccaaagtccttggcactgtcaaatggttcaacgtcagaaatggatatggatttataaatcgaaatgacaccaaagaagatgtatttgtacatcagactgccatcaagaagaataacccacggaaatatctgcgcagtgtaggagatggagaaactgtagagtttgatgtggttgaaggagagaagggtgcagaagctgccaatgtgactggcccggatggagttcctgtggaagggagtcgttacgctgcagatcggcgccgttacagacgtggctactatggaaggcgccgtggccctccccggaattacgctggggaggaggaggaggaagggagcggcagcagtgaaggatttgacccccctgccactgataggcagttctctggggcccggaatcagctgcgccgcccccagtatcgccctcagtaccggcagcggcggttcccgccttaccacgtgggacagacctttgaccgtcgctcacgggtcttaccccatcccaacagaatacaggctggtgagattggagagatgaaggatggagtcccagagggagcacaacttcagggaccggttcatcgaaatccaacttaccgcccaaggtaccgtagcaggggacctcctcgcccacgacctgccccagcagttggagaggctgaagataaagaaaatcagcaagccaccagtggtccaaaccagccgtctgttcgccgtggataccggcgtccctacaattaccggcgtcgcccgcgtcctcctaacgctccttcacaagatggcaaagaggccaaggcaggtgaagcaccaactgagaaccctgctccacccacccagcagagcagtgctgagtaacaccaggctcctcaggcaccttcaccatcggcaggtgacctaaagaattaatgaccattcagaaataaagcaaaaagcaggccacaaccttaaccaacaccaaagaaacatccaagcaataaagtggaagactaaccaagatttggacattggaatgtttactgttattctttaagaaacaactacaaaaagaaaatgtcaacaaatttttccagcaagctgagaacctgggaattcctgcacggaagacaagagagtagcctctccagtttcagcaaccgctaggtttctattttttttcctggtttttactgttttggtaatatatatattgaaacaagaaatattaataccacatggggagaaccccaaccaaagaaatctgaaatatatagtaaatgcttttttttccgtttttgttcattttggatgctggtgctaaacctccaagtgtcatgatttaaaaaaaaaaaaaatttatgtccttcttatttatttctaggatgaggggaggataacatttttgctttcttatgtgactctctttgaaaatgtgcagtaagaaattcctcaaaaataaaatttttacccttcagagggacagaatgtttaaaaaa

SEQ ID NO: 325300 - DNA, 1841 bp, Homo sapiens
ccgggccggtgcgccgcctagaaaaacttgtgcggggccatttttggggcagtaagatcgagcgaggagcccaagagcgagcgcgcagcacgaagctcgagccgcctccgccgcgcgaccccacctcggccgccgccgcctgcgccgcgagatccgccccggcctccccgagagcgagccccggccgccgcgaccaccagccgcgctaaccgccgaccaaccgccaccgaggcgcctgagcgagagcagaggaggaggaggcatgagtgaggcgggcgaggccaccaccaccaccaccaccaccctcccgcaggcgcctctttagccaccgccgccggcagcgaagacgcggagaaaaaagttctcgccaccaaagtccttggcactgtcaaatggttcaacgtcagaaatggatatggatttataaatcgaaatgacaccaaagaagatgtatttgtacatcagactgccatcaagaagaataacccacggaaatatctgcgcagtgtaggagatggagaaactgtagagtttgatgtggttgaaggagagaagggtgcagaagctgccaatgtgactggcccggatggagttcctgtggaagggagtcgttacgctgcagatcggcgccgttacagacgtggctactatggaaggcgccgtggccctccccggaattacgctggggaggaggaggaggaagggagcggcagcagtgaaggatttgacccccctgccactgataggcagttctctggggcccggaatcagctgcgccgcccccagtatcgccctcagtaccggcagcggcggttcccgccttaccacgtgggacagacctttgaccgtcgctcacgggtcttaccccatcccaacagaatacaggctggtgagattggagagatgaaggatggagtcccagagggagcacaacttcagggaccggttcatcgaaatccaacttaccgcccaaggtaccgtagcaggggacctcctcgcccacgacctgccccagcagttggagaggctgaagataaagaaaatcagcaagccaccagtggtccaaaccagccgtctgttcgccgtggataccggcgtccctacaattaccggcgtcgcccgcgtcctcctaacgctccttcacaagatggcaaagaggccaaggcaggtgaagcaccaactgagaaccctgctccacccacccagcagagcagtgctgagtaacaccaggctcctcaggcaccttcaccatcggcaggtgacctaaagaattaatgaccattcagaaataaagcaaaaagcaggccacaaccttaaccaacaccaaagaaacatccaagcaataaagtggaagactaaccaagatttggacattggaatgtttactgttattctttaagaaacaactacaaaaagaaaatgtcaacaaatttttccagcaagctgagaacctgggaattcctgcacggaagacaagagagtagcctctccagtttcagcaaccgctaggtttctattttttttcctggtttttactgttttggtaatatatatattgaaacaagaaatattaataccacatggggagaaccccaaccaaagaaatctgaaatatatagtaaatgcttttttttccgtttttgttcattttggatgctggtgctaaacctccaagtgtcatgatttaaaaaaaaaaaaaatttatgtccttcttatttatttctaggatgaggggaggataacatttttgctttcttatgtgactctctttgaaaatgtgcagtaagaaattcctcaaaaataaaatttttacccttcagagggacagaatgtttaaaaaa

SEQ ID NO: 325301 - DNA, 2063 bp, Homo sapiens
ccgggccggtgcgccgcctagaaaaacttgtgcggggccatttttggggcagtaagatcgagcgaggagcccaagagcgagcgcgcagcacgaagctcgagccgcctccgccgcgcgaccccacctcggccgccgccgcctgcgccgcgagatccgccccggcctccccgagagcgagccccggccgccgcgaccaccagccgcgctaaccgccgaccaaccgccaccgaggcgcctgagcgagagcagaggaggaggaggcatgagtgaggcgggcgaggccaccaccaccaccaccaccaccctcccgcaggctccgacggaggcggccgccgcggctccccaggaccccgcgcccaagagcccggtgggcagcggtgcgccccaggccgcggccccggcgcccgccgcccacgtcgcaggaaaccccggtggggacgcggcccccgcagccacgggcaccgcggccgccgcctctttagccaccgccgccggcagcgaagacgcggagaaaaaagttctcgccaccaaagtccttggcactgtcaaatggttcaacgtcagaaatggatatggatttataaatcgaaatgacaccaaagaagatgtatttgtacatcagcatcctgttctcctgatgtggttcctccttagtgtttgcctggagccaatctggcttctgcctggactgccatcaagaagaataacccacggaaatatctgcgcagtgtaggagatggagaaactgtagagtttgatgtggttgaaggagagaagggtgcagaagctgccaatgtgactggcccggatggagttcctgtggaagggagtcgttacgctgcagatcggcgccgttacagacgtggctactatggaaggcgccgtggccctccccggaattacgctggggaggaggaggaggaagggagcggcagcagtgaaggatttgacccccctgccactgataggcagttctctggggcccggaatcagctgcgccgcccccagtatcgccctcagtaccggcagcggcggttcccgccttaccacgtgggacagacctttgaccgtcgctcacgggtcttaccccatcccaacagaatacaggctggtgagattggagagatgaaggatggagtcccagagggagcacaacttcagggaccggttcatcgaaatccaacttaccgcccaaggtaccgtagcaggggacctcctcgcccacgacctgccccagcagttggagaggctgaagataaagaaaatcagcaagccaccagtggtccaaaccagccgtctgttcgccgtggataccggcgtccctacaattaccggcgtcgcccgcgtcctcctaacgctccttcacaagatggcaaagaggccaaggcaggtgaagcaccaactgagaaccctgctccacccacccagcagagcagtgctgagtaacaccaggctcctcaggcaccttcaccatcggcaggtgacctaaagaattaatgaccattcagaaataaagcaaaaagcaggccacaaccttaaccaacaccaaagaaacatccaagcaataaagtggaagactaaccaagatttggacattggaatgtttactgttattctttaagaaacaactacaaaaagaaaatgtcaacaaatttttccagcaagctgagaacctgggaattcctgcacggaagacaagagagtagcctctccagtttcagcaaccgctaggtttctattttttttcctggtttttactgttttggtaatatatatattgaaacaagaaatattaataccacatggggagaaccccaaccaaagaaatctgaaatatatagtaaatgcttttttttccgtttttgttcattttggatgctggtgctaaacctccaagtgtcatgatttaaaaaaaaaaaaaatttatgtccttcttatttatttctaggatgaggggaggataacatttttgctttcttatgtgactctctttgaaaatgtgcagtaagaaattcctcaaaaataaaatttttacccttcagagggacagaatgtttaaaaaa

SEQ ID NO: 325302 - DNA, 1964 bp, Homo sapiens
ccgggccggtgcgccgcctagaaaaacttgtgcggggccatttttggggcagtaagatcgagcgaggagcccaagagcgagcgcgcagcacgaagctcgagccgcctccgccgcgcgaccccacctcggccgccgccgcctgcgccgcgagatccgccccggcctccccgagagcgagccccggccgccgcgaccaccagccgcgctaaccgccgaccaaccgccaccgaggcgcctgagcgagagcagaggaggaggaggcatgagtgaggcgggcgaggccaccaccaccaccaccaccaccctcccgcaggctccgacggaggcggccgccgcggctccccaggaccccgcgcccaagagcccggtgggcagcggtgcgccccaggccgcggccccggcgcccgccgcccacgtcgcaggaaaccccggtggggacgcggcccccgcagccacgggcaccgcggccgccgcctctttagccaccgccgccggcagcgaagacgcggagaaaaaagttctcgccaccaaagtccttggcactgtcaaatggttcaacgtcagaaatggatatggatttataaatcgactgccatcaagaagaataacccacggaaatatctgcgcagtgtaggagatggagaaactgtagagtttgatgtggttgaaggagagaagggtgcagaagctgccaatgtgactggcccggatggagttcctgtggaagggagtcgttacgctgcagatcggcgccgttacagacgtggctactatggaaggcgccgtggccctccccggaattacgctggggaggaggaggaggaagggagcggcagcagtgaaggatttgacccccctgccactgataggcagttctctggggcccggaatcagctgcgccgcccccagtatcgccctcagtaccggcagcggcggttcccgccttaccacgtgggacagacctttgaccgtcgctcacgggtcttaccccatcccaacagaatacaggctggtgagattggagagatgaaggatggagtcccagagggagcacaacttcagggaccggttcatcgaaatccaacttaccgcccaaggtaccgtagcaggggacctcctcgcccacgacctgccccagcagttggagaggctgaagataaagaaaatcagcaagccaccagtggtccaaaccagccgtctgttcgccgtggataccggcgtccctacaattaccggcgtcgcccgcgtcctcctaacgctccttcacaagatggcaaagaggccaaggcaggtgaagcaccaactgagaaccctgctccacccacccagcagagcagtgctgagtaacaccaggctcctcaggcaccttcaccatcggcaggtgacctaaagaattaatgaccattcagaaataaagcaaaaagcaggccacaaccttaaccaacaccaaagaaacatccaagcaataaagtggaagactaaccaagatttggacattggaatgtttactgttattctttaagaaacaactacaaaaagaaaatgtcaacaaatttttccagcaagctgagaacctgggaattcctgcacggaagacaagagagtagcctctccagtttcagcaaccgctaggtttctattttttttcctggtttttactgttttggtaatatatatattgaaacaagaaatattaataccacatggggagaaccccaaccaaagaaatctgaaatatatagtaaatgcttttttttccgtttttgttcattttggatgctggtgctaaacctccaagtgtcatgatttaaaaaaaaaaaaaatttatgtccttcttatttatttctaggatgaggggaggataacatttttgctttcttatgtgactctctttgaaaatgtgcagtaagaaattcctcaaaaataaaatttttacccttcagagggacagaatgtttaaaaaa

SEQ ID NO: 325303 - DNA, 1479 bp, Homo sapiens
ggaggaaaatctgaggctctgattacacaccatgtgattcagaaagagacagaggaacgggatgtttctaaatgacaccaaagaagatgtatttgtacatcagactgccatcaagaagaataacccacggaaatatctgcgcagtgtaggagatggagaaactgtagagtttgatgtggttgaaggagagaagggtgcagaagctgccaatgtgactggcccggatggagttcctgtggaagggagtcgttacgctgcagatcggcgccgttacagacgtggctactatggaaggcgccgtggccctccccggaattacgctggggaggaggaggaggaagggagcggcagcagtgaaggatttgacccccctgccactgataggcagttctctggggcccggaatcagctgcgccgcccccagtatcgccctcagtaccggcagcggcggttcccgccttaccacgtgggacagacctttgaccgtcgctcacgggtcttaccccatcccaacagaatacaggctggtgagattggagagatgaaggatggagtcccagagggagcacaacttcagggaccggttcatcgaaatccaacttaccgcccaaggtaccgtagcaggggacctcctcgcccacgacctgccccagcagttggagaggctgaagataaagaaaatcagcaagccaccagtggtccaaaccagccgtctgttcgccgtggataccggcgtccctacaattaccggcgtcgcccgcgtcctcctaacgctccttcacaagatggcaaagaggccaaggcaggtgaagcaccaactgagaaccctgctccacccacccagcagagcagtgctgagtaacaccaggctcctcaggcaccttcaccatcggcaggtgacctaaagaattaatgaccattcagaaataaagcaaaaagcaggccacaaccttaaccaacaccaaagaaacatccaagcaataaagtggaagactaaccaagatttggacattggaatgtttactgttattctttaagaaacaactacaaaaagaaaatgtcaacaaatttttccagcaagctgagaacctgggaattcctgcacggaagacaagagagtagcctctccagtttcagcaaccgctaggtttctattttttttcctggtttttactgttttggtaatatatatattgaaacaagaaatattaataccacatggggagaaccccaaccaaagaaatctgaaatatatagtaaatgcttttttttccgtttttgttcattttggatgctggtgctaaacctccaagtgtcatgatttaaaaaaaaaaaaaatttatgtccttcttatttatttctaggatgaggggaggataacatttttgctttcttatgtgactctctttgaaaatgtgcagtaagaaattcctcaaaaataaaatttttacccttcagagggacagaatgtttaaaaaa

SEQ ID NO: 325304 - DNA, 1899 bp, Homo sapiens
gttagcctcgtgttaactcatctgcaaaatgggaggagaggggggaggccagattattactaatacgttctgattcttgagataattttgtttactcgtcagaaatatttatccccttggcattttaatttgtttttctttatcactgcctcctttcctcctccggagattcagagaatctctgaagcttaatggtttgaggtaattaatacatctgatatgatcaggtgatcagcctgtaacagtagtgtgtagtcactgcacacactgcagttatagaaaaaacatgttctgtttaatccacctgtcaagatgaatagcacaaatcaaggaagtaatgtggaatatagttttatagtgctttcttgttgttgtgttggagatccaacttagtgggagaatggtggaaaaataagaatcggtcaacagtttcttcaagttcactctggtgtacttgaaagcagtgaaatctgtggccaatattgaaatatacatcgaataaaattttctgttctctttccagactgccatcaagaagaataacccacggaaatatctgcgcagtgtaggagatggagaaactgtagagtttgatgtggttgaaggagagaagggtgcagaagctgccaatgtgactggcccggatggagttcctgtggaagggagtcgttacgctgcagatcggcgccgttacagacgtggctactatggaaggcgccgtggccctccccggaattacgctggggaggaggaggaggaagggagcggcagcagtgaaggatttgacccccctgccactgataggcagttctctggggcccggaatcagctgcgccgcccccagtatcgccctcagtaccggcagcggcggttcccgccttaccacgtgggacagacctttgaccgtcgctcacgggtcttaccccatcccaacagaatacaggctggtgagattggagagatgaaggatggagtcccagagggagcacaacttcagggaccggttcatcgaaatccaacttaccgcccaaggtaccgtagcaggggacctcctcgcccacgacctgccccagcagttggagaggctgaagataaagaaaatcagcaagccaccagtggtccaaaccagccgtctgttcgccgtggataccggcgtccctacaattaccggcgtcgcccgcgtcctcctaacgctccttcacaagatggcaaagaggccaaggcaggtgaagcaccaactgagaaccctgctccacccacccagcagagcagtgctgagtaacaccaggctcctcaggcaccttcaccatcggcaggtgacctaaagaattaatgaccattcagaaataaagcaaaaagcaggccacaaccttaaccaacaccaaagaaacatccaagcaataaagtggaagactaaccaagatttggacattggaatgtttactgttattctttaagaaacaactacaaaaagaaaatgtcaacaaatttttccagcaagctgagaacctgggaattcctgcacggaagacaagagagtagcctctccagtttcagcaaccgctaggtttctattttttttcctggtttttactgttttggtaatatatatattgaaacaagaaatattaataccacatggggagaaccccaaccaaagaaatctgaaatatatagtaaatgcttttttttccgtttttgttcattttggatgctggtgctaaacctccaagtgtcatgatttaaaaaaaaaaaaaatttatgtccttcttatttatttctaggatgaggggaggataacatttttgctttcttatgtgactctctttgaaaatgtgcagtaagaaattcctcaaaaataaaatttttacccttcagagggacagaatgtttaaaaaa

SEQ ID NO: 325305 - DNA, 1917 bp, Homo sapiens
tatattagaaagtaaaataaacttaaaatgttaattgattaaaaataactatatgttcatgaaaataacagtttttatggatctctgatgtatggtttaatagaagatagctggattctcacatctgtttctgcattcagtctgctgagagaccacatgtcattgtagcctttgggagaccccaccatatacttctgagagaatgcctgggaaaggcaaatagcatcttagtaatattatggcaatagtttgacctcgctgaccccctggaagttttcagaaatcccatccacactttacagacttgtaggaagaataccacttgggtcaaatatgttggtaacatcataaaatgtattcttttttggcttttccctgacattgcctcagtggatggtaaatgctgggagacacgcatttgatggagcaaaaattataaaccttgcagatactcttcgggtggttggttagctgatacgagttctaatgagatgactattaaattgattgtagattgattgctcttgcttttctgcttcttggtattttatctgcacagatctactctaatcttaatgtagtttatcccaggcaatcacatgataatctgggttaaatgcattttgtctgtataatggaaaggattatattgctttggggagattttattttggtgatattcatcctaaatggtgttctttggttctttccttgctaaaacttcttctgaatctctgtttctttgcttcgctagtacgctggggaggaggaggaggaagggagcggcagcagtgaaggatttgacccccctgccactgataggcagttctctggggcccggaatcagctgcgccgcccccagtatcgccctcagtaccggcagcggcggttcccgccttaccacgtgggacagacctttgaccgtcgctcacgggtcttaccccatcccaacagaatacaggctggtgagattggagagatgaaggatggagtcccagagggagcacaacttcagggaccggttcatcgaaatccaacttaccgcccaaggtaccgtagcaggggacctcctcgcccacgacctgccccagcagttggagaggctgaagataaagaaaatcagcaagccaccagtggtccaaaccagccgtctgttcgccgtggataccggcgtccctacaattaccggcgtcgcccgcgtcctcctaacgctccttcacaagatggcaaagaggccaaggcaggtgaagcaccaactgagaaccctgctccacccacccagcagagcagtgctgagtaacaccaggctcctcaggcaccttcaccatcggcaggtgacctaaagaattaatgaccattcagaaataaagcaaaaagcaggccacaaccttaaccaacaccaaagaaacatccaagcaataaagtggaagactaaccaagatttggacattggaatgtttactgttattctttaagaaacaactacaaaaagaaaatgtcaacaaatttttccagcaagctgagaacctgggaattcctgcacggaagacaagagagtagcctctccagtttcagcaaccgctaggtttctattttttttcctggtttttactgttttggtaatatatatattgaaacaagaaatattaataccacatggggagaaccccaaccaaagaaatctgaaatatatagtaaatgcttttttttccgtttttgttcattttggatgctggtgctaaacctccaagtgtcatgatttaaaaaaaaaaaaaatttatgtccttcttatttatttctaggatgaggggaggataacatttttgctttcttatgtgactctctttgaaaatgtgcagtaagaaattcctcaaaaataaaatttttacccttcagagggacagaatgtttaaaaaa

SEQ ID NO: 325306 - DNA, 1269 bp, Homo sapiens
  misc_feature (82)..(82): n is a, c, g, or t
  misc_feature (100)..(100): n is a, c, g, or t
gctgcagtcgatctagagatccccgaccaatgttcaccgtcggaatggatatggatttataaatcgaaatgacaccaaagangatgtatttgtacatcanactgccatcaagaagaataacccacggaaatatctgcgcagtgtaggagatggagaaactgtagagtttgatgtggttgaaggagagaagggtgcagaagctgccaatgtgactggcccggatggagttcctgtggaagggagtcgttacgctgcagatcggcgccgttacagacgtggctactatggaaggcgccgtggccctccccggaatgctggtgagattggagagatgaaggatggagtcccagagggagcacaacttcagggaccggttcatcgaaatccaacttaccgcccaaggtaccgtagcaggggacctcctcgcccacgacctgccccagcagttggagaggctgaagataaagaaaatcagcaagccaccagtggtccaaaccagccgtctgttcgccgtggataccggcgtccctacaattaccggcgtcgcccgcgtcctcctaacgctccttcacaagatggcaaagaggccaaggcaggtgaagcaccaactgagaaccctgctccacccacccagcagagcagtgctgagtaacaccaggctcctcaggcaccttcaccatcggcaggtgacctaaagaattaatgaccattcagaaataaagcaaaaagcaggccacaaccttaaccaacaccaaagaaacatccaagcaataaagtggaagactaaccaagatttggacattggaatgtttactgttattctttaagaaacaactacaaaaagaaaatgtcaacaaatttttccagcaagctgagaacctgggaattcctgcacggaagacaagagagtagcctctccagtttcagcaaccgctaggtttctattttttttcctggtttttactgttttggtaatatatatattgaaacaagaaatattaataccacatggggagaaccccaaccaaagaaatctgaaatatatagtaaatgcttttttttccgtttttgttcattttggatgctggtgctaaacctccaagtgtcatgatttaaaaaaaaaaaaaatttatgtccttcttatttatttctaggatgaggggaggataacatttttgctttcttatgtgactctctttgaaaatgtgcagtaagaaattcctcaaaaataaaatttttacccttcagagggacagaatgtttaaaaaa

SEQ ID NO: 325307 - DNA, 1939 bp, Homo sapiens
ccgggccggtgcgccgcctagaaaaacttgtgcggggccatttttggggcagtaagatcgagcgaggagcccaagagcgagcgcgcagcacgaagctcgagccgcctccgccgcgcgaccccacctcggccgccgccgcctgcgccgcgagatccgccccggcctccccgagagcgagccccggccgccgcgaccaccagccgcgctaaccgccgaccaaccgccaccgaggcgcctgagcgagagcagaggaggaggaggcatgagtgaggcgggcgaggccaccaccaccaccaccaccaccctcccgcaggctccgacggaggcggccgccgcggctccccaggaccccgcgcccaagagcccggtgggcagcggtgcgccccaggccgcggccccggcgcccgccgcccacgtcgcaggaaaccccggtggggacgcggcccccgcagccacgggcaccgcggccgccgcctctttagccaccgccgccggcagcgaagacgcggagaaaaaagttctcgccaccaaagtccttggcactgtcaaatggttcaacgtcagaaatggatatggatttataaatcgaaatgacaccaaagaagatgtatttgtacatcagactgccatcaagaagaataacccacggaaatatctgcgcagtgtaggagatggagaaactgtagagtttgatgtggttgaaggagagaagggtgcagaagctgccaatgtgactggcccggatggagttcctgtggaagggagtcgttacgctgcagatcggcgccgttacagacgtggctactatggaaggcgccgtggccctccccggaattacgctggggaggaggaggaggaagggagcggcagcagtgaaggatttgacccccctgccactgataggcagttctctggggcccggaatcagctgcgccgcccccagtatcgccctcagtaccggcagcggcggttcccgccttaccacgtgggacagacctttgaccgtcgctcacgggtcttaccccatcccaacagaatacaggctggtgagattggagagatgaaggatggagtcccagagggagcacaacttcagggaccggttcatcgaaatccaacttaccgcccaaggtaccgtagcaggggacctcctcgcccacgacctgccccagcagttggagaggctgaagataaagaaaatcagcaagccaccagtggtccaaaccagccgtctgttcgccgtggataccggcgtccctacaattaccggcgtcgcccgcgtcctcctaacgctccttcacaagatggcaaagaggccaaggcaggtgaagcaccaactgagaaccctgctccacccacccagcagagcagtgctgagtaacaccaggctcctcaggcaccttcaccatcggcaggtgacctaaagaattaatgaccattcagaaataaagcaaaaagcaggccacaaccttaaccaacaccaaagaaacatccaagcaataaagtggaagactaaccaagatttggacattggaatgtttactgttattctttaagaaacaactacaaaaagaaaaagtagcctctccagtttcagcaaccgctaggtttctattttttttcctggtttttactgttttggtaatatatatattgaaacaagaaatattaataccacatggggagaaccccaaccaaagaaatctgaaatatatagtaaatgcttttttttccgtttttgttcattttggatgctggtgctaaacctccaagtgtcatgatttaaaaaaaaaaaaaatttatgtccttcttatttatttctaggatgaggggaggataacatttttgctttcttatgtgactctctttgaaaatgtgcagtaagaaattcctcaaaaataaaatttttacccttcagagggacagaatgtttaaaaaa

SEQ ID NO: 325308 - DNA, 2006 bp, Homo sapiens
caacttcttcctgaatgatgtttatgctaccttgaaatttgtcagtatggctttattgaaggataaaaagtatattatattgggaaaggattccaccaatataattgtaaaaggatcgtatcctttttcttcacaaggttccctccagctttaggcataatcactaatgattaagtactagggactttgaaaataaaagagacggcatagaaatgtcttactggaacaaaaaggattcagtagcgtgtgaggctcagctttgtcagtccctggatatgtgatcttggaaagtcatatttgaccttttttaacctataaaagcagcacttttatatagctcagccgtatactttatcatgtaaacctcttggttttcttgttataaatctcatccacagaattaccattcaaattaaatatttaattttaaaaccgactagcacaggctctggcacataataatgtttcttctcatgtttaattcccttagtctctgctaaattctgttcatggaaggcagataccagactactcttcttttcttttttaattttcctattcttagtgcttatcaaagggcctgataggaacagagtatgtgttcagtatatgtatgttccttacaaatatgtattcaaatgaaaggggaaaatgatggaaaattaagatttttttttcgtgaaacctctattccatttgttgcattgacctgcgaataattctagcaataagtactcatcacttgacttttttttttttttaattttgagatggagtctccctctgtcacccaggctggagtgtgccaatctcgggttgctgcaacctctgcctcatggattcaagcaattcttatgcctcagcctcccaggtagctgggattacaggcttgtgccaccacgcccggctaatttttgtatttttagtagagatggagtttcaccatgttggccaggctggtctcaaactcctgacctcaagtgatccgcctgcctcagcctcctgaagtgctgggattacaggggtgagccatcatgcctggccctgatcacttgactttttaatttttaaaaataaataaaaccttattttctggagaagccctgtcctgttggcacctgttctattttcttctgtgttccctacagcaggggacctcctcgcccacgacctgccccagcagttggagaggctgaagataaagaaaatcagcaagccaccagtggtccaaaccagccgtctgttcgccgtggataccggcgtccctacaattaccggcgtcgcccgcgtcctcctaacgctccttcacaagatggcaaagaggccaaggcaggtgaagcaccaactgagaaccctgctccacccacccagcagagcagtgctgagtaacaccaggctcctcaggcaccttcaccatcggcaggtgacctaaagaattaatgaccattcagaaataaagcaaaaagcaggccacaaccttaaccaacaccaaagaaacatccaagcaataaagtggaagactaaccaagatttggacattggaatgtttactgttattctttaagaaacaactacaaaaagaaaatgtcaacaaatttttccagcaagctgagaacctgggaattcctgcacggaagacaagagagtagcctctccagtttcagcaaccgctaggtttctattttttttcctggtttttactgttttggtaatatatatattgaaacaagaaatattaataccacatggggagaaccccaaccaaagaaatctgaaatatatagtaaatgcttttttttccgtttttgttcattttggatgctggtgctaaacctccaagtgtcatgatttaaaaaaaaaaaaaatttatgtccttcttatttatttctaggatgaggggaggataacatttttgctttcttatgtgactctctttgaaaatgtgcagtaagaaattcctcaaaaataaaatttttacccttcagagggacagaatgtttaaaaaa

SEQ ID NO: 325309 - DNA, 1874 bp, Homo sapiens
  misc_feature (1874)..(1874): n is a, c, g, or t
ccgggccggtgcgccgcctagaaaaacttgtgcggggccatttttggggcagtaagatcgagcgaggagcccaagagcgagcgcgcagcacgaagctcgagccgcctccgccgcgcgaccccacctcggccgccgccgcctgcgccgcgagatccgccccggcctccccgagagcgagccccggccgccgcgaccaccagccgcgctaaccgccgaccaaccgccaccgaggcgcctgagcgagagcagaggaggaggaggcatgagtgaggcgggcgaggccaccaccaccaccaccaccaccctcccgcaggctccgacggaggcggccgccgcggctccccaggaccccgcgcccaagagcccggtgggcagcggtgcgccccaggccgcggccccggcgcccgccgcccacgtcgcaggaaaccccggtggggacgcggcccccgcagccacgggcaccgcggccgccgcctctttagccaccgccgccggcagcgaagacgcggagaaaaaagttctcgccaccaaagtccttggcactgtcaaatggttcaacgtcagaaatggatatggatttataaatcgaaatgacaccaaagaagatgtatttgtacatcagactgccatcaagaagaataacccacggaaatatctgcgcagtgtaggagatggagaaactgtagagtttgatgtggttgaaggagagaagggtgcagaagctgccaatgtgactggcccggatggagttcctgtggaagggagtcgttacgctgcagatcggcgccgttacagacgtggctactatggaaggcgccgtggccctccccggaattacgctggggaggaggaggaggaagggagcggcagcagtgaaggatttgacccccctgccactgataggcagttctctggggcccggaatcagctgcgccgcccccagtatcgccctcagtaccggcagcggcggttcccgccttaccacgtgggacagacctttgaccgtcgctcacgggtcttaccccatcccaacagaatacaggctggtgagattggagagatgaaggatggagtcccagagggagcacaacttcagggaccggttcatcgaaatccaacttaccgcccaaggtaccgtagcaggggacctcctcgcccacgacctgccccagcagttggagaggctgaagataaagaaaatcagcaagccaccagtggtccaaaccagccgtctgttcgccgtggataccggcgtccctacaattaccggcgtcgcccgcgtcctcctaacgctccttcacaagatggcaaagaggccaaggcaggtgaagcaccaactgagaaccctgctccacccacccagcagagcagtgctgagtaacaccaggctcctcaggcaccttcaccatcggcaggtgacctaaagaattaatgaccattcagaaataaagcaaaaagcaggccacaaccttaaccaacaccaaagaaacatccaagcaataaagtggaagactaaccaagatttggacattggaatgtttactgttattctttaagaaacaactacaaaaagaaaaaaaaaaaaaaaaaaactttttgggccgccgggccccgaaaaaattttcaacccctcctgttgggcgcgcggcgggcccccagtattgggtagctttgacacctgtgggcgtaatagagttggtcccctaaggagaaaccctggggtcagagaagaaccggcgttgtggtttcttcccccatataaaaaacccgccgggggggaaccagcgcgttcttgagacaactccaaaagtggggtcacgagaggcaagagggggttatttacacggagtctcaggaggcgaatataattgcgn

SEQ ID NO: 325310 - DNA, 1424 bp, Homo sapiens
ccgggccggtgcgccgcctagaaaaacttgtgcggggccatttttggggcagtaagatcgagcgaggagcccaagagcgagcgcgcagcacgaagctcgagccgcctccgccgcgcgaccccacctcggccgccgccgcctgcgccgcgagatccgccccggcctccccgagagcgagccccggccgccgcgaccaccagccgcgctaaccgccgaccaaccgccaccgaggcgcctgagcgagagcagaggaggaggaggcatgagtgaggcgggcgaggccaccaccaccaccaccaccaccctcccgcaggctccgacggaggcggccgccgcggctccccaggaccccgcgcccaagagcccggtgggcagcggtgcgccccaggccgcggccccggcgcccgccgcccacgtcgcaggaaaccccggtggggacgcggcccccgcagccacgggcaccgcggccgccgcctctttagccaccgccgccggcagcgaagacgcggagaaaaaagttctcgccaccaaagtccttggcactgtcaaatggttcaacgtcagaaatggatatggatttataaatcgaaatgacaccaaagaagatgtatttgtacatcagactgccatcaagaagaataacccacggaaatatctgcgcagtgtaggagatggagaaactgtagagtttgatgtggttgaaggagagaaggtgagaggaaattgtggttgggcaaagaggccaaggcaggtgaagcaccaactgagaaccctgctccacccacccagcagagcagtgctgagtaacaccaggctcctcaggcaccttcaccatcggcaggtgacctaaagaattaatgaccattcagaaataaagcaaaaagcaggccacaaccttaaccaacaccaaagaaacatccaagcaataaagtggaagactaaccaagatttggacattggaatgtttactgttattctttaagaaacaactacaaaaagaaaatgtcaacaaatttttccagcaagctgagaacctgggaattcctgcacggaagacaagagagtagcctctccagtttcagcaaccgctaggtttctattttttttcctggtttttactgttttggtaatatatatattgaaacaagaaatattaataccacatggggagaaccccaaccaaagaaatctgaaatatatagtaaatgcttttttttccgtttttgttcattttggatgctggtgctaaacctccaagtgtcatgatttaaaaaaaaaaaaaatttatgtccttcttatttatttctaggatgaggggaggataacatttttgctttcttatgtgactctctttgaaaatgtgcagtaagaaattcctcaaaaataaaatttttacccttcagagggacagaatgtttaaaaaa

SEQ ID NO: 325311 - DNA, 1305 bp, Homo sapiens
ccgggccggtgcgccgcctagaaaaacttgtgcggggccatttttggggcagtaagatcgagcgaggagcccaagagcgagcgcgcagcacgaagctcgagccgcctccgccgcgcgaccccacctcggccgccgccgcctgcgccgcgagatccgccccggcctccccgagagcgagccccggccgccgcgaccaccagccgcgctaaccgccgaccaaccgccaccgaggcgcctgagcgagagcagaggaggaggaggcatgagtgaggcgggcgaggccaccaccaccaccaccaccaccctcccgcaggctccgacggaggcggccgccgcggctccccaggaccccgcgcccaagagcccggtgggcagcggtgcgccccaggccgcggccccggcgcccgccgcccacgtcgcaggaaaccccggtggggacgcggcccccgcagccacgggcaccgcggccgccgcctctttagccaccgccgccggcagcgaagacgcggagaaaaaagttctcgccaccaaagtccttggcactgtcaaatggttcaacgtcagaaatggatatggatttataaatcgaaatgacaccaaagaagatgtatttgtacatcaggccaaggcaggtgaagcaccaactgagaaccctgctccacccacccagcagagcagtgctgagtaacaccaggctcctcaggcaccttcaccatcggcaggtgacctaaagaattaatgaccattcagaaataaagcaaaaagcaggccacaaccttaaccaacaccaaagaaacatccaagcaataaagtggaagactaaccaagatttggacattggaatgtttactgttattctttaagaaacaactacaaaaagaaaatgtcaacaaatttttccagcaagctgagaacctgggaattcctgcacggaagacaagagagtagcctctccagtttcagcaaccgctaggtttctattttttttcctggtttttactgttttggtaatatatatattgaaacaagaaatattaataccacatggggagaaccccaaccaaagaaatctgaaatatatagtaaatgcttttttttccgtttttgttcattttggatgctggtgctaaacctccaagtgtcatgatttaaaaaaaaaaaaaatttatgtccttcttatttatttctaggatgaggggaggataacatttttgctttcttatgtgactctctttgaaaatgtgcagtaagaaattcctcaaaaataaaatttttacccttcagagggacagaatgtttaaaaaa

SEQ ID NO: 325312 - DNA, 1461 bp, Homo sapiens
ccgggccggtgcgccgcctagaaaaacttgtgcggggccatttttggggcagtaagatcgagcgaggagcccaagagcgagcgcgcagcacgaagctcgagccgcctccgccgcgcgaccccacctcggccgccgccgcctgcgccgcgagatccgccccggcctccccgagagcgagccccggccgccgcgaccaccagccgcgctaaccgccgaccaaccgccaccgaggcgcctgagcgagagcagaggaggaggaggcatgagtgaggcgggcgaggccaccaccaccaccaccaccaccctcccgcaggctccgacggaggcggccgccgcggctccccaggaccccgcgcccaagagcccggtgggcagcggtgcgccccaggccgcggccccggcgcccgccgcccacgtcgcaggaaaccccggtggggacgcggcccccgcagccacgggcaccgcggccgccgcctctttagccaccgccgccggcagcgaagacgcggagaaaaaagttctcgccaccaaagtccttggcactgtcaaatggttcaacgtcagaaatggatatggatttataaatcgaaatgacaccaaagaagatgtatttgtacatcagactgccatcaagaagaataacccacggaaatatctgcgcagtgtaggagatggagaaactgtagagtttgatgtggttgaaggagagaagggtgcagaagctgccaatgtgactggcccggatggagttcctgtggaagggagtcgttacgctgcagatcggcgccgttacagacgtggctactatggaaggcgccgtggccctccccggaattacgctggggaggaggaggaggaagggagcggcagcagtgaaggatttgacccccctgccactgataggcagttctctggggcccggaatcagctgcgccgcccccagtatcgccctcagtaccggcagcggcggttcccgccttaccacgtgggacagacctttgaccgtcgctcacgggtcttaccccatcccaacagaatacaggctggtgagattggagagatgaaggatggagtcccagagggagcacaacttcagggaccggttcatcgaaatccaacttaccgcccaaggtaccgtagcaggggacctcctcgcccacgacctgccccagcagttggagaggctgaagataaagaaaatcagcaagccaccagtggtccaaaccagccgtctgttcgccgtggataccggcgtccctacaattaccggcgtcgcccgcgtcctcctaacgctccttcacaagatggcaaagaggccaaggcaggtgaagcaccaactgagaaccctgctccacccacccagcagagcagtgctgagtaacaccaggctcctcaggcaccttcaccatcggcaggtgacctaaagaattaatgaccattcagaaataaagcaaaaagcag

SEQ ID NO: 325313 - DNA, 818 bp, Homo sapiens
cgagctcgtgtacggggatctctagagtcagatgtgcaggctgccgtttgtgtagcggtggttcagctggagaccgtcgatagtaagcggcgtcgcccgcgtcctcctaacgctccttcacaagatggcaaagaggccaaggcaggtgaagcaccaactgagaaccctgctccacccacccagcagagcagtgctgagtaacaccaggctcctcaggcaccttcaccatcggcaggtgacctaaagaattaatgaccattcagaaataaagcaaaaagcaggccacaaccttaaccaacaccaaagaaacatccaagcaataaagtggaagactaaccaagatttggacattggaatgtttactgttattctttaagaaacaactacaaaaagaaaatgtcaacaaatttttccagcaagctgagaacctgggaattcctgcacggaagacaagagagtagcctctccagtttcagcaaccgctaggtttctattttttttcctggtttttactgttttggtaatatatatattgaaacaagaaatattaataccacatggggagaaccccaaccaaagaaatctgaaatatatagtaaatgcttttttttccgtttttgttcattttggatgctggtgctaaacctccaagtgtcatgatttaaaaaaaaaaaaaatttatgtccttcttatttatttctaggatgaggggaggataacatttttgctttcttatgtgactctctttgaaaatgtgcagtaagaaattcctcaaaaataaaatttttacccttcagagggacagaatgtttaaaaaa

SEQ ID NO: 325314 - DNA, 1484 bp, Homo sapiens
ccgggccggtgcgccgcctagaaaaacttgtgcggggccatttttggggcagtaagatcgagcgaggagcccaagagcgagcgcgcagcacgaagctcgagccgcctccgccgcgcgaccccacctcggccgccgccgcctgcgccgcgagatccgccccggcctccccgagagcgagccccggccgccgcgaccaccagccgcgctaaccgccgaccaaccgccaccgaggcgcctgagcgagagcagaggaggaggaggcatgagtgaggcgggcgaggccaccaccaccaccaccaccaccctcccgcaggctccgacggaggcggccgccgcggctccccaggaccccgcgcccaagagcccggtgggcagcggtgcgccccaggccgcggccccggcgcccgccgcccacgtcgcaggaaaccccggtggggacgcggcccccgcagccacgggcaccgcggccgccgcctctttagccaccgccgccggcagcgaagacgcggagaaaaaagttctcgccaccaaagtccttggcactgtcaaatggttcaacgtcagaaatggatatggatttataaatcgaaatgacaccaaagaagatgtatttgtacatcagactgccatcaagaagaataacccacggaaatatctgcgcagtgtaggagatggagaaactgtagagtttgatgtggttgaaggagagaagggtgcagaagctgccaatgtgactggcccggatggagttcctgtggaagggagtcgttacgctgcagatcggcgccgttacagacgtggctactatggaaggcgccgtggccctccccggaattacgctggggaggaggaggaggaagggagcggcagcagtgaaggatttgacccccctgccactgataggcagttctctggggcccggaatcagctgcgccgcccccagtatcgccctcagtaccggcagcggcggttcccgccttaccacgtgggacagacctttgaccgtcgctcacgggtcttaccccatcccaacagaatacaggctggtgagattggagagatgaaggatggagtcccagagggagcacaacttcagggaccggttcatcgaaatccaacttaccgcccaaggtaccgtagcaggggacctcctcgcccacgacctgccccagcagttggagaggctgaagataaagaaaatcagcaagccaccagtggtccaaaccagccgtctgttcgccgtggataccggcgtccctacaattaccggcgtcgcccgcgtcctcctaacgctccttcacaagatggcaaagaggccaaggcaggtgaagcaccaactgagaaccctgctccacccacccagcagagcagtgctgagtaacaccaggctcctcaggcaccttcaccatcggcaggtttttaaaaaccatggcccatctcagccaaaatataaaaaaaagggcggccctcgcgatctaaactag

SEQ ID NO: 325315 - DNA, 1491 bp, Homo sapiens
ccgggccggtgcgccgcctagaaaaacttgtgcggggccatttttggggcagtaagatcgagcgaggagcccaagagcgagcgcgcagcacgaagctcgagccgcctccgccgcgcgaccccacctcggccgccgccgcctgcgccgcgagatccgccccggcctccccgagagcgagccccggccgccgcgaccaccagccgcgctaaccgccgaccaaccgccaccgaggcgcctgagcgagagcagaggaggaggaggcatgagtgaggcgggcgaggccaccaccaccaccaccaccaccctcccgcaggctccgacggaggcggccgccgcggctccccaggaccccgcgcccaagagcccggtgggcagcggtgcgccccaggccgcggccccggcgcccgccgcccacgtcgcaggaaaccccggtggggacgcggcccccgcagccacgggcaccgcggccgccgcctctttagccaccgccgccggcagcgaagacgcggagaaaaaagttctcgccaccaaagtccttggcactgtcaaatggttcaacgtcagaaatggatatggatttataaatcgaaatgacaccaaagaagatgtatttgtacatcagactgccatcaagaagaataacccacggaaatatctgcgcagtgtaggagatggagaaactgtagagtttgatgtggttgaaggagagaagggtgcagaagctgccaatgtgactggcccggatggagttcctgtggaagggagtcgttacgctgcagatcggcgccgttacagacgtggctactatggaaggcgccgtggccctccccggaattacgctggggaggaggaggaggaagggagcggcagcagtgaaggatttgacccccctgccactgataggcagttctctggggcccggaatcagctgcgccgcccccagtatcgccctcagtaccggcagcggcggttcccgccttaccacgtgggacagacctttgaccgtcgctcacgggtcttaccccatcccaacagaatacaggctggtgagattggagagatgaaggatggagtcccagagggagcacaacttcagggaccggttcatcgaaatccaacttaccgcccaaggtaccgtagcaggggacctcctcgcccacgacctgccccagcagttggagaggctgaagataaagaaaatcagcaagccaccagtggtccaaaccagccgtctgttcgccgtggataccggcgtccctacaattaccggcgtcgcccgcgtcctcctaacgctccttcacaagatggcaaagaggccaaggcaggtgaagcaccaactgagaaccctgctccacccacccagcagagcagtgctgagtaacaccaggctcctcaggcaccttcaccatcggcaggacctaaagaattaatgaccattcttaaagtacactccaggtctgctttctgcgctctacccaacacaccaacaca

SEQ ID NO: 325316 - DNA, 1254 bp, Homo sapiens
ccgggccggtgcgccgcctagaaaaacttgtgcggggccatttttggggcagtaagatcgagcgaggagcccaagagcgagcgcgcagcacgaagctcgagccgcctccgccgcgcgaccccacctcggccgccgccgcctgcgccgcgagatccgccccggcctccccgagagcgagccccggccgccgcgaccaccagccgcgctaaccgccgaccaaccgccaccgaggcgcctgagcgagagcagaggaggaggaggcatgagtgaggcgggcgaggccaccaccaccaccaccaccaccctcccgcaggctccgacggaggcggccgccgcggctccccaggaccccgcgcccaagagcccggtgggcagcggtgcgccccaggccgcggccccggcgcccgccgcccacgtcgcaggaaaccccggtggggacgcggcccccgcagccacgggcaccgcggccgccgcctctttagccaccgccgccggcagcgaagacgcggagaaaaaagttctcgccaccaaagtccttggcactgtcaaatggttcaacgtcagaaatggatatggatttataaatcgaaatgacaccaaagaagatgtatttgtacatcagactgccatcaagaagaataacccacggaaatatctgcgcagtgtaggagatggagaaactgtagagtttgatgtggttgaaggagagaagggtgcagaagctgccaatgtgactggcccggatggagttcctgtggaagggagtcgttacgctgcagatcggcgccgttacagacgtggctactatggaaggcgccgtggccctccccggaatgctggtgagattggagagatgaaggatggagtcccagagggagcacaacttcagggaccggttcatcgaaatccaacttaccgcccaaggtaccgtagcaggggacctcctcgcccacgacctgccccagcagttggagaggctgaagataaagaaaatcagcaagccaccagtggtccaaaccagccgtctgttcgccgtggataccggcgtccctacaattaccggcgtcgcccgcgtcctcctaacgctccttcacaagatggcaaagaggccaaggcaggtgaagcaccaactgagaaccctgctccacccacccagcagagcagtgctgagtaacaccaggctcctcaggcaccttcaccatcggcaggtgacctaaagaattaatgaccattcagaaataaagcaaaaagcag

SEQ ID NO: 325317 - DNA, 2032 bp, Homo sapiens
tggttaaatatttctgggattgacctcattttgataagctttggtgagggtataagcattcagacagagttgatgatactcaacttcttttttctagacaggcagttttttaactactagtaccacttaggaaaactgatgctaaaagtccctaacaaaggcctggttttagtaatcagaaacagtttcagaacctgtttagtaatcagaaacagtagaataaactaaaggattttttttccttccctttttctttgataatcaactttatttattttgaggcggtgcagcatagtgtataagagccaaggtttatctacccattgcaggctctactgtacctctcatttgctgggtgatcttgagcagtttatcctctgtctcagtactatctgctactggtaaaaattaggatactaattatatttactagggtcgttgcaaggattattaagtgaaataacagggagtgtttacaatagggtatggtaaagaataacctctcgtaaaaggatagcttgttattttcttgtcattttctacttttttctgtcttttaaaggtcttggacattttatttacatagaattatagccagaaagatcaactcaattataaattctgggtttgtttttttttaacctataacccttttaactgagactttagttcttatacttcttggttatcaccctttccattagcttttagttaagagagaggttgtaaactcagtgtcaatgctatttttcaaaaattgttaaaatttcatcaatgaagttttgggattattataagttcttgtgtcttaaggccatctgcttttatatccagtgatgtgggattttaatcagccattaattaggtaagcattcactttgaggacaatattctgttttatcttgggtagcatggacagtttgtcacagaaataagttccctattcaaacttggaattagctgattcagagtaacatattaataatataaaaatggccatacccttttatggcgtaacattatttctaggtattgtttctaaggaaataattttaaatattgggaaaaaatatttttacaatttacagtctgtctgacatttggtaaatagctaattgtgatatattcatattaggagatagggtgcagccactaaaatgattttgagtattgttcattagtaatggtaattttcttttatacaattttataaaatttttgctcttatgtactgacttttctggtttataaaaatactttattaaaaagtgagagtttccatttaattaacatatagcttacagatctatacaagatgtgattgtatttagagcatttgaagtactctttttctaattatatgaaaagcatataatttctgcctttttattctttaactcatggttactttgtcactctttataagtttgattttaatttttcccaggtgtgacctaaagaattaatgaccattcagaaataaagcaaaaagcaggccacaaccttaaccaacaccaaagaaacatccaagcaataaagtggaagactaaccaagatttggacattggaatgtttactgttattctttaagaaacaactacaaaaagaaaatgtcaacaaatttttccagcaagctgagaacctgggaattcctgcacggaagacaagagagtagcctctccagtttcagcaaccgctaggtttctattttttttcctggtttttactgttttggtaatatatatattgaaacaagaaatattaataccacatggggagaaccccaaccaaagaaatctgaaatatatagtaaatgcttttttttccgtttttgttcattttggatgctggtgctaaacctccaagtgtcatgatttaaaaaaaaaaaaaatttatgtccttcttatttatttctaggatgaggggaggataacatttttgctttcttatgtgactctctttgaaaatgtgcagtaagaaattcctcaaaaataaaatttttacccttcagagggacagaatgtttaaaaaa

SEQ ID NO: 325318 - DNA, 683 bp, Homo sapiens
  misc_feature (17)..(17): n is a, c, g, or t
  misc_feature (20)..(20): n is a, c, g, or t
  misc_feature (28)..(28): n is a, c, g, or t
  misc_feature (86)..(86): n is a, c, g, or t
ttatattattatgtttnttntgtttttnttgtaatggggggagaaagggttgaaaaaacaagagggaaaggttggtaggagtacgnggaatcaaagacttgtgacctaaagaattaatgaccattcagaaataaagcaaaaagcaggccacaaccttaaccaacaccaaagaaacatccaagcaataaagtggaagactaaccaagatttggacattggaatgtttactgttattctttaagaaacaactacaaaaagaaaatgtcaacaaatttttccagcaagctgagaacctgggaattcctgcacggaagacaagagagtagcctctccagtttcagcaaccgctaggtttctattttttttcctggtttttactgttttggtaatatatatattgaaacaagaaatattaataccacatggggagaaccccaaccaaagaaatctgaaatatatagtaaatgcttttttttccgtttttgttcattttggatgctggtgctaaacctccaagtgtcatgatttaaaaaaaaaaaaaatttatgtccttcttatttatttctaggatgaggggaggataacatttttgctttcttatgtgactctctttgaaaatgtgcagtaagaaattcctcaaaaataaaatttttacccttcagagggacagaatgtttaaaaaa

SEQ ID NO: 325319 - DNA, 653 bp, Homo sapiens
  misc_feature (44)..(44): n is a, c, g, or t
  misc_feature (48)..(49): n is a, c, g, or t
  misc_feature (70)..(70): n is a, c, g, or t
tgaaagttattagtgtgttacacaatatgttaaaaacaaaaaanaaanncccttattgtgtaaatcaggngtgacctaaagaattaatgaccattcagaaataaagcaaaaagcaggccacaaccttaaccaacaccaaagaaacatccaagcaataaagtggaagactaaccaagatttggacattggaatgtttactgttattctttaagaaacaactacaaaaagaaaatgtcaacaaatttttccagcaagctgagaacctgggaattcctgcacggaagacaagagagtagcctctccagtttcagcaaccgctaggtttctattttttttcctggtttttactgttttggtaatatatatattgaaacaagaaatattaataccacatggggagaaccccaaccaaagaaatctgaaatatatagtaaatgcttttttttccgtttttgttcattttggatgctggtgctaaacctccaagtgtcatgatttaaaaaaaaaaaaaatttatgtccttcttatttatttctaggatgaggggaggataacatttttgctttcttatgtgactctctttgaaaatgtgcagtaagaaattcctcaaaaataaaatttttacccttcagagggacagaatgtttaaaaaa

SEQ ID NO: 325320 - DNA, 640 bp, Homo sapiens
cgaatctcccaatagccaaatcacaacacagacaaaacccactccaccttataacgggtgacctaaagaattaatgaccattcagaaataaagcaaaaagcaggccacaaccttaaccaacaccaaagaaacatccaagcaataaagtggaagactaaccaagatttggacattggaatgtttactgttattctttaagaaacaactacaaaaagaaaatgtcaacaaatttttccagcaagctgagaacctgggaattcctgcacggaagacaagagagtagcctctccagtttcagcaaccgctaggtttctattttttttcctggtttttactgttttggtaatatatatattgaaacaagaaatattaataccacatggggagaaccccaaccaaagaaatctgaaatatatagtaaatgcttttttttccgtttttgttcattttggatgctggtgctaaacctccaagtgtcatgatttaaaaaaaaaaaaaatttatgtccttcttatttatttctaggatgaggggaggataacatttttgctttcttatgtgactctctttgaaaatgtgcagtaagaaattcctcaaaaataaaatttttacccttcagagggacagaatgtttaaaaaa

SEQ ID NO: 325321 - DNA, 922 bp, Homo sapiens
ccgggccggtgcgccgcctagaaaaacttgtgcggggccatttttggggcagtaagatcgagcgaggagcccaagagcgagcgcgcagcacgaagctcgagccgcctccgccgcgcgaccccacctcggccgccgccgcctgcgccgcgagatccgccccggcctccccgagagcgagccccggccgccgcgaccaccagccgcgctaaccgccgaccaaccgccaccgaggcgcctgagcgagagcagaggaggaggaggcatgagtgaggcgggcgaggccaccaccaccaccaccaccaccctcccgcaggctccgacggaggcggccgccgcggctccccaggaccccgcgcccaagagcccggtgggcagcggtgcgccccaggccgcggccccggcgcccgccgcccacgtcgcaggaaaccccggtggggacgcggcccccgcagccacgggcaccgcggccgccgcctctttagccaccgccgccggcagcgaagacgcggagaaaaaagttctcgccaccaaagtccttggcactgtcaaatggttcaacgtcagaaatggatatggatttataaatcgaaatgacaccaaagaagatgtatttgtacatcagactgccatcaagaagaataacccacggaaatatctgcgcagtgtaggagatggagaaactgtagagtttgatgtggttgaaggagagaagggtgcagaagctgccaatgtgactggcccggatggagttcctgtggaagggagtcgttacgctgcagatcggcgccgttacagacgtggctactatggaaggcgccgtggccctccccggaatctggggaggaggactttccccttttctgataaccccctccttggtgataggcattgcccctgctcatgttgaattcccctttttttc

SEQ ID NO: 325322 - DNA, 889 bp, Homo sapiens
ccgggccggtgcgccgcctagaaaaacttgtgcggggccatttttggggcagtaagatcgagcgaggagcccaagagcgagcgcgcagcacgaagctcgagccgcctccgccgcgcgaccccacctcggccgccgccgcctgcgccgcgagatccgccccggcctccccgagagcgagccccggccgccgcgaccaccagccgcgctaaccgccgaccaaccgccaccgaggcgcctgagcgagagcagaggaggaggaggcatgagtgaggcgggcgaggccaccaccaccaccaccaccaccctcccgcaggctccgacggaggcggccgccgcggctccccaggaccccgcgcccaagagcccggtgggcagcggtgcgccccaggccgcggccccggcgcccgccgcccacgtcgcaggaaaccccggtggggacgcggcccccgcagccacgggcaccgcggccgccgcctctttagccaccgccgccggcagcgaagacgcggagaaaaaagttctcgccaccaaagtccttggcactgtcaaatggttcaacgtcagaaatggatatggatttataaatcgaaatgacaccaaagaagatgtatttgtacatcaggtaagagggattataaatactacatttgctatgtgaggagagggtgtgtaatcttctgtcagccctttcccaaaagtaagtcctatggattattattttaatctaaactctttctgtgatttattttgcaacaggagttcagttccacattttaagattggcaaataagttcttctaccccatcatattaactgttttcaaatagttttatttttgcagttgtataaagtgatatttggttagaccactttctaatttttaaagcct

SEQ ID NO: 325323 - DNA, 871 bp, Homo sapiens
ccgggccggtgcgccgcctagaaaaacttgtgcggggccatttttggggcagtaagatcgagcgaggagcccaagagcgagcgcgcagcacgaagctcgagccgcctccgccgcgcgaccccacctcggccgccgccgcctgcgccgcgagatccgccccggcctccccgagagcgagccccggccgccgcgaccaccagccgcgctaaccgccgaccaaccgccaccgaggcgcctgagcgagagcagaggaggaggaggcatgagtgaggcgggcgaggccaccaccaccaccaccaccaccctcccgcaggctccgacggaggcggccgccgcggctccccaggaccccgcgcccaagagcccggtgggcagcggtgcgccccaggccgcggccccggcgcccgccgcccacgtcgcaggaaaccccggtggggacgcggcccccgcagccacgggcaccgcggccgccgcctctttagccaccgccgccggcagcgaagacgcggagaaaaaagttctcggtgagtcaggccagggagggcaggggctgccgtagtggggcgggcccagccggccgcggagcacgtgtgggcagctcgcgctacatctcccacccgggctggagacgctgacagcacagggtccccagggatctccgggtccccaggggtctccgggtccccagcgctggccgcctcccttgccggcgctcccaggtgagcgcgctgcgccctgcgctcctggcggccgtgtgcatctcccttctggttccgggccagaaagtttaggtcttaacttctgtctcccagacgggcactgttgcggattcgcgtggtggaaaatgcctgcgtttggagaagaaaggaga

SEQ ID NO: 325324 - DNA, 428 bp, Homo sapiens
  misc_feature (57)..(57): n is a, c, g, or t
ggtaaccgagctcggataccatcagtcaacggaccgccagtgtaggtggtaattcgnacggtaaggagtagcctctccagtttcagcaaccgctaggtttctattttttttcctggtttttactgttttggtaatatatatattgaaacaagaaatattaataccacatggggagaaccccaaccaaagaaatctgaaatatatagtaaatgcttttttttccgtttttgttcattttggatgctggtgctaaacctccaagtgtcatgatttaaaaaaaaaaaaaatttatgtccttcttatttatttctaggatgaggggaggataacatttttgctttcttatgtgactctctttgaaaatgtgcagtaagaaattcctcaaaaataaaatttttacccttcagagggacagaatgtttaaaaaa

SEQ ID NO: 325325 - DNA, 1998 bp, Homo sapiens
ccgggccggtgcgccgcctagaaaaacttgtgcggggccatttttggggcagtaagatcgagcgaggagcccaagagcgagcgcgcagcacgaagctcgagccgcctccgccgcgcgaccccacctcggccgccgccgcctgcgccgcgagatccgccccggcctccccgagagcgagccccggccgccgcgaccaccagccgcgctaaccgccgaccaaccgccaccgaggcgcctgagcgagagcagaggaggaggaggcatgagtgaggcgggcgaggccaccaccaccaccaccaccaccctcccgcaggctccgacggaggcggccgccgcggctccccaggaccccgcgcccaagagcccggtgggcagcggtgcgccccaggccgcggccccggcgcccgccgcccacgtcgcaggaaaccccggtggggacgcggcccccgcagccacgggcaccgcggccgccgcctctttagccaccgccgccggcagcgaagacgcggagaaaaaagttctcgccaccaaagtccttggcactgtcaaatggttcaacgtcagaaatggatatggatttataaatcgaaatgacaccaaagaagatgtatttgtacatcagactgccatcaagaagaataacccacggaaatatctgcgcagtgtaggagatggagaaactgtagagtttgatgtggttgaaggagagaagggtgcagaagctgccaatgtgactggcccggatggagttcctgtggaagggagtcgttacgctgcagatcggcgccgttacagacgtggctactatggaaggcgccgtggccctccccggaattacgctggggaggaggaggaggaagggagcggcagcagtgaaggatttgacccccctgccactgataggcagttctctggggcccggaatcagctgcgccgcccccagtatcgccctcagtaccggcagcggcggttcccgccttaccacgtgggacagacctttgaccgtcgctcacgggtcttaccccatcccaacagaatacaggctggtgagattggagagatgaaggatggagtcccagagggagcacaacttcagggaccggttcatcgaaatccaacttaccgcccaaggtaccgtagcaggggacctcctcgcccacgacctgccccagcagttggagaggctgaagataaagaaaatcagcaagccaccagtggtccaaaccagccgtctgttcgccgtggataccggcgtccctacaattaccggcgtcgcccgcgtcctcctaacgctccttcacaagatggcaaagaggccaaggcaggtgaagcaccaactgagaaccctgctccacccacccagcagagcagtgctgagtaacaccaggctcctcaggcaccttcaccatcggcaggtgacctaaagaattaatgaccattcagaaataaagcaaaaagcaggccacaaccttaaccaacaccaaagaaacatccaagcaataaagtggaagactaaccaagatttggacattggaatgtttactgttattctttaagaaacaactacaaaaagaaaatgtcaacaaatttttccagcaagctgagaacctgggaattcctgcacggaagacaagagagtagcctctccagtttcagcaaccgctaggtttctattttttttcctggtttttactgttttggtaatatatatattgaaacaagaaatattaataccacatggggagaaccccaaccaaagaaatctgaaatatatagtaaatgcttttttttccgtttttgttcattttggatgctggtgctaaacctccaagtgtcatgatttaaaaaaaaaaaaaatttatgtccttcttatttatttctaggatgaggggaggataacatttttgctttcttatgtgactctctttgaaaatgtgcagtaagaaattcctcaaaaataaaatttttacccttcagagggacagaatgtttaaaaaa

SEQ ID NO: 325326 - DNA, 1977 bp, Homo sapiens
ccgggccggtgcgccgcctagaaaaacttgtgcggggccatttttggggcagtaagatcgagcgaggagcccaagagcgagcgcgcagcacgaagctcgagccgcctccgccgcgcgaccccacctcggccgccgccgcctgcgccgcgagatccgccccggcctccccgagagcgagccccggccgccgcgaccaccagccgcgctaaccgccgaccaaccgccaccgaggcgcctgagcgagagcagaggaggaggaggcatgagtgaggcgggcgaggccaccaccaccaccaccaccaccctcccgcaggctccgacggaggcggccgccgcggctccccaggaccccgcgcccaagagcccggtgggcagcggtgcgccccaggccgcggccccggcgcccgccgcccacgtcgcaggaaaccccggtggggacgcggcccccgcagccacgggcaccgcggccgccgcctctttagccaccgccgccggcagcgaagacgcggagaaaaaagttctcgccaccaaagtccttggcactgtcaaatggttcaacgtcagaaatggatatggatttataaatcgaaatgacaccaaagaagatgtatttgtacatcagactgccatcaagaagaataacccacggaaatatctgcgcagtgtaggagatggagaaactgtagagtttgatgtggttgaaggagagaagggtgcagaagctgccaatgtgactggcccggatggagttcctgtggaagggagtcgttacgctgcagatcggcgccgttacagacgtggctactatggaaggcgccgtggccctccccggaattacgctggggaggaggaggaggaagggagcggcagcagtgaaggatttgacccccctgccactgataggcagttctctggggcccggaatcagctgcgccgcccccagtatcgccctcagtaccggcagcggcggttcccgccttaccacgtgggacagacctttgaccgtcgctcacgggtcttaccccatcccaacagaatacaggctggtgagattggagagatgaaggatggagtcccagagggagcacaacttcagggaccggttcatcgaaatccaacttaccgcccaaggtaccgtagcaggggacctcctcgcccacgacctgccccagcagttggagaggctgaagataaagaaaatcagcaagccaccagtggtccaaaccagccgtctgttcgccgtggataccggcgtccctacaattaccggcgtcgcccgcgtcctcctaacgctccttcacaagatggcaaagaggccaaggcaggtgaagcaccaactgagaaccctgctccacccacccagcagagcagtgctgagtaacaccaggctcctcaggcaccttcaccatcggcaggtgacctaaagaattaatgaccattcagaaataaagcaaaaagcaggccacaaccttaaccaacaccaaagaaacatccaagcaataaagtggaagactaaccaagatttggacattggaatgtttactgttattctttaagaaacaactacaaaaagaaaatgtcaacaaatttttccagcaagctgagaacctgggaattcctgcacggaagacaagagagtagcctctccagtttcagcaaccgctaggtttctattttttttcctggtttttactgttttggtaatatatatattgaaacaagaaatattaataccacatggggagaaccccaaccaaagaaatctgaaatatatagtaaatgcttttttttccgtttttgttcattttggatgctggtgctaaacctccaagtgtcatgatttaaaaaaaaaaaaaatttatgtccttcttatttatttctaggatgaggggaggataacatttttgctttcttatgtgactctctttgaaaatgtgcagtaagaaattcctcaaaaataaaatttttacccttcag

SEQ ID NO: 325327 - DNA, 1791 bp, Homo sapiens
ccgggccggtgcgccgcctagaaaaacttgtgcggggccatttttggggcagtaagatcgagcgaggagcccaagagcgagcgcgcagcacgaagctcgagccgcctccgccgcgcgaccccacctcggccgccgccgcctgcgccgcgagatccgccccggcctccccgagagcgagccccggccgccgcgaccaccagccgcgctaaccgccgaccaaccgccaccgaggcgcctgagcgagagcagaggaggaggaggcatgagtgaggcgggcgaggccaccaccaccaccaccaccaccctcccgcaggctccgacggaggcggccgccgcggctccccaggaccccgcgcccaagagcccggtgggcagcggtgcgccccaggccgcggccccggcgcccgccgcccacgtcgcaggaaaccccggtggggacgcggcccccgcagccacgggcaccgcggccgccgcctctttagccaccgccgccggcagcgaagacgcggagaaaaaagttctcgccaccaaagtccttggcactgtcaaatggttcaacgtcagaaatggatatggatttataaatcgaaatgacaccaaagaagatgtatttgtacatcagactgccatcaagaagaataacccacggaaatatctgcgcagtgtaggagatggagaaactgtagagtttgatgtggttgaaggagagaagggtgcagaagctgccaatgtgactggcccggatggagttcctgtggaagggagtcgttacgctgcagatcggcgccgttacagacgtggctactatggaaggcgccgtggccctccccggaatgctggtgagattggagagatgaaggatggagtcccagagggagcacaacttcagggaccggttcatcgaaatccaacttaccgcccaaggtaccgtagcaggggacctcctcgcccacgacctgccccagcagttggagaggctgaagataaagaaaatcagcaagccaccagtggtccaaaccagccgtctgttcgccgtggataccggcgtccctacaattaccggcgtcgcccgcgtcctcctaacgctccttcacaagatggcaaagaggccaaggcaggtgaagcaccaactgagaaccctgctccacccacccagcagagcagtgctgagtaacaccaggctcctcaggcaccttcaccatcggcaggtgacctaaagaattaatgaccattcagaaataaagcaaaaagcaggccacaaccttaaccaacaccaaagaaacatccaagcaataaagtggaagactaaccaagatttggacattggaatgtttactgttattctttaagaaacaactacaaaaagaaaatgtcaacaaatttttccagcaagctgagaacctgggaattcctgcacggaagacaagagagtagcctctccagtttcagcaaccgctaggtttctattttttttcctggtttttactgttttggtaatatatatattgaaacaagaaatattaataccacatggggagaaccccaaccaaagaaatctgaaatatatagtaaatgcttttttttccgtttttgttcattttggatgctggtgctaaacctccaagtgtcatgatttaaaaaaaaaaaaaatttatgtccttcttatttatttctaggatgaggggaggataacatttttgctttcttatgtgactctctttgaaaatgtgcagtaagaaattcctcaaaaataaaatttttacccttcagagggacagaatgtttaaaaaa

SEQ ID NO: 325328 - DNA, 2672 bp, Homo sapiens
ccgggccggtgcgccgcctagaaaaacttgtgcggggccatttttggggcagtaagatcgagcgaggagcccaagagcgagcgcgcagcacgaagctcgagccgcctccgccgcgcgaccccacctcggccgccgccgcctgcgccgcgagatccgccccggcctccccgagagcgagccccggccgccgcgaccaccagccgcgctaaccgccgaccaaccgccaccgaggcgcctgagcgagagcagaggaggaggaggcatgagtgaggcgggcgaggccaccaccaccaccaccaccaccctcccgcaggctccgacggaggcggccgccgcggctccccaggaccccgcgcccaagagcccggtgggcagcggtgcgccccaggccgcggccccggcgcccgccgcccacgtcgcaggaaaccccggtggggacgcggcccccgcagccacgggcaccgcggccgccgcctctttagccaccgccgccggcagcgaagacgcggagaaaaaagttctcgccaccaaagtccttggcactgtcaaatggttcaacgtcagaaatggatatggatttataaatcgaaatgacaccaaagaagatgtatttgtacatcagactgccatcaagaagaataacccacggaaatatctgcgcagtgtaggagatggagaaactgtagagtttgatgtggttgaaggagagaagggtgcagaagctgccaatgtgactggcccggatggagttcctgtggaagggagtcgttacgctgcagatcggcgccgttacagacgtggctactatggaaggcgccgtggccctccccggaatatctctgatgtatggtttaatagaagatagctggattctcacatctgtttctgcattcagtctgctgagagaccacatgtcattgtagcctttgggagaccccaccatatacttctgagagaatgcctgggaaaggcaaatagcatcttagtaatattatggcaatagtttgacctcgctgaccccctggaagttttcagaaatcccatccacactttacagacttgtaggaagaataccacttgggtcaaatatgttggtaacatcataaaatgtattcttttttggcttttccctgacattgcctcagtggatggtaaatgctgggagacacgcatttgatggagcaaaaattataaaccttgcagatactcttcgggtggttggttagctgatacgagttctaatgagatgactattaaattgattgtagattgattgctcttgcttttctgcttcttggtattttatctgcacagatctactctaatcttaatgtagtttatcccaggcaatcacatgataatctgggttaaatgcattttgtctgtataatggaaaggattatattgctttggggagattttattttggtgatattcatcctaaatggtgttctttggttctttccttgctaaaacttcttctgaatctctgtttctttgcttcgctagtacgctggggaggaggaggaggaagggagcggcagcagtgaaggatttgacccccctgccactgataggcagttctctggggcccggaatcagctgcgccgcccccagtatcgccctcagtaccggcagcggcggttcccgccttaccacgtgggacagacctttgaccgtcgctcacgggtcttaccccatcccaacagaatacaggctggtgagattggagagatgaaggatggagtcccagagggagcacaacttcagggaccggttcatcgaaatccaacttaccgcccaaggtaccgtagcaggggacctcctcgcccacgacctgccccagcagttggagaggctgaagataaagaaaatcagcaagccaccagtggtccaaaccagccgtctgttcgccgtggataccggcgtccctacaattaccggcgtcgcccgcgtcctcctaacgctccttcacaagatggcaaagaggccaaggcaggtgaagcaccaactgagaaccctgctccacccacccagcagagcagtgctgagtaacaccaggctcctcaggcaccttcaccatcggcaggtgacctaaagaattaatgaccattcagaaataaagcaaaaagcaggccacaaccttaaccaacaccaaagaaacatccaagcaataaagtggaagactaaccaagatttggacattggaatgtttactgttattctttaagaaacaactacaaaaagaaaatgtcaacaaatttttccagcaagctgagaacctgggaattcctgcacggaagacaagagagtagcctctccagtttcagcaaccgctaggtttctattttttttcctggtttttactgttttggtaatatatatattgaaacaagaaatattaataccacatggggagaaccccaaccaaagaaatctgaaatatatagtaaatgcttttttttccgtttttgttcattttggatgctggtgctaaacctccaagtgtcatgatttaaaaaaaaaaaaaatttatgtccttcttatttatttctaggatgaggggaggataacatttttgctttcttatgtgactctctttgaaaatgtgcagtaagaaattcctcaaaaataaaatttttacccttcagagggacagaatgtttaaaaaa

SEQ ID NO: 325329 - DNA, 1634 bp, Homo sapiens
ccgggccggtgcgccgcctagaaaaacttgtgcggggccatttttggggcagtaagatcgagcgaggagcccaagagcgagcgcgcagcacgaagctcgagccgcctccgccgcgcgaccccacctcggccgccgccgcctgcgccgcgagatccgccccggcctccccgagagcgagccccggccgccgcgaccaccagccgcgctaaccgccgaccaaccgccaccgaggcgcctgagcgagagcagaggaggaggaggcatgagtgaggcgggcgaggccaccaccaccaccaccaccaccctcccgcaggcgcctctttagccaccgccgccggcagcgaagacgcggagaaaaaagttctcgccaccaaagtccttggcactgtcaaatggttcaacgtcagaaatggatatggatttataaatcgaaatgacaccaaagaagatgtatttgtacatcagactgccatcaagaagaataacccacggaaatatctgcgcagtgtaggagatggagaaactgtagagtttgatgtggttgaaggagagaagggtgcagaagctgccaatgtgactggcccggatggagttcctgtggaagggagtcgttacgctgcagatcggcgccgttacagacgtggctactatggaaggcgccgtggccctccccggaatgctggtgagattggagagatgaaggatggagtcccagagggagcacaacttcagggaccggttcatcgaaatccaacttaccgcccaaggtaccgtagcaggggacctcctcgcccacgacctgccccagcagttggagaggctgaagataaagaaaatcagcaagccaccagtggtccaaaccagccgtctgttcgccgtggataccggcgtccctacaattaccggcgtcgcccgcgtcctcctaacgctccttcacaagatggcaaagaggccaaggcaggtgaagcaccaactgagaaccctgctccacccacccagcagagcagtgctgagtaacaccaggctcctcaggcaccttcaccatcggcaggtgacctaaagaattaatgaccattcagaaataaagcaaaaagcaggccacaaccttaaccaacaccaaagaaacatccaagcaataaagtggaagactaaccaagatttggacattggaatgtttactgttattctttaagaaacaactacaaaaagaaaatgtcaacaaatttttccagcaagctgagaacctgggaattcctgcacggaagacaagagagtagcctctccagtttcagcaaccgctaggtttctattttttttcctggtttttactgttttggtaatatatatattgaaacaagaaatattaataccacatggggagaaccccaaccaaagaaatctgaaatatatagtaaatgcttttttttccgtttttgttcattttggatgctggtgctaaacctccaagtgtcatgatttaaaaaaaaaaaaaatttatgtccttcttatttatttctaggatgaggggaggataacatttttgctttcttatgtgactctctttgaaaatgtgcagtaagaaattcctcaaaaataaaatttttacccttcagagggacagaatgtttaaaaaa

SEQ ID NO: 325330 - DNA, 1497 bp, Homo sapiens
atctgcggtgaaaaaagttctcgccaccaaagtccttggcactgtcaaatggttcaacgtcagaaatggatatggatttataaatcgaaatgacaccaaagaagatgtatttgtacatcagactgccatcaagaagaataacccacggaaatatctgcgcagtgtaggagatggagaaactgtagagtttgatgtggttgaaggagagaagggtgcagaagctgccaatgtgactggcccggatggagttcctgtggaagggagtcgttacgctgcagatcggcgccgttacagacgtggctactatggaaggcgccgtggccctccccggaattacgctggggaggaggaggaggaagggagcggcagcagtgaaggatttgacccccctgccactgataggcagttctctggggcccggaatcagctgcgccgcccccagtatcgccctcagtaccggcagcggcggttcccgccttaccacgtgggacagacctttgaccgtcgctcacgggtcttaccccatcccaacagaatacaggctggtgagattggagagatgaaggatggagtcccagagggagcacaacttcagggaccggttcatcgaaatccaacttaccgcccaaggtaccgtagcaggggacctcctcgcccacgacctgccccagcagttggagaggctgaagataaagaaaatcagcaagccaccagtggtccaaaccagccgtctgttcgccgtggataccggcgtccctacaattaccggcgtcgcccgcgtcctcctaacgctccttcacaagatggcaaagaggccaaggcaggtgaagcaccaactgagaaccctgctccacccacccagcagagcagtgctgagtaacaccaggctcctcaggcaccttcaccatcggcaggtgacctaaagaattaatgaccattcagaaataaagcaaaaagcaggccacaaccttaaccaacaccaaagaaacatccaagcaataaagtggaagactaaccaagatttggacattggaatgtttactgttattctttaagaaacaactacaaaaagaaaatgtcaacaaatttttccagcaagctgagaacctgggaattcctgcacggaagacaagagagtagcctctccagtttcagcaaccgctaggtttctattttttttcctggtttttactgttttggtaatatatatattgaaacaagaaatattaataccacatggggagaaccccaaccaaagaaatctgaaatatatagtaaatgcttttttttccgtttttgttcattttggatgctggtgctaaacctccaagtgtcatgatttaaaaaaaaaaaaaatttatgtccttcttatttatttctaggatgaggggaggataacatttttgctttcttatgtgactctctttgaaaatgtgcagtaagaaattcctcaaaaataaaatttttacccttcagagggacagaatgtttaaaaaa

SEQ ID NO: 325331 - DNA, 1998 bp, Homo sapiens
  misc_feature (604)..(604): n is a, c, g, or t
  misc_feature (622)..(622): n is a, c, g, or t
ccgggccggtgcgccgcctagaaaaacttgtgcggggccatttttggggcagtaagatcgagcgaggagcccaagagcgagcgcgcagcacgaagctcgagccgcctccgccgcgcgaccccacctcggccgccgccgcctgcgccgcgagatccgccccggcctccccgagagcgagccccggccgccgcgaccaccagccgcgctaaccgccgaccaaccgccaccgaggcgcctgagcgagagcagaggaggaggaggcatgagtgaggcgggcgaggccaccaccaccaccaccaccaccctcccgcaggctccgacggaggcggccgccgcggctccccaggaccccgcgcccaagagcccggtgggcagcggtgcgccccaggccgcggccccggcgcccgccgcccacgtcgcaggaaaccccggtggggacgcggcccccgcagccacgggcaccgcggccgccgcctctttagccaccgccgccggcagcgaagacgcggagaaaaaagttctcgccaccaaagtccttggcactgtcaaatggttcaacgtcagaaatggatatggatttataaatcgaaatgacaccaaagangatgtatttgtacatcanactgccatcaagaagaataacccacggaaatatctgcgcagtgtaggagatggagaaactgtagagtttgatgtggttgaaggagagaagggtgcagaagctgccaatgtgactggcccggatggagttcctgtggaagggagtcgttacgctgcagatcggcgccgttacagacgtggctactatggaaggcgccgtggccctccccggaattacgctggggaggaggaggaggaagggagcggcagcagtgaaggatttgacccccctgccactgataggcagttctctggggcccggaatcagctgcgccgcccccagtatcgccctcagtaccggcagcggcggttcccgccttaccacgtgggacagacctttgaccgtcgctcacgggtcttaccccatcccaacagaatacaggctggtgagattggagagatgaaggatggagtcccagagggagcacaacttcagggaccggttcatcgaaatccaacttaccgcccaaggtaccgtagcaggggacctcctcgcccacgacctgccccagcagttggagaggctgaagataaagaaaatcagcaagccaccagtggtccaaaccagccgtctgttcgccgtggataccggcgtccctacaattaccggcgtcgcccgcgtcctcctaacgctccttcacaagatggcaaagaggccaaggcaggtgaagcaccaactgagaaccctgctccacccacccagcagagcagtgctgagtaacaccaggctcctcaggcaccttcaccatcggcaggtgacctaaagaattaatgaccattcagaaataaagcaaaaagcaggccacaaccttaaccaacaccaaagaaacatccaagcaataaagtggaagactaaccaagatttggacattggaatgtttactgttattctttaagaaacaactacaaaaagaaaatgtcaacaaatttttccagcaagctgagaacctgggaattcctgcacggaagacaagagagtagcctctccagtttcagcaaccgctaggtttctattttttttcctggtttttactgttttggtaatatatatattgaaacaagaaatattaataccacatggggagaaccccaaccaaagaaatctgaaatatatagtaaatgcttttttttccgtttttgttcattttggatgctggtgctaaacctccaagtgtcatgatttaaaaaaaaaaaaaatttatgtccttcttatttatttctaggatgaggggaggataacatttttgctttcttatgtgactctctttgaaaatgtgcagtaagaaattcctcaaaaataaaatttttacccttcagagggacagaatgtttaaaaaa

SEQ ID NO: 325332 - DNA, 1726 bp, Homo sapiens
ccgggccggtgcgccgcctagaaaaacttgtgcggggccatttttggggcagtaagatcgagcgaggagcccaagagcgagcgcgcagcacgaagctcgagccgcctccgccgcgcgaccccacctcggccgccgccgcctgcgccgcgagatccgccccggcctccccgagagcgagccccggccgccgcgaccaccagccgcgctaaccgccgaccaaccgccaccgaggcgcctgagcgagagcagaggaggaggaggcatgagtgaggcgggcgaggccaccaccaccaccaccaccaccctcccgcaggctccgacggaggcggccgccgcggctccccaggaccccgcgcccaagagcccggtgggcagcggtgcgccccaggccgcggccccggcgcccgccgcccacgtcgcaggaaaccccggtggggacgcggcccccgcagccacgggcaccgcggccgccgcctctttagccaccgccgccggcagcgaagacgcggagaaaaaagttctcgccaccaaagtccttggcactgtcaaatggttcaacgtcagaaatggatatggatttataaatcgaaatgacaccaaagaagatgtatttgtacatcagactgccatcaagaagaataacccacggaaatatctgcgcagtgtaggagatggagaaactgtagagtttgatgtggttgaaggagagaagggtgcagaagctgccaatgtgactggcccggatggagttcctgtggaagggagtcgttacgctgcagatcggcgccgttacagacgtggctactatggaaggcgccgtggccctccccggaattacgctggggaggaggaggaggaagggagcggcagcagtgaaggatttgacccccctgccactgataggcagttctctggggcccggaatcagctgcgccgcccccagtatcgccctcagtaccggcagcggcggttcccgccttaccacgtgggacagacctttgaccgtcgctcacgggtcttaccccatcccaacagaatacaggctggtgagattggagagatgaaggatggagtcccagagggagcacaacttcagggaccggttcatcgaaatccaacttaccgcccaaggtaccgtagcaggggacctcctcgcccacgacctgccccagcagttggagaggctgaagataaagaaaatcagcaagccaccagtggtccaaaccagccgtctgttcgccgtggataccggcgtccctacaattaccggcgtcgcccgcgtcctcctaacgctccttcacaagatggcaaagaggccaaggcaggtgaagcaccaactgagaaccctgctccacccacccagcagagcagtgctgagtaacaccaggctcctcaggcaccttcaccatcggcaggtgacctaaagaattaatgaccattcagaaataaagcaaaaagcaggccacaaccttaaccaacaccaaagaaacatccaagcaataaagtggaagactaaccaagatttggacattggaatgtttactgttattctttaagaaacaactacaaaaagaaaatgtcaacaaatttttccagcaagctgagaacctgggaattcctgcacggaagacaagagagtagcctctccagtttcagcaaccgctaggtttctattttttttcctggagggatgctgtcggtaccgagctcgattctaatcatgcaa

SEQ ID NO: 325333 - DNA, 1237 bp, Homo sapiens
ttgggctgcgtggagaatacttttgcgaggcctactggagacttggattcgaagcccagttgggccgaccagtgtacgctggggaggaggaggaggaagggagcggcagcagtgaaggatttgacccccctgccactgataggcagttctctggggcccggaatcagctgcgccgcccccagtatcgccctcagtaccggcagcggcggttcccgccttaccacgtgggacagacctttgaccgtcgctcacgggtcttaccccatcccaacagaatacaggctggtgagattggagagatgaaggatggagtcccagagggagcacaacttcagggaccggttcatcgaaatccaacttaccgcccaaggtaccgtagcaggggacctcctcgcccacgacctgccccagcagttggagaggctgaagataaagaaaatcagcaagccaccagtggtccaaaccagccgtctgttcgccgtggataccggcgtccctacaattaccggcgtcgcccgcgtcctcctaacgctccttcacaagatggcaaagaggccaaggcaggtgaagcaccaactgagaaccctgctccacccacccagcagagcagtgctgagtaacaccaggctcctcaggcaccttcaccatcggcaggtgacctaaagaattaatgaccattcagaaataaagcaaaaagcaggccacaaccttaaccaacaccaaagaaacatccaagcaataaagtggaagactaaccaagatttggacattggaatgtttactgttattctttaagaaacaactacaaaaagaaaatgtcaacaaatttttccagcaagctgagaacctgggaattcctgcacggaagacaagagagtagcctctccagtttcagcaaccgctaggtttctattttttttcctggtttttactgttttggtaatatatatattgaaacaagaaatattaataccacatggggagaaccccaaccaaagaaatctgaaatatatagtaaatgcttttttttccgtttttgttcattttggatgctggtgctaaacctccaagtgtcatgatttaaaaaaaaaaaaaatttatgtccttcttatttatttctaggatgaggggaggataacatttttgctttcttatgtgactctctttgaaaatgtgcagtaagaaattcctcaaaaataaaatttttacccttcagagggacagaatgtttaaaaaa

SEQ ID NO: 325334 - DNA, 2041 bp, Homo sapiens
  misc_feature (1425)..(1425): n is a, c, g, or t
  misc_feature (1434)..(1434): n is a, c, g, or t
ccgggccggtgcgccgcctagaaaaacttgtgcggggccatttttggggcagtaagatcgagcgaggagcccaagagcgagcgcgcagcacgaagctcgagccgcctccgccgcgcgaccccacctcggccgccgccgcctgcgccgcgagatccgccccggcctccccgagagcgagccccggccgccgcgaccaccagccgcgctaaccgccgaccaaccgccaccgaggcgcctgagcgagagcagaggaggaggaggcatgagtgaggcgggcgaggccaccaccaccaccaccaccaccctcccgcaggctccgacggaggcggccgccgcggctccccaggaccccgcgcccaagagcccggtgggcagcggtgcgccccaggccgcggccccggcgcccgccgcccacgtcgcaggaaaccccggtggggacgcggcccccgcagccacgggcaccgcggccgccgcctctttagccaccgccgccggcagcgaagacgcggagaaaaaagttctcgccaccaaagtccttggcactgtcaaatggttcaacgtcagaaatggatatggatttataaatcgaaatgacaccaaagaagatgtatttgtacatcagactgccatcaagaagaataacccacggaaatatctgcgcagtgtaggagatggagaaactgtagagtttgatgtggttgaaggagagaagggtgcagaagctgccaatgtgactggcccggatggagttcctgtggaagggagtcgttacgctgcagatcggcgccgttacagacgtggctactatggaaggcgccgtggccctccccggaattacgctggggaggaggaggaggaagggagcggcagcagtgaaggatttgacccccctgccactgataggcagttctctggggcccggaatcagctgcgccgcccccagtatcgccctcagtaccggcagcggcggttcccgccttaccacgtgggacagacctttgaccgtcgctcacgggtcttaccccatcccaacagaatacaggctggtgagattggagagatgaaggatggagtcccagagggagcacaacttcagggaccggttcatcgaaatccaacttaccgcccaaggtaccgtagcaggggacctcctcgcccacgacctgccccagcagttggagaggctgaagataaagaaaatcagcaagccaccagtggtccaaaccagccgtctgttcgccgtggataccggcgtccctacaattaccggcgtcgcccgcgtcctcctaacgctccttcacaagatggcaaagaggccaaggcaggtgaagcaccaactgagaaccctgctccacccacccagcagagcagtgctgagtaacaccaggctcctcaggcaccttcaccatcggcaggacctaaaanggaaaaaanttttttaaaaaaccttggaaccccgtgacctaaagaattaatgaccattcagaaataaagcaaaaagcaggccacaaccttaaccaacaccaaagaaacatccaagcaataaagtggaagactaaccaagatttggacattggaatgtttactgttattctttaagaaacaactacaaaaagaaaatgtcaacaaatttttccagcaagctgagaacctgggaattcctgcacggaagacaagagagtagcctctccagtttcagcaaccgctaggtttctattttttttcctggtttttactgttttggtaatatatatattgaaacaagaaatattaataccacatggggagaaccccaaccaaagaaatctgaaatatatagtaaatgcttttttttccgtttttgttcattttggatgctggtgctaaacctccaagtgtcatgatttaaaaaaaaaaaaaatttatgtccttcttatttatttctaggatgaggggaggataacatttttgctttcttatgtgactctctttgaaaatgtgcagtaagaaattcctcaaaaataaaatttttacccttcagagggacagaatgtttaaaaaa

SEQ ID NO: 325335 - DNA, 1692 bp, Homo sapiens
  misc_feature (1679)..(1679): n is a, c, g, or t
ccgggccggtgcgccgcctagaaaaacttgtgcggggccatttttggggcagtaagatcgagcgaggagcccaagagcgagcgcgcagcacgaagctcgagccgcctccgccgcgcgaccccacctcggccgccgccgcctgcgccgcgagatccgccccggcctccccgagagcgagccccggccgccgcgaccaccagccgcgctaaccgccgaccaaccgccaccgaggcgcctgagcgagagcagaggaggaggaggcatgagtgaggcgggcgaggccaccaccaccaccaccaccaccctcccgcaggctccgacggaggcggccgccgcggctccccaggaccccgcgcccaagagcccggtgggcagcggtgcgccccaggccgcggccccggcgcccgccgcccacgtcgcaggaaaccccggtggggacgcggcccccgcagccacgggcaccgcggccgccgcctctttagccaccgccgccggcagcgaagacgcggagaaaaaagttctcgccaccaaagtccttggcactgtcaaatggttcaacgtcagaaatggatatggatttataaatcgaaatgacaccaaagaagatgtatttgtacatcagactgccatcaagaagaataacccacggaaatatctgcgcagtgtaggagatggagaaactgtagagtttgatgtggttgaaggagagaagggtgcagaagctgccaatgtgactggcccggatggagttcctgtggaagggagtcgttacgctgcagatcggcgccgttacagacgtggctactatggaaggcgccgtggccctccccggaattacgctggggaggaggaggaggaagggagcggcagcagtgaaggatttgacccccctgccactgataggcagttctctggggcccggaatcagctgcgccgcccccagtatcgccctcagtaccggcagcggcggttcccgccttaccacgtgggacagacctttgaccgtcgctcacgggtcttaccccatcccaacagaatacaggctggtgagattggagagatgaaggatggagtcccagagggagcacaacttcagggaccggttcatcgaaatccaacttaccgcccaaggtaccgtagcaggggacctcctcgcccacgacctgccccagcagttggagaggctgaagataaagaaaatcagcaagccaccagtggtccaaaccagccgtctgttcgccgtggataccggcgtccctacaattaccggcgtcgcccgcgtcctcctaacgctccttcacaagatggcaaagaggccaaggcaggtgaagcaccaactgagaaccctgctccacccacccagcagagcagtgctgagtaacaccaggctcctcaggcaccttcaccatcggcaggtgacctaaagaattaatgaccattcagaaataaagcaaaaagcaggccacaaccttaaccaacaccaaagaaacatccaagcaataaagtggaagactaaccaagatttggacattggaatgtttactgttattctttaagaaacaactacaaaaagaaaatgtcaacaaatttttccagcaagctgagaacctgggaattcctgcacggaagacaagagcgtcgccccagacccataggttcctactctcatgcctgactantaggagactcccc

SEQ ID NO: 325336 - DNA, 1591 bp, Homo sapiens
ccgggccggtgcgccgcctagaaaaacttgtgcggggccatttttggggcagtaagatcgagcgaggagcccaagagcgagcgcgcagcacgaagctcgagccgcctccgccgcgcgaccccacctcggccgccgccgcctgcgccgcgagatccgccccggcctccccgagagcgagccccggccgccgcgaccaccagccgcgctaaccgccgaccaaccgccaccgaggcgcctgagcgagagcagaggaggaggaggcatgagtgaggcgggcgaggccaccaccaccaccaccaccaccctcccgcaggctccgacggaggcggccgccgcggctccccaggaccccgcgcccaagagcccggtgggcagcggtgcgccccaggccgcggccccggcgcccgccgcccacgtcgcaggaaaccccggtggggacgcggcccccgcagccacgggcaccgcggccgccgcctctttagccaccgccgccggcagcgaagacgcggagaaaaaagttctcgccaccaaagtccttggcactgtcaaatggttcaacgtcagaaatggatatggatttataaatcgaaatgacaccaaagaagatgtatttgtacatcagactgccatcaagaagaataacccacggaaatatctgcgcagtgtaggagatggagaaactgtagagtttgatgtggttgaaggagagaagggtgcagaagctgccaatgtgactggcccggatggagttcctgtggaagggagtcgttacgctgcagatcggcgccgttacagacgtggctactatggaaggcgccgtggccctccccggaatgctggtgagattggagagatgaaggatggagtcccagagggagcacaacttcagggaccggttcatcgaaatccaacttaccgcccaaggtaccgtagcaggggacctcctcgcccacgacctgccccagcagttggagaggctgaagataaagaaaatcagcaagccaccaggtgacctaaagaattaatgaccattcagaaataaagcaaaaagcaggccacaaccttaaccaacaccaaagaaacatccaagcaataaagtggaagactaaccaagatttggacattggaatgtttactgttattctttaagaaacaactacaaaaagaaaatgtcaacaaatttttccagcaagctgagaacctgggaattcctgcacggaagacaagagagtagcctctccagtttcagcaaccgctaggtttctattttttttcctggtttttactgttttggtaatatatatattgaaacaagaaatattaataccacatggggagaaccccaaccaaagaaatctgaaatatatagtaaatgcttttttttccgtttttgttcattttggatgctggtgctaaacctccaagtgtcatgatttaaaaaaaaaaaaaatttatgtccttcttatttatttctaggatgaggggaggataacatttttgctttcttatgtgactctctttgaaaatgtgcagtaagaaattcctcaaaaataaaatttttacccttcagagggacagaatgtttaaaaaa

SEQ ID NO: 325337 - DNA, 824 bp, Homo sapiens
agacagatacgaatcgagctcggtaccgacagcatcctaactggtccaaaccagccgtctgttcgccgtggataccggcgtccctacaattaccggcgtcgcccgcgtcctcctaacgctccttcacaagatggcaaagaggccaaggcaggtgaagcaccaactgagaaccctgctccacccacccagcagagcagtgctgagtaacaccaggctcctcaggcaccttcaccatcggcaggtgacctaaagaattaatgaccattcagaaataaagcaaaaagcaggccacaaccttaaccaacaccaaagaaacatccaagcaataaagtggaagactaaccaagatttggacattggaatgtttactgttattctttaagaaacaactacaaaaagaaaatgtcaacaaatttttccagcaagctgagaacctgggaattcctgcacggaagacaagagagtagcctctccagtttcagcaaccgctaggtttctattttttttcctggtttttactgttttggtaatatatatattgaaacaagaaatattaataccacatggggagaaccccaaccaaagaaatctgaaatatatagtaaatgcttttttttccgtttttgttcattttggatgctggtgctaaacctccaagtgtcatgatttaaaaaaaaaaaaaatttatgtccttcttatttatttctaggatgaggggaggataacatttttgctttcttatgtgactctctttgaaaatgtgcagtaagaaattcctcaaaaataaaatttttacccttcagagggacagaatgtttaaaaaa

SEQ ID NO: 325338 - DNA, 1112 bp, Homo sapiens
attcccgacactcccagccccacggtcagcgtcatcaccatcaccagtgacacagacgaggaggaggaacagatacacgcccccaccaagcactgtctccaagcaaaaggaaaaaacgtcatcagctgtgtcgcaagtccacgactccccctactccgactcctccagcaacaccagcccctactccgtgcagcagcgtgctgggcacaaacaatgccaatgcctttgacaccaaggggagcactggagaatcactgcacggggaacccccgaaccatcatcgtgccacccctgaaaacccaggccagcgaagtattgctggagtgtgatagcctggtgccagtcaaacaaccagtcaccactcggcgtccctacaattaccggcgtcgcccgcgtcctcctaacgctccttcacaagatggcaaagaggccaaggcaggtgaagcaccaactgagaaccctgctccacccacccagcagagcagtgctgagtaacaccaggctcctcaggcaccttcaccatcggcaggtgacctaaagaattaatgaccattcagaaataaagcaaaaagcaggccacaaccttaaccaacaccaaagaaacatccaagcaataaagtggaagactaaccaagatttggacattggaatgtttactgttattctttaagaaacaactacaaaaagaaaatgtcaacaaatttttccagcaagctgagaacctgggaattcctgcacggaagacaagagagtagcctctccagtttcagcaaccgctaggtttctattttttttcctggtttttactgttttggtaatatatatattgaaacaagaaatattaataccacatggggagaaccccaaccaaagaaatctgaaatatatagtaaatgcttttttttccgtttttgttcattttggatgctggtgctaaacctccaagtgtcatgatttaaaaaaaaaaaaaatttatgtccttcttatttatttctaggatgaggggaggataacatttttgctttcttatgtgactctctttgaaaatgtgcagtaagaaattcctcaaaaataaaatttttacccttcagagggacagaatgtttaaaaaa

SEQ ID NO: 325339 - DNA, 815 bp, Homo sapiens
cgttagacacgggcggcagacaaacgacgggcccgtgagaagccacaaggtaccaaaagtactatgccaaacacttataactggtataaaaattccacatccccatatgggccacctcaagatggcaaagaggccaaggcaggtgaagcaccaactgagaaccctgctccacccacccagcagagcagtgctgagtaacaccaggctcctcaggcaccttcaccatcggcaggtgacctaaagaattaatgaccattcagaaataaagcaaaaagcaggccacaaccttaaccaacaccaaagaaacatccaagcaataaagtggaagactaaccaagatttggacattggaatgtttactgttattctttaagaaacaactacaaaaagaaaatgtcaacaaatttttccagcaagctgagaacctgggaattcctgcacggaagacaagagagtagcctctccagtttcagcaaccgctaggtttctattttttttcctggtttttactgttttggtaatatatatattgaaacaagaaatattaataccacatggggagaaccccaaccaaagaaatctgaaatatatagtaaatgcttttttttccgtttttgttcattttggatgctggtgctaaacctccaagtgtcatgatttaaaaaaaaaaaaaatttatgtccttcttatttatttctaggatgaggggaggataacatttttgctttcttatgtgactctctttgaaaatgtgcagtaagaaattcctcaaaaataaaatttttacccttcagagggacagaatgtttaaaaaa

SEQ ID NO: 325340 - DNA, 1380 bp, Homo sapiens
  misc_feature (1259)..(1259): n is a, c, g, or t
  misc_feature (1302)..(1302): n is a, c, g, or t
  misc_feature (1337)..(1337): n is a, c, g, or t
ccgggccggtgcgccgcctagaaaaacttgtgcggggccatttttggggcagtaagatcgagcgaggagcccaagagcgagcgcgcagcacgaagctcgagccgcctccgccgcgcgaccccacctcggccgccgccgcctgcgccgcgagatccgccccggcctccccgagagcgagccccggccgccgcgaccaccagccgcgctaaccgccgaccaaccgccaccgaggcgcctgagcgagagcagaggaggaggaggcatgagtgaggcgggcgaggccaccaccaccaccaccaccaccctcccgcaggctccgacggaggcggccgccgcggctccccaggaccccgcgcccaagagcccggtgggcagcggtgcgccccaggccgcggccccggcgcccgccgcccacgtcgcaggaaaccccggtggggacgcggcccccgcagccacgggcaccgcggccgccgcctctttagccaccgccgccggcagcgaagacgcggagaaaaaagttctcgccaccaaagtccttggcactgtcaaatggttcaacgtcagaaatggatatggatttataaatcgaaatgacaccaaagaagatgtatttgtacatcagactgccatcaagaagaataacccacggaaatatctgcgcagtgtaggagatggagaaactgtagagtttgatgtggttgaaggagagaagggtgcagaagctgccaatgtgactggcccggatggagttcctgtggaagggagtcgttacgctgcagatcggcgccgttacagacgtggctactatggaaggcgccgtggccctccccggaattacgctggggaggaggaggaggaagggagcggcagcagtgaaggatttgacccccctgccactgataggcagttctctggggcccggaatcagctgcgccgcccccagtatcgccctcagtaccggcagcggcggttcccgccttaccacgtgggacagacctttgaccgtcgctcacgggtcttaccccatcccaacagaatacaggctggtgagattggagagatgaaggatggagtcccagagggagcacaacttcagggaccggttcatcgaaatccaacttaccgcccaaggtaccgtagacatctctctcagccgcagaaatgaagacatctttcaccagccgcatggctctgtccaaggacagcggaacatgctccacattctgcatgttcttaaaaccaacctggttgtcaagcangggctgtagcatggcacttgctgagcctccagccttgaaggantctctctggtaagaccctactggatcaaagctgtntacagccccctttccttcttcatcaattcaccgatgatttttt

SEQ ID NO: 325341 - DNA, 965 bp, Homo sapiens
ccgggccggtgcgccgcctagaaaaacttgtgcggggccatttttggggcagtaagatcgagcgaggagcccaagagcgagcgcgcagcacgaagctcgagccgcctccgccgcgcgaccccacctcggccgccgccgcctgcgccgcgagatccgccccggcctccccgagagcgagccccggccgccgcgaccaccagccgcgctaaccgccgaccaaccgccaccgaggcgcctgagcgagagcagaggaggaggaggcatgagtgaggcgggcgaggccaccaccaccaccaccaccaccctcccgcaggctccgacggaggcggccgccgcggctccccaggaccccgcgcccaagagcccggtgggcagcggtgcgccccaggccgcggccccggcgcccgccgcccacgtcgcaggaaaccccggtggggacgcggcccccgcagccacgggcaccgcggccgccgcctctttagccaccgccgccggcagcgaagacgcggagaaaaaagttctcgccaccaaagtccttggcactgtcaaatggttcaacgtcagaaatggatatggatttataaatcgaaatgacaccaaagaagatgtatttgtacatcagcatcctgttctcctgatgtggttcctccttagtgtttgcctggagccaatctggcttctgcctggactgccatcaagaagaataacccacggaaatatctgcgcagtgtaggagatggagaaactgtagagtttgatgtggttgaaggagagaagggtgcagaagctgccccagctcggctcgaataaggaggcttagacctgtgcctaggactccagctcatgcgccgaataataggtatagtgttccaatgtggattctgttgatgcggaggaggatggactcggatgtatggtggggcggagcagacacagactatgcagatgggagtgaagacaaggta

SEQ ID NO: 325342 - DNA, 150 bp, Homo sapiens
atggatgtaaggcaagctcctctctgtgcttcagaatagacagggaaataccacgtttatgctgagattttaaatccctttcatttctctgtagactctccatcatgtctgtaaagagaaacttcttctcatagctcaccttctaagaca

SEQ ID NO: 325343 - DNA, 236 bp, Homo sapiens
tcccagctacttgggagactgaggtaggaggatcacttgcccgggaggcagaggtggcagttagtcgagatagtgccactgccactacactccagcctgggcaagagtgagatcctatctttaaaaacaaaaaacaaacaaagcaatgtaggggcctgttactgaggaagaagaaaagaaaggatattgagtaggcaggcacctatcagtgggtagtaggcacaaccagacatggg

SEQ ID NO: 325344 - DNA, 1853 bp, Homo sapiens
  misc_feature (1221)..(1221): n is a, c, g, or t
acttgaatatctgctatatgctgggttctagagctgcaaaagagaacaagagtagtctttacctttaggattttccagggaactgggggagacagacagatacatacacatacaccccatcctcagtgtgtaggtgccatgacaaatcaaggcttttgatgcagatgctatgctttcacttctcatggtcgatactttttgaatcttaaagtctgattgttcagatatctagaaaaggagatgtctggctttgctctgccctctgactcactgtgttggtttatctttaggcgtggtggagggggccagaactactggctaatgagagaaggcagaccttgttagtgacatgtacaaatgggcacatctgctatattcactttcattactgattattaatagtttattaaatggagtttactgaattactattattttggcttaaaatatatatatataatttatgtagttctatgtttatagatgtgttttcagaggtgtatttgttttagaatttcactctgtcctggaagtgatttttcaaatgtggatattaaaatggataggacataatttcccaactagtacagtatgctagtgccaaccttataccactgttgtagtacccatgaaaaataatttttaaaaagctgtaaaagttcccagtgctttgaggcttcttcaaaattgagaatgatgaaaatttccaaaattatcagttgatgccataattatctctaagagatgttgtaataggaaattcatggttttcctttattttcctgtttctgaacacaaaattcaaaagaaaactctttcttccttgtcactgagactcttggtcagtgtaggctgtgaacttgtactttgtgaagagaagagtactgtgaggaagcttgaaaatactgtaggtttttgttggcatcttcttctggatggtattcatgtactctgcacgccactgaaaatatgctctgtttttcataaaatatgctcattcttttatactgagcactcggaaattggttttcccaaaccatcttagtggagaatggcctgcttttatcagttatgtgaagaagtaaattccaggctcctcagctgcaggatggctccttgttcacagctgctgctcttgcctctgtggaagacgcctgctgctaagagaatctttgtgtgttgtgtataaaatgaactttgtttggaccattccacaagcancttaaactgcttaggagtccagccagacattcctccccagttgatcatttaaatggaggtcagatttagaacccaacttatattcgtttaaaaatagacattgcctttagaaaactgacctttggtacatttggggcctagggatctgataggctatctcttatgatgcacatcgctctgttttagactctgaaaggcagtatgcctttgaagctagataacgtcagtgtgcttgtaacttgggacccagtctgtgtgctatatgtctgcttcttcagtccacactcattacttccaggaaattcgtgagaagatgagagattattcgttatagaattgagtatggtttctctacactaattttattggatattttccagtttgactaggaaaggttagagaacatggaaagaaaatttaacaggttaattttaaggtaataagaccattgtattgatatattcttcagtgtgatttaggtgagtcaggaatttttcctctggagactgcataaatcagggatgtccaatcttttggcttccctgggccatactggaagaataagaattgtctcaggccacgcataaagtacactaacactaatgatagctgattagcttaaaaaaaaaaaa

SEQ ID NO: 325345 - DNA, 1481 bp, Homo sapiens
ctgctcattctgggggtgcggttgacggctggtcgtgatctttcccgtaatctgtcccctcttacggaacctagtctccgttctgtccatggccttcttctggacacttctaggatccagaagagtatgttatcaattctcaagcctaggagaagtcaggagtagagaacagctctgagaagatactgttgtccaactgatctccaggcaccacggagtccggtccctccaatcaggaaggtcggaatctctgatgtcatcgttcatgccaacctggcaaccagtttgaaaaaaaacacatgtaactgccaggctgatctcttgtcctggagatcctgggtgaatggtatctcctgccactgtcccaacctcagaccattgtccaaaagcatcttcagggactccacatccctctattccctgtcccagcagaggctgtgtcctctccactcaaagcctgaagcatgttggggtctcttcgtctctgtacatgcccatttcagagtccagtctggtgggagagggaacagagtgggaaagaaaactagggtaagcagaaacgatgaaaccttataagagtgagagtatcatgtacaagagtgagattatcatgtacaagagtgagattatcacgtacaagagatcccaggaatactgacttgatgaaaaagtcacatcagagcactcagtttggcagagcttttctgccgaatgtttactcacattcactgtccgagattctatactgggggtacacacgtcctctgccctaaggcaattttgagtccaagagacattttgaggcctaaaaatcataggaaactgcccctgagctcacacatatttccaatggtgtccccagtttcagggaatccatggattacctaagccagcccctccagttcggctaagaaactctagtctatatatcaagttttgtatcatatgtattgctctgaactcagaaatttcccttccatttatggattctatgaataaaatatcacatgtacaaaaagactaagtcaaaaaatttcagctgtgcacagtggctcatgcttatgcctgtaatcccagcactttgggaggccaaagtgggtggatcacttgaggtcaggagtttgagaccagcctggacaacatggtgaaaccccatctctactaaaaatacaaaaaaaaaaaagaaaaaaaaaactttttgggcgggacttgggccccggaaaaggttttcaaaaccatcaccattaggaggcagcgagcccatgaagtgaacgggacactggacaacagagcagagaccaccgagagaagacccgggggcaaagagacgaggagcgagaggaaatcaccaccacaatgagaaaacgcccgcggggggcaaccagaagctgtctgtgacaaagatcccagagaggaggaaccagagggacaaaagggagactcactccaggggggaacccaaaggagcccggaacacaagt

SEQ ID NO: 325346 - DNA, 1770 bp, Homo sapiens
  misc_feature (1669)..(1669): n is a, c, g, or t
  misc_feature (1671)..(1671): n is a, c, g, or t
  misc_feature (1680)..(1681): n is a, c, g, or t
  misc_feature (1739)..(1739): n is a, c, g, or t
ctgctcattctgggggtgcggttgacggctggtcgtgatctttcccgtaatctgtcccctcttacggaacctagtctccgttctgtccatggccttcttctggacacttctaggatccagaagagtatgttatcaattctcaagcctaggagaagtcaggagtagagaacagctctgagaagatactgttgtccaactgatctccaggcaccacggagtccggtccctccaatcaggaaggtcggaatctctgatgtcatcgttcatgccaacctggcaaccagtttgaaaaaaaacacatgtaactgccaggctgatctcttgtcctggagatcctgggtgaatggtatctcctgccactgtcccaacctcagaccattgtccaaaagcatcttcagggactccacatccctctattccctgtcccagcagaggctgtgtcctctccactcaaagcctgaagcatgttggggtctcttcgtctctgtacatgcccatttcagagtccagtctggtgggagagggaacagagtgggaaagaaaactagggtaagcagaaacgatgaaaccttataagagtgagagtatcatgtacaagagtgagattatcatgtacaagagtgagattatcacgtacaagagatcccaggaatactgacttgatgaaaaagtcacatcagagcactcagtttggcagagcttttctgccgaatgtttactcacattcactgtccgagattctatactgggggtacacacgtcctctgccctaaggcaattttgagtccaagagacattttgaggcctaaaaatcataggaaactgcccctgagctcacacatatttccaatggtgtccccagtttcagggaatccatggattacctaagccagcccctccagttcggctaagaaactctagtctatatatcaagttttgtatcatatgtattgctctgaactcagaaatttcccttccatttatggattctatgaataaaatatcacatgtacaaaaagactaagtcaaaaaatttcagctgtgcacagtggctcatgcttatgcctgtaatcccagcactttgggaggccaaagtgggtggatcacttgaggtcaggagtttgagaccagcctggacaacatggtgaaaccccatctctactaaaaatacaaaaaattagccaggcatggtggtggatgcctgtaatcgcagctactcaggagagggcgctggagaatcacttgaactcatggtgcgcaggttgcagggagccaagatggcaccattgtgctccagcctgggcaacaagagcaaaactccatctcaaaaaaaataaagaacctgcgagtgagttcccacacgttttcctaatgggctgctgctttcctaggagtctctcgctcatagaaaaggcacaaactgaaagaggaagcagatcccattgctgtggaagtcccattgttaggaagctctgcttttctggagttcaaattcgcattcatgacgctttaaaccgtcagagctgggtgggtcctcctacaacaaaatagtttgctctctctctcctagttaacaggctttcaaatattagaagatcaatgttctgaccccattaaaatttctcttttgtggaatgaaaagctctgatttaacccatcttcaagctgncnttgatgagnnatagggctgagtcacctgcatttccctcactgcacaaagtcctggcacagatctggtnctgtctctgctgaggtggtgaccagaagcac

SEQ ID NO: 325347 - DNA, 804 bp, Homo sapiens
  misc_feature (703)..(703): n is a, c, g, or t
  misc_feature (705)..(705): n is a, c, g, or t
  misc_feature (714)..(715): n is a, c, g, or t
  misc_feature (773)..(773): n is a, c, g, or t
aactcttaactattgttatccatatcctacagatgatacagaagtttaaagctacttcttttgtaagccctaaaataattttgggctgggtgtggatgcctgtaatcccagcactttgggaggccaaagtgggtggatcacttgaggtcaggagtttgagaccagcctggacaacatggtgaaaccccatctctactaaaaatacaaaaaattagccaggcatggtggtggatgcctgtaatcgcagctactcaggagagggcgctggagaatcacttgaactcatggtgcgcaggttgcagggagccaagatggcaccattgtgctccagcctgggcaacaagagcaaaactccatctcaaaaaaaataaagaacctgcgagtgagttcccacacgttttcctaatgggctgctgctttcctaggagtctctcgctcatagaaaaggcacaaactgaaagaggaagcagatcccattgctgtggaagtcccattgttaggaagctctgcttttctggagttcaaattcgcattcatgacgctttaaaccgtcagagctgggtgggtcctcctacaacaaaatagtttgctctctctctcctagttaacaggctttcaaatattagaagatcaatgttctgaccccattaaaatttctcttttgtggaatgaaaagctctgatttaacccatcttcaagctgncnttgatgagnnatagggctgagtcacctgcatttccctcactgcacaaagtcctggcacagatctggtnctgtctctgctgaggtggtgaccagaagcac

SEQ ID NO: 325348 - DNA, 492 bp, Homo sapiens
acgcgcggcccgaggggcgggggcggcgggcggcccggggctgcaaagcggggggccgccgcctccctgggcctgcctgggcggccgcctccgcgatgccgctgctcgtcgaggggcggcgagtgcggctgccgcagtcagccggggacctcgtccgagcccacccgcctttggaggtgagtggggcgcggcgcggggcttcggggcgggcccgaggggaagctgcagggcgggctagcgcccccctcacgcgacacagacttgaaacttggcgctgttggcacatccggagccccggccgtcggctcgcgtcttccccttgaggggtcggggagtttttgccttctttagacttcagcgggctgccccggaggccactctctgacaagggaggggacgggggcccagagaggttaggtgacttgcccaaggtcgcacagcactgcggctcggggacacgccgggacccccattccccgacggggcggctgc

SEQ ID NO: 325349 - DNA, 1358 bp, Homo sapiens
acgcgcggcccgaggggcgggggcggcgggcggcccggggctgcaaagcggggggccgccgcctccctgggcctgcctgggcggccgcctccgcgatgccgctgctcgtcgaggggcggcgagtgcggctgccgcagtcagccggggacctcgtccgagcccacccgcctttggaggctccatctccattctgggttctgatgatgccactacttgtcacattgtggtcctgaggcacacaggtaatggggccacctgcttgacacattgtgacggaaccgacaccaaagctgaggtccccttgatcatgaactccataaaatccttttctgaccacgctcaatgtggaaggctggaagtacaccttgttggaggcttcagtgacgacaggcagttgtcacaaaaactcactcatcaacttcttagtgaatttgacaggcaagaagatgacattcacttagtgacattatgtgtgacagaattaaatgaccgggaagaaaacgaaaaccactttccagtaatatatggcattgctgtcaacattaagactgcagagatttacagagcatcctttcaagatcggggtccggaggagcagcttcgtgctgcgcgaactttagcaggaggaccaatgattagcatttatgatgcagagacagaacaacttcgtataggaccgtactcctggacaccatttccacatgtggatttctggttgcaccaagatgacaagcaaatactagagaatctttccacttcgcctctggctgagccaccccactttgttgaacatattagatctaccttgatgtttttaaaaaaacacccatctccagctcacacactgtttcctggaaataaagccctactctacaaaaaaaatgaagatggcttgtgggaaaagatctcttctccaggaagttaaaaaacatgaattaccaaagaaagcaccttcttggcctgacagaccattggtggggctggcacgaatccagatctggatcctacatctgttgggtcttaggcctccttccctcctcagtgtctttcaaatgactttcatcaaatgactttcaaaataaaaccttattttggcaaaggcaaaacaaagcagaaacgaaaaagcctcataagacaactaacaggaggggggcgcgaacacgacaaaaataaccccccagggagagggcggccccagaggttactcgcgtcaccacagggctacttgcgaccaagagtgggcccataaagagaagagcacaataaaaagcaaacacacagtagggacggacgataatacaaaacgcgaggcacacgagaaaaaccgggcaacgagggaacctagagcagagagacgc

SEQ ID NO: 325350 - DNA, 2099 bp, Homo sapiens
gtggtgtgtgcctgtactcccagcactttaggaggccagggtgggtggattgcttgagcccaggagtttgagaccagcctggggagcatagggagaccccgtcgctacaaaaagtataaaactcagccaggtgtggtggtgcaagcctgtagtcccagctatttgggaggctaaggtggtaggatcgcttgagcctgggaggtggaggctgcagtgagttgaaattgtaccactatactccagcttgggtgacagagtgagagactgtctcaaaaaataaaaaagaggggatgtgatttcagagccatccatccactattcctgtgtaatctgattctctttacaatggtaaaattgttaagagtctcacactctttagtaaagaactgtgatagctgggtgtggtgggtcatgcctgtaatcccagcactttgggaggccaaggcaggaagattgcttgagcccaggagttcaagaccagcctgggcaacatagtgaggccctgtgtctttaaaaaacaaacaaacaaacaaaaaactataataaaggatttttgcatctcatttcataggttactatgacatccgatttcataggttaaaaaaaccaccgcgcagaaccgcatcgttttctctgcattgttctgaatgaccgtggctgctgcctttttctttgagcctctctgtccactaacacactccccacacactagcgtgctgcccacgcagagcccactttggctctctccacatctttagtttttccatcctcactaatttacatcactattttattttttttttaattaaacagggaaagagccagacttctcagaggtcagtctgttcaacaagtgggaccccagggccttctgtatgttcagcaaagagagcttgcagtgacctccccaaaggatggctccatctccattctgggttctgatgatgccactacttgtcacattgtggtcctgaggcacacaggtaatggggccacctgcttgacacattgtgacggaaccgacaccaaagctgaggtccccttgatcatgaactccataaaatccttttctgaccacgctcaatgtggaaggctggaagtacaccttgttggaggcttcagtgacgacaggcagttgtcacaaaaactcactcatcaacttcttagtgaatttgacaggcaagaagatgacattcacttagtgacattatgtgtgacagaattaaatgaccgggaagaaaacgaaaaccactttccagtaatatatggcattgctgtcaacattaagactgcagagatttacagagcatcctttcaagatcggggtccggaggagcagcttcgtgctgcgcgaactttagcaggaggaccaatgattagcatttatgatgcagagacagaacaacttcgtataggaccgtactcctggacaccatttccacatgtggatttctggttgcaccaagatgacaagcaaatactagagaatctttccacttcgcctctggctgagccaccccactttgttgaacatattagatctaccttgatgtttttaaaaaaacacccatctccagctcacacactgtttcctggaaataaagccctactctacaaaaaaaatgaagatggcttgtgggaaaagatctcttctccaggaagttaaaaaacatgaattaccaaagaaagcaccttcttggcctgacagaccattggtggggctggcacgaatccagatctggatcctacatctgttgggtcttaggcctccttccctcctcagtgtctttcaaatgactttcatcaaatgactttcaaaataaaaccttattttggcaaaggcaaaacaaagcagaaacgaaaaagcctcataagacaactaacaggaggggggcgcgaacacgacaaaaataaccccccagggagagggcggccccagaggttactcgcgtcaccacagggctacttgcgaccaagagtgggcccataaagagaagagcacaataaaaagcaaacacacagtagggacggacgataatacaaaacgcgaggcacacgagaaaaaccgggcaacgagggaacctagagcagagagacgc

SEQ ID NO: 325351 - DNA, 1384 bp, Homo sapiens
gcgaccgccaatgcgatgccgctgctcgtcgatgtacgagagatgctgagccgagatccagttgctgcctctgagcattgatgcgtctttcctgttgaggaaagagccagacttctcagaggtcagtctgttcaacaagtgggaccccagggccttctgtatgttcagcaaagagagcttgcagtgacctccccaaaggatggctccatctccattctgggttctgatgatgccactacttgtcacattgtggtcctgaggcacacaggtaatggggccacctgcttgacacattgtgacggaaccgacaccaaagctgaggtccccttgatcatgaactccataaaatccttttctgaccacgctcaatgtggaaggctggaagtacaccttgttggaggcttcagtgacgacaggcagttgtcacaaaaactcactcatcaacttcttagtgaatttgacaggcaagaagatgacattcacttagtgacattatgtgtgacagaattaaatgaccgggaagaaaacgaaaaccactttccagtaatatatggcattgctgtcaacattaagactgcagagatttacagagcatcctttcaagatcggggtccggaggagcagcttcgtgctgcgcgaactttagcaggaggaccaatgattagcatttatgatgcagagacagaacaacttcgtataggaccgtactcctggacaccatttccacatgtggatttctggttgcaccaagatgacaagcaaatactagagaatctttccacttcgcctctggctgagccaccccactttgttgaacatattagatctaccttgatgtttttaaaaaaacacccatctccagctcacacactgtttcctggaaataaagccctactctacaaaaaaaatgaagatggcttgtgggaaaagatctcttctccaggaagttaaaaaacatgaattaccaaagaaagcaccttcttggcctgacagaccattggtggggctggcacgaatccagatctggatcctacatctgttgggtcttaggcctccttccctcctcagtgtctttcaaatgactttcatcaaatgactttcaaaataaaaccttattttggcaaaggcaaaacaaagcagaaacgaaaaagcctcataagacaactaacaggaggggggcgcgaacacgacaaaaataaccccccagggagagggcggccccagaggttactcgcgtcaccacagggctacttgcgaccaagagtgggcccataaagagaagagcacaataaaaagcaaacacacagtagggacggacgataatacaaaacgcgaggcacacgagaaaaaccgggcaacgagggaacctagagcagagagacgc

SEQ ID NO: 325352 - DNA, 1292 bp, Homo sapiens
acgcgcggcccgaggggcgggggcggcgggcggcccggggctgcaaagcggggggccgccgcctccctgggcctgcctgggcggccgcctccgcgatgccgctgctcgtcgaggggcggcgagtgcggctgccgcagtcagccggggacctcgtccgagcccacccgcctttggaggtaatggggccacctgcttgacacattgtgacggaaccgacaccaaagctgaggtccccttgatcatgaactccataaaatccttttctgaccacgctcaatgtggaaggctggaagtacaccttgttggaggcttcagtgacgacaggcagttgtcacaaaaactcactcatcaacttcttagtgaatttgacaggcaagaagatgacattcacttagtgacattatgtgtgacagaattaaatgaccgggaagaaaacgaaaaccactttccagtaatatatggcattgctgtcaacattaagactgcagagatttacagagcatcctttcaagatcggggtccggaggagcagcttcgtgctgcgcgaactttagcaggaggaccaatgattagcatttatgatgcagagacagaacaacttcgtataggaccgtactcctggacaccatttccacatgtggatttctggttgcaccaagatgacaagcaaatactagagaatctttccacttcgcctctggctgagccaccccactttgttgaacatattagatctaccttgatgtttttaaaaaaacacccatctccagctcacacactgtttcctggaaataaagccctactctacaaaaaaaatgaagatggcttgtgggaaaagatctcttctccaggaagttaaaaaacatgaattaccaaagaaagcaccttcttggcctgacagaccattggtggggctggcacgaatccagatctggatcctacatctgttgggtcttaggcctccttccctcctcagtgtctttcaaatgactttcatcaaatgactttcaaaataaaaccttattttggcaaaggcaaaacaaagcagaaacgaaaaagcctcataagacaactaacaggaggggggcgcgaacacgacaaaaataaccccccagggagagggcggccccagaggttactcgcgtcaccacagggctacttgcgaccaagagtgggcccataaagagaagagcacaataaaaagcaaacacacagtagggacggacgataatacaaaacgcgaggcacacgagaaaaaccgggcaacgagggaacctagagcagagagacgc

SEQ ID NO: 325353 - DNA, 2124 bp, Homo sapiens
gtggtgtgtgcctgtactcccagcactttaggaggccagggtgggtggattgcttgagcccaggagtttgagaccagcctggggagcatagggagaccccgtcgctacaaaaagtataaaactcagccaggtgtggtggtgcaagcctgtagtcccagctatttgggaggctaaggtggtaggatcgcttgagcctgggaggtggaggctgcagtgagttgaaattgtaccactatactccagcttgggtgacagagtgagagactgtctcaaaaaataaaaaagaggggatgtgatttcagagccatccatccactattcctgtgtaatctgattctctttacaatggtaaaattgttaagagtctcacactctttagtaaagaactgtgatagctgggtgtggtgggtcatgcctgtaatcccagcactttgggaggccaaggcaggaagattgcttgagcccaggagttcaagaccagcctgggcaacatagtgaggccctgtgtctttaaaaaacaaacaaacaaacaaaaaactataataaaggatttttgcatctcatttcataggttactatgacatccgatttcataggttaaaaaaaccaccgcgcagaaccgcatcgttttctctgcattgttctgaatgaccgtggctgctgcctttttctttgagcctctctgtccactaacacactccccacacactagcgtgctgcccacgcagagcccactttggctctctccacatctttagtttttccatcctcactaatttacatcactattttattttttttttaattaaacagggaaagagccagacttctcagaggtcagtctgttcaacaagtgggaccccagggccttctgtatgttcagcaaagagagcttgcagtgacctccccaaaggatggctccatctccattctgggttctgatgatgccactacttgtcacattgtggtcctgaggcacacaggtaatggggccacctgcttgacacattgtgacggaaccgacaccaaagctgaggtccccttgatcatgaactccataaaatccttttctgaccacgctcaatgtggaaggtgagatctacgctgctctcataaggctggaagtacaccttgttggaggcttcagtgacgacaggcagttgtcacaaaaactcactcatcaacttcttagtgaatttgacaggcaagaagatgacattcacttagtgacattatgtgtgacagaattaaatgaccgggaagaaaacgaaaaccactttccagtaatatatggcattgctgtcaacattaagactgcagagatttacagagcatcctttcaagatcggggtccggaggagcagcttcgtgctgcgcgaactttagcaggaggaccaatgattagcatttatgatgcagagacagaacaacttcgtataggaccgtactcctggacaccatttccacatgtggatttctggttgcaccaagatgacaagcaaatactagagaatctttccacttcgcctctggctgagccaccccactttgttgaacatattagatctaccttgatgtttttaaaaaaacacccatctccagctcacacactgtttcctggaaataaagccctactctacaaaaaaaatgaagatggcttgtgggaaaagatctcttctccaggaagttaaaaaacatgaattaccaaagaaagcaccttcttggcctgacagaccattggtggggctggcacgaatccagatctggatcctacatctgttgggtcttaggcctccttccctcctcagtgtctttcaaatgactttcatcaaatgactttcaaaataaaaccttattttggcaaaggcaaaacaaagcagaaacgaaaaagcctcataagacaactaacaggaggggggcgcgaacacgacaaaaataaccccccagggagagggcggccccagaggttactcgcgtcaccacagggctacttgcgaccaagagtgggcccataaagagaagagcacaataaaaagcaaacacacagtagggacggacgataatacaaaacgcgaggcacacgagaaaaaccgggcaacgagggaacctagagcagagagacgc

SEQ ID NO: 325354 - DNA, 1383 bp, Homo sapiens
acgcgcggcccgaggggcgggggcggcgggcggcccggggctgcaaagcggggggccgccgcctccctgggcctgcctgggcggccgcctccgcgatgccgctgctcgtcgaggggcggcgagtgcggctgccgcagtcagccggggacctcgtccgagcccacccgcctttggaggctccatctccattctgggttctgatgatgccactacttgtcacattgtggtcctgaggcacacaggtaatggggccacctgcttgacacattgtgacggaaccgacaccaaagctgaggtccccttgatcatgaactccataaaatccttttctgaccacgctcaatgtggaaggtgagatctacgctgctctcataaggctggaagtacaccttgttggaggcttcagtgacgacaggcagttgtcacaaaaactcactcatcaacttcttagtgaatttgacaggcaagaagatgacattcacttagtgacattatgtgtgacagaattaaatgaccgggaagaaaacgaaaaccactttccagtaatatatggcattgctgtcaacattaagactgcagagatttacagagcatcctttcaagatcggggtccggaggagcagcttcgtgctgcgcgaactttagcaggaggaccaatgattagcatttatgatgcagagacagaacaacttcgtataggaccgtactcctggacaccatttccacatgtggatttctggttgcaccaagatgacaagcaaatactagagaatctttccacttcgcctctggctgagccaccccactttgttgaacatattagatctaccttgatgtttttaaaaaaacacccatctccagctcacacactgtttcctggaaataaagccctactctacaaaaaaaatgaagatggcttgtgggaaaagatctcttctccaggaagttaaaaaacatgaattaccaaagaaagcaccttcttggcctgacagaccattggtggggctggcacgaatccagatctggatcctacatctgttgggtcttaggcctccttccctcctcagtgtctttcaaatgactttcatcaaatgactttcaaaataaaaccttattttggcaaaggcaaaacaaagcagaaacgaaaaagcctcataagacaactaacaggaggggggcgcgaacacgacaaaaataaccccccagggagagggcggccccagaggttactcgcgtcaccacagggctacttgcgaccaagagtgggcccataaagagaagagcacaataaaaagcaaacacacagtagggacggacgataatacaaaacgcgaggcacacgagaaaaaccgggcaacgagggaacctagagcagagagacgc

SEQ ID NO: 325355 - DNA, 2025 bp, Homo sapiens
gtggtgtgtgcctgtactcccagcactttaggaggccagggtgggtggattgcttgagcccaggagtttgagaccagcctggggagcatagggagaccccgtcgctacaaaaagtataaaactcagccaggtgtggtggtgcaagcctgtagtcccagctatttgggaggctaaggtggtaggatcgcttgagcctgggaggtggaggctgcagtgagttgaaattgtaccactatactccagcttgggtgacagagtgagagactgtctcaaaaaataaaaaagaggggatgtgatttcagagccatccatccactattcctgtgtaatctgattctctttacaatggtaaaattgttaagagtctcacactctttagtaaagaactgtgatagctgggtgtggtgggtcatgcctgtaatcccagcactttgggaggccaaggcaggaagattgcttgagcccaggagttcaagaccagcctgggcaacatagtgaggccctgtgtctttaaaaaacaaacaaacaaacaaaaaactataataaaggatttttgcatctcatttcataggttactatgacatccgatttcataggttaaaaaaaccaccgcgcagaaccgcatcgttttctctgcattgttctgaatgaccgtggctgctgcctttttctttgagcctctctgtccactaacacactccccacacactagcgtgctgcccacgcagagcccactttggctctctccacatctttagtttttccatcctcactaatttacatcactattttattttttttttaattaaacagggaaagagccagacttctcagaggtcagtctgttcaacaagtgggaccccagggccttctgtatgttcagcaaagagagcttgcagtgacctccccaaaggatggctccatctccattctgggttctgatgatgccactacttgtcacattgtggtcctgaggcacacaggtaatggggccacctgcttgacacattgtgacggaaccgacaccaaagctgaggtccccttgatcatgaactccataaaatccttttctgaccacgctcaatgtggaaggtgaatttgacaggcaagaagatgacattcacttagtgacattatgtgtgacagaattaaatgaccgggaagaaaacgaaaaccactttccagtaatatatggcattgctgtcaacattaagactgcagagatttacagagcatcctttcaagatcggggtccggaggagcagcttcgtgctgcgcgaactttagcaggaggaccaatgattagcatttatgatgcagagacagaacaacttcgtataggaccgtactcctggacaccatttccacatgtggatttctggttgcaccaagatgacaagcaaatactagagaatctttccacttcgcctctggctgagccaccccactttgttgaacatattagatctaccttgatgtttttaaaaaaacacccatctccagctcacacactgtttcctggaaataaagccctactctacaaaaaaaatgaagatggcttgtgggaaaagatctcttctccaggaagttaaaaaacatgaattaccaaagaaagcaccttcttggcctgacagaccattggtggggctggcacgaatccagatctggatcctacatctgttgggtcttaggcctccttccctcctcagtgtctttcaaatgactttcatcaaatgactttcaaaataaaaccttattttggcaaaggcaaaacaaagcagaaacgaaaaagcctcataagacaactaacaggaggggggcgcgaacacgacaaaaataaccccccagggagagggcggccccagaggttactcgcgtcaccacagggctacttgcgaccaagagtgggcccataaagagaagagcacaataaaaagcaaacacacagtagggacggacgataatacaaaacgcgaggcacacgagaaaaaccgggcaacgagggaacctagagcagagagacgc

SEQ ID NO: 325356 - DNA, 1537 bp, Homo sapiens
acgcgcggcccgaggggcgggggcggcgggcggcccggggctgcaaagcggggggccgccgcctccctgggcctgcctgggcggccgcctccgcgatgccgctgctcgtcgaggggcggcgagtgcggctgccgcagtcagccggggacctcgtccgagcccacccgcctttggaggtgagtggggcgcggcgcggggcttcggggcgggcccgaggggaagctgcagggcgggctagcgcccccctcacgcgacacagacttgaaacttggcgctgttggcacatccggagccccggccgtcggctcgcgtcttccccttgaggggaaagagccagacttctcagaggtcagtctgttcaacaagtgggaccccagggccttctgtatgttcagcaaagagagcttgcagtgacctccccaaaggatggctccatctccattctgggttctgatgatgccactacttgtcacattgtggtcctgaggcacacaggtaatggggccacctgcttgacacattgtgacggaaccgacaccaaagctgaggtccccttgatcatgaactccataaaatccttttctgaccacgctcaatgtggaaggtgaatttgacaggcaagaagatgacattcacttagtgacattatgtgtgacagaattaaatgaccgggaagaaaacgaaaaccactttccagtaatatatggcattgctgtcaacattaagactgcagagatttacagagcatcctttcaagatcggggtccggaggagcagcttcgtgctgcgcgaactttagcaggaggaccaatgattagcatttatgatgcagagacagaacaacttcgtataggaccgtactcctggacaccatttccacatgtggatttctggttgcaccaagatgacaagcaaatactagagaatctttccacttcgcctctggctgagccaccccactttgttgaacatattagatctaccttgatgtttttaaaaaaacacccatctccagctcacacactgtttcctggaaataaagccctactctacaaaaaaaatgaagatggcttgtgggaaaagatctcttctccaggaagttaaaaaacatgaattaccaaagaaagcaccttcttggcctgacagaccattggtggggctggcacgaatccagatctggatcctacatctgttgggtcttaggcctccttccctcctcagtgtctttcaaatgactttcatcaaatgactttcaaaataaaaccttattttggcaaaggcaaaacaaagcagaaacgaaaaagcctcataagacaactaacaggaggggggcgcgaacacgacaaaaataaccccccagggagagggcggccccagaggttactcgcgtcaccacagggctacttgcgaccaagagtgggcccataaagagaagagcacaataaaaagcaaacacacagtagggacggacgataatacaaaacgcgaggcacacgagaaaaaccgggcaacgagggaacctagagcagagagacgc

SEQ ID NO: 325357 - DNA, 1461 bp, Homo sapiens
acgcgcggcccgaggggcgggggcggcgggcggcccggggctgcaaagcggggggccgccgcctccctgggcctgcctgggcggccgcctccgcgatgccgctgctcgtcgaggggcggcgagtgcggctgccgcagtcagccggggacctcgtccgagcccacccgcctttggaggaaagagccagacttctcagaggtcagtctgttcaacaagtgggaccccagggccttctgtatgttcagcaaagagagcttgcagtgacctccccaaaggatggctccatctccattctgggttctgatgatgccactacttgtcacattgtggtcctgaggcacacaggtaatggggccacctgcttgacacattgtgacggaaccgacaccaaagctgaggtccccttgatcatgaactccataaaatccttttctgaccacgctcaatgtggaaggctggaagtacaccttgttggaggcttcagtgacgacaggcagttgtcacaaaaactcactcatcaacttcttagtgaatttgacaggcaagaagatgacattcacttagtgacattatgtgtgacagaattaaatgaccgggaagaaaacgaaaaccactttccagtaatatatggcattgctgtcaacattaagactgcagagatttacagagcatcctttcaagatcggggtccggaggagcagcttcgtgctgcgcgaactttagcaggaggaccaatgattagcatttatgatgcagagacagaacaacttcgtataggaccgtactcctggacaccatttccacatgtggatttctggttgcaccaagatgacaagcaaatactagagaatctttccacttcgcctctggctgagccaccccactttgttgaacatattagatctaccttgatgtttttaaaaaaacacccatctccagctcacacactgtttcctggaaataaagccctactctacaaaaaaaatgaagatggcttgtgggaaaagatctcttctccaggaagttaaaaaacatgaattaccaaagaaagcaccttcttggcctgacagaccattggtggggctggcacgaatccagatctggatcctacatctgttgggtcttaggcctccttccctcctcagtgtctttcaaatgactttcatcaaatgactttcaaaataaaaccttattttggcaaaggcaaaacaaagcagaaacgaaaaagcctcataagacaactaacaggaggggggcgcgaacacgacaaaaataaccccccagggagagggcggccccagaggttactcgcgtcaccacagggctacttgcgaccaagagtgggcccataaagagaagagcacaataaaaagcaaacacacagtagggacggacgataatacaaaacgcgaggcacacgagaaaaaccgggcaacgagggaacctagagcagagagacgc

SEQ ID NO: 325358 - DNA, 1611 bp, Homo sapiens
acgcgcggcccgaggggcgggggcggcgggcggcccggggctgcaaagcggggggccgccgcctccctgggcctgcctgggcggccgcctccgcgatgccgctgctcgtcgaggggcggcgagtgcggctgccgcagtcagccggggacctcgtccgagcccacccgcctttggaggtgagtggggcgcggcgcggggcttcggggcgggcccgaggggaagctgcagggcgggctagcgcccccctcacgcgacacagacttgaaacttggcgctgttggcacatccggagccccggccgtcggctcgcgtcttccccttgaggggaaagagccagacttctcagaggtcagtctgttcaacaagtgggaccccagggccttctgtatgttcagcaaagagagcttgcagtgacctccccaaaggatggctccatctccattctgggttctgatgatgccactacttgtcacattgtggtcctgaggcacacaggtaatggggccacctgcttgacacattgtgacggaaccgacaccaaagctgaggtccccttgatcatgaactccataaaatccttttctgaccacgctcaatgtggaaggctggaagtacaccttgttggaggcttcagtgacgacaggcagttgtcacaaaaactcactcatcaacttcttagtgaatttgacaggcaagaagatgacattcacttagtgacattatgtgtgacagaattaaatgaccgggaagaaaacgaaaaccactttccagtaatatatggcattgctgtcaacattaagactgcagagatttacagagcatcctttcaagatcggggtccggaggagcagcttcgtgctgcgcgaactttagcaggaggaccaatgattagcatttatgatgcagagacagaacaacttcgtataggaccgtactcctggacaccatttccacatgtggatttctggttgcaccaagatgacaagcaaatactagagaatctttccacttcgcctctggctgagccaccccactttgttgaacatattagatctaccttgatgtttttaaaaaaacacccatctccagctcacacactgtttcctggaaataaagccctactctacaaaaaaaatgaagatggcttgtgggaaaagatctcttctccaggaagttaaaaaacatgaattaccaaagaaagcaccttcttggcctgacagaccattggtggggctggcacgaatccagatctggatcctacatctgttgggtcttaggcctccttccctcctcagtgtctttcaaatgactttcatcaaatgactttcaaaataaaaccttattttggcaaaggcaaaacaaagcagaaacgaaaaagcctcataagacaactaacaggaggggggcgcgaacacgacaaaaataaccccccagggagagggcggccccagaggttactcgcgtcaccacagggctacttgcgaccaagagtgggcccataaagagaagagcacaataaaaagcaaacacacagtagggacggacgataatacaaaacgcgaggcacacgagaaaaaccgggcaacgagggaacctagagcagagagacgc

SEQ ID NO: 325359 - DNA, 1222 bp, Homo sapiens
ggagggacatgcttcctgagtctcacgcgcgtcttttgggtgaccgctcccttctggggttctgatggtgccactacgtgtaacattgtggtcatgatgcacacgtgtaatggggccacctgcttgacacattgtgacggaaccgacaccaaagctgaggtccccttgatcatgaactccataaaatccttttctgaccacgctcaatgtggaaggctggaagtacaccttgttggaggcttcagtgacgacaggcagttgtcacaaaaactcactcatcaacttcttagtgaatttgacaggcaagaagatgacattcacttagtgacattatgtgtgacagaattaaatgaccgggaagaaaacgaaaaccactttccagtaatatatggcattgctgtcaacattaagactgcagagatttacagagcatcctttcaagatcggggtccggaggagcagcttcgtgctgcgcgaactttagcaggaggaccaatgattagcatttatgatgcagagacagaacaacttcgtataggaccgtactcctggacaccatttccacatgtggatttctggttgcaccaagatgacaagcaaatactagagaatctttccacttcgcctctggctgagccaccccactttgttgaacatattagatctaccttgatgtttttaaaaaaacacccatctccagctcacacactgtttcctggaaataaagccctactctacaaaaaaaatgaagatggcttgtgggaaaagatctcttctccaggaagttaaaaaacatgaattaccaaagaaagcaccttcttggcctgacagaccattggtggggctggcacgaatccagatctggatcctacatctgttgggtcttaggcctccttccctcctcagtgtctttcaaatgactttcatcaaatgactttcaaaataaaaccttattttggcaaaggcaaaacaaagcagaaacgaaaaagcctcataagacaactaacaggaggggggcgcgaacacgacaaaaataaccccccagggagagggcggccccagaggttactcgcgtcaccacagggctacttgcgaccaagagtgggcccataaagagaagagcacaataaaaagcaaacacacagtagggacggacgataatacaaaacgcgaggcacacgagaaaaaccgggcaacgagggaacctagagcagagagacgc

SEQ ID NO: 325360 - DNA, 1255 bp, Homo sapiens
tagcgaactttagcaggaggaccaatgattagcatttatgatgcagagacagaacaacttcgtataggaccgtactcctggacaccatttccacatgtgaatttctggttgcaccaagatgacaagcaaatactagagaatctttccacttcgcctctggctgagccaccccactttgttgaacatattagatctaccttgatcatgaactccataaaatccttttctgaccacgctcaatgtggaaggctggaagtacaccttgttggaggcttcagtgacgacaggcagttgtcacaaaaactcactcatcaacttcttagtgaatttgacaggcaagaagatgacattcacttagtgacattatgtgtgacagaattaaatgaccgggaagaaaacgaaaaccactttccagtaatatatggcattgctgtcaacattaagactgcagagatttacagagcatcctttcaagatcggggtccggaggagcagcttcgtgctgcgcgaactttagcaggaggaccaatgattagcatttatgatgcagagacagaacaacttcgtataggaccgtactcctggacaccatttccacatgtggatttctggttgcaccaagatgacaagcaaatactagagaatctttccacttcgcctctggctgagccaccccactttgttgaacatattagatctaccttgatgtttttaaaaaaacacccatctccagctcacacactgtttcctggaaataaagccctactctacaaaaaaaatgaagatggcttgtgggaaaagatctcttctccaggaagttaaaaaacatgaattaccaaagaaagcaccttcttggcctgacagaccattggtggggctggcacgaatccagatctggatcctacatctgttgggtcttaggcctccttccctcctcagtgtctttcaaatgactttcatcaaatgactttcaaaataaaaccttattttggcaaaggcaaaacaaagcagaaacgaaaaagcctcataagacaactaacaggaggggggcgcgaacacgacaaaaataaccccccagggagagggcggccccagaggttactcgcgtcaccacagggctacttgcgaccaagagtgggcccataaagagaagagcacaataaaaagcaaacacacagtagggacggacgataatacaaaacgcgaggcacacgagaaaaaccgggcaacgagggaacctagagcagagagacgc

SEQ ID NO: 325361 - DNA, 398 bp, Homo sapiens
acaggcaagaagatgacattcacttagtgacattatgtgtgacaggtaagtcctgccatttgccccaaagcaaagatgtgggtctcaggaccgttttgtccccagtcttgcagtgggcccaagcaccggcacacactgctgtcactgcttggccaccatctgttccggctcttcctgtggtgggatggccttccccttccccttgccctcgtccaccatctgccgagcctcagttccagtgcagccccctcgtctcccaggaaggagggcactggatctcagaggagctgccacccgtgtggcagacagggtgcacagagaaggtggggtgggagtggggaccgattctgcagctgccagtttgttcagtataaacccccctgccttgggacagggta

SEQ ID NO: 325362 - DNA, 7978 bp, Homo sapiens
cgcccctcgggggcggctgtggcggaggaacgatggccgacggcggcggccctaaggaggcgccaagcctgcggagctctcccgggccggcgccgcgggtcccgcgcgcggtcgggccgagtggcggtggcggggagaccccgcggaccgcggcgctggcgctgcgcttcgacaagcccattaagcaggccttctacaacaccggggccgtgctgttcgtgtgcctgtgctgcggcgccgcggtgctggtctacttcatcctggaggccttcctgcggccgctgctctgggccgtgctatgcggcacttttctgcaccccttcaagagctcgctgacgcgcctgggccgccactggctgcagcgcctgcaccgcgcgcacacgcccatcgtcctggccgcgctgctcctgccgctctgcttcgtcgactacggcgtcgaggccctgggcgagcaggcgctgcgccgccgccgcctgctcctgctgctcggcgccggcggcccgctcctgtacggcctctactgcctcggcagctacttgggcgtgcaggtgctgctggtgcacgctgccacgctcatctgccgcgggctggactacttcagcagcctgtggatctggacgttggtggttggctatgtgttgactgtttcattcaagtggaatgcaagcactgaacgctacttgagagcagtttcaattcctgtctggattatattgctttttcatttagcatccctggctggctcatggagaattccagtattcctggttattgttttcctgatgtctgtgggtaccctctatgaaaaacagaatggaaaagagtcttctggggcagagttaccagggcaggttatctccatggcagcttctactctggcaaacttggccatctctatcacagggtatgaatcaagcagtgaagaccagccctccactcagcctgcagaagcagtggacaggggagaatccgctccaacgttgtccacctccccttcaccctcctccccttcacccacttccccttcacctactctgggcagacgaaggcctgaaataggaacgtttcttagaaagaagaaaactagtgacatctactttgtgtctctagtttgggccattgtcgtcatgcagatctggttgaacctgtggattgtgcagttgctgccagtgccgattgcagtctggatactcaaaaagcttgtcattcactttggagttgtggatttcctagagaaacgctaccatgtgtggtggggcattatagaaagcttcctgaaggagcggcagggagctctcgcgccttggcccattgtcgggcttggaaaattcttgttaaaagttgatagcaagctctggcactggctaaataagaagatgatcatctggttggagaagatgttagataaaataattagcattttcatcatatttttgttagtgataggaactcttcttttagccctactcctgactgcaaaggtacatcaagagagtgtacacatgattgaagtcacaagtaatttgattaatgaaactctagcaaatcaccctgagtgggcaaattggcttcctgaggctcaggtagtccaaagagccctgaattctgcggctaacaacgtgtatcagtatggacgagaatggataactcacaagctccataaaattctaggagataaggtgaacaatactgctgtaattgaaaagcaagtactagaactttgggacagactgtatcactcttggtttgtaaagaatgtaacacactctggaaggcacaaaggacagaagttgcatgtcagtcgtcagaatagctggctgggagacattctggactggcaggatattgtttcctttgttcacgagaacattgagacatttctttcgatcttggagtctctgtggatcgttatgagccggaatgtgagcctgctgttcaccactgtcactacactcttgaccatcctcttctacagcgggacagcccttctcaattttgtactctctctgataattttcctgaccacactattttatctattaagttccagtgatgagtactacaagccagtgaagtgggtgataagcctgactccactatctcagccaggtccttcttctaatattattggccagtctgtggaagaagctatcagaggggtgtttgatgcttccctcaaaatggctggcttctatggattgtatacctggctgactcatactatgtttggcatcaatattgtcttcataccatcagcattagcagcaatccttggagcagtgccattcctggggacatactgggcagcagtacctgcagttcttgacctgtggctgacacaagggttaggatgcaaggccattttactgttgatttttcatctcttgccaacatactttgtagatactgcaatctactctgacatatcaggaggtggccatccttacctgacaggcttggcagtggccggtggagcatactacctaggcctggaaggagcaatcatcggtcctattcttctctgcatacttgtggttgcttccaatatctatagtgccatgctagtgagtcccacgaattcagttcccacgccaaaccagaccccatggcctgctcagcctcagcggactttccgtgacatttctgaagatctgaaatcttcagtaggttgatgtggtttcctctgcagtgatttttctaggaagttcaaatttgacagcgagttcagctcagctgtggccctctgcccttccagctgtgcctagcaagcaaaacccaggaaagaagcagaagcctcctggccttacatacagaatgcctggacaagagagaacttgctgcgggctgctttgtattttaaaacacagcttgagagttcagagttggtggtttgctcacttaactgttgttaagatggcttgaaaagtttcattttatacactggtaccctggcttgaaatttttccactttggttatctatgttactatattatatatttataaagttattttaagaactctaaactacctgctgttaaaagaatagatggtgtaattttttcctggtttaagaaatgtattgttaaacttttctaagacagtcacttttcaaggaagagggctttcacttttgagtgtgtagttgagtgagcaggaaaaatgaatcttctacccttctcccacaatgtattatacgctctttaagaaataataaatcataagtataagggtggggtggcttatttgatgttcagttttatattataaccctgggagatacaaagactgaagctcttcctcctcttccttttctcttcacgcttctttacactattgccaaattataaaacttggctgaccacgttgaagtgaaatacttattaagctgctatgaatggtaacagtatgataaaattcatgctgttattaggttttctccttccaggtggttgaagtgaaaaatctcaggtgtagcaatactctgatttgttaaatgtatccgtttcattatttggaactctgccaataagttagttttcagcagaattttgtatttatgtagtattttcccatctcttagcacagtgccttgcacatgactctaaatgaatgcttgttgaattgaattgcaactttaaaaatatctcagatatcacaataaccagcatagtgctttacattttacaaagtccttttgcacatactatttcacaagtacatcacatcagctttcatatagctttatattattttacatcagttttacactgatggagaagctaaggttcagaaaagtgaccaactcaaagtcgtaaagtgtagtaggatttggcctcagatctttgactccgttgtgtgcagattctgctgtattagtgttccttctaaatattgtatgcagttttcccagtgttacgagattggtgttgctatccatttgttgtgaatgaagacttgtcctatagtacatgacagggctgagagtggactgtagttcttagctgaaccctttctactgtttaaaacaatcatcaggcctatcctctgctcccaggggaatgtgggagagaaaagggttcttggccaggctgtaggtggtggctcacatctgtaatcccagcactttggaaggctgaggtgggtggattgcttgagcccagggatttgagatcagcctaggcaacatggcaaaaccccatctctacaaaaaaaaaaaaaaaaaaaaaaaaattagctgggcacggtggtgtggctatagtctgagctactcaggaggctgatgtatgaggatcacctgagtccaggaggtcgaggctgcagtgagccaagatggcgccactgcactccagcctgggtgagagagtgagacactgtcccaaggaaaaaaaaaagtgttggggggtagttcttaagcgttgaagatttcctttttggaaagtatttaaaggtagaaatattaataatttttcctaaaacatctccctaagaagtcactgataattataattagtttaaatttattcttacactacttaagaaaaatttcatttagaaaaggctaccatgagatcttttgactatatggagtagactgcatacagatctctttatttctattatgaatattttagcgattataatcagctattccactgagtattagatttggtcactaagtaactcatgtttttctttagtcaatcattcattcattcactaaaacatttgttgagagttggctaaactctagattctgtgccaggcactgtacagggtgatggagatcactcataagaaggcctcttgctcttagccagatcatatgtaatactaaatttaaattttttgcattaaaaggctaaaaaatcatttgtttttgttaattatatactggttgatttatagatgtaattagcacatattcataagagacaaatatatacaatgagttactatacatatacaaagtgattttagctgtataaagtgatattgcaaaaaactacagctaatgtttcttgctgggtaattattagcataaatatcaggttcttagaggtctttaagagaatactttagagctaccaaaattagcagcagtgatgtaatatcaccctgaaataccaggagcagaggtgccccagagtgcttcacagctatgatcaggaaacttgacctgccccattgctacagcaacggcataaggactaggaaggtccactagctggggaggtcttggaaccctccgagccagaaagaagcattccagcatgattcctcagatgcaatgaggaaggtttacagaattttcacagggcaacagagatcaagtggtatgaaaaggtaggagttttaagctcaagtctcaaagataacctacctttacattctcagtcagaatttgacccagaaagaggaagtttcttcaggaacagaccgtacgttgatgaagtagaagtcatttcagtaaaaacggagtacagaacttggtcataatatcttgcattttatagatttattaaagattagtttcaagttcacattcgctattcagttgtaaaccgaatggatgggaggggagaaaatacaagctctccacacaggtatgctcctctcttttctgagagagaaggcatgggattttcagcataaattccatgttatgtgagtgctgtttgagttctgaagttcctatcaatatctgttcctgcaagtgatctctgtaagaccaccttacatgctggtcttagttattgttaaaattgcaaggtttcttcacaccctctttgataagaagtgtttagctggcagagctttcccttgacttctgagtctagtgtgggttggcccatgacagtgggaagaaatccaacatgttacatggagaccttgtatgtaaacaaactctgtagcctttgaaagtggaactgctttttacagttaaagggctgctaaatggcttgcagatgagatcttctggctcaccttgatcttcacatgaacccattgtgacctatctggatttcctaggacctgtagtttccatttgggttatattagtgcctcaggaatgtgtcactactggtcaagcaatactcagaaattcaggctgtgaggggttagattagaggaaagtaatttaggtgagctatccagagctttcaacctcagggtttataggaaaaaaaaacaaaatacaaaaacccttaggacttctcatactctagccctgaccttgcagtctcctctgaggggcctcctaagacccttaaaataatattacaataggactttgagtgtgcatttcacagtggaaatagcctctggctagcattacttccaaatgctagttccagctaaaaacaagtactttttattagtttcttgtctttcaacattctgccatcaaaatatattcattttattaacttaccgattattgggaacctgcaaaaaaaaaaaaaaaaaaacacacatgctgtctgcagccactgtttggttatttttgatagtttaagagaattataaatcaagttgttctgtctactagagtcagaaattctgtgctagaatgggacttctaaaattaggtggtcctgtcactttctagagaaagacccaaattcataggtttaagtggcttgtctgacatacacatacagccagttagtaacagaattcagaatagaatagagttcttttttttctgtcagtccgttgttctacttctctttccttttcttcatggttgagcagcttttggcaaaatgtgttccatatagcagtagttccaagagatgttaatagatgtaagaaaaaaagtgtgtgtgtgttgggggtgggggattgcatggtcaattaaaatgaaggaatgctgagtttgtttccttactgtaggacttctaagagttttgaacatgctattacacattgtgaatttataaaaggggacaaacactgtttgaccttagactgcactccccttctttattcctcagagcatctcaaaggactacagggtcctttgagaaacatggcccttgatcaagtttacaactctttgagaagacatccctaatggaaatactgaatggcagatctattactgtggtaccatgtagtgtgtaataaatcttgaagtccagaaagcaagtatatttgctgtttagagctatacttaaggtatagagattcttttccacctgtggtgtgtaaaatcagtattgtgtttaattttgcaggtttttcaaggatcaactaatgtgcaaatacagtggtgatatattgatattacattttaataatgcttttgtatggcactttatagttttcagacaccttttgtaacagccctgtgagacagacaatattatccttattgtacagatgggggggctctggaggctctgaaaagtttttggtgatattcccctaagtttataccacaaaatgatggagccagaatttagttgcagaacttctgactccaagtccagagttctttactagacatctggtttcttactagctttttgctagctttttattttacagtgaaaagtatggaagcaaatcctgataattttggcttattatcaaatatcatttattttttattgcagagacccagcagatgtaactctcattgtagccatcccaaagaaaacccttctttgccctttgcagtgccacttatttaggtaactgaagtgtatttccagtacaatttgattttgaactaagatttgatatagagttgtaattgcttacataactctttgaaaatgtatcatccctgggttctcaggtgaaggaggcaattcaaaagtaaaaaagaatattcgaatacaataaataccctctgttctcacacaaatgctgtttcttagctaacttgctttgacaacctactgatgtaacttctttattaatgtgaaatatttatattttgaaataaaattactagtgttgaatgaa

SEQ ID NO: 325363 - DNA, 566 bp, Homo sapiens
aactgaagctattacatgatttggaatcaagtggtcacgtgatttttctgaatcacgatatgacactgtttatttactctttctttttatctttgggcattccagaggggtgtttgatgcttccctcaaaatggctggcttctatggattgtatacctggctgactcatactatgtttggcatcaatattgtcttcataccatcagcattagcagcaatccttggagcagtgccattcctggggacatactgggcagcagtacctgcagttcttgacctgtggctgacacaagggttaggatgcaaggccattttactgttgatttttcatctcttgccaacatactttgtagatactgcaatctactctgacatatcagggtaagtaagccacagaatttcttattagtgaatcatccaggcatttccgttttttttttttaaaaggaggatttttttctcctgggggtatacaaaagaactggtagtaggaattttcagtgaaatagccttttgtgtcccacaaatgaaattttcattgaaaatagtattgtttacaaggcatg

SEQ ID NO: 325364 - DNA, 7954 bp, Homo sapiens
cgcccctcgggggcggctgtggcggaggaacgatggccgacggcggcggccctaaggaggcgccaagcctgcggagctctcccgggccggcgccgcgggtcccgcgcgcggtcgggccgagtggcggtggcggggagaccccgcggaccgcggcgctggcgctgcgcttcgacaagcccattaagcaggccttctacaacaccggggccgtgctgttcgtgtgcctgtgctgcggcgccgcggtgctggtctacttcatcctggaggccttcctgcggccgctgctctgggccgtgctatgcggcacttttctgcaccccttcaagagctcgctgacgcgcctgggccgccactggctgcagcgcctgcaccgcgcgcacacgcccatcgtcctggccgcgctgctcctgccgctctgcttcgtcgactacggcgtcgaggccctgggcgagcaggcgctgcgccgccgccgcctgctcctgctgctcggcgccggcggcccgctcctgtacggcctctactgcctcggcagctacttgggcgtgcaggtgctgctggtgcacgctgccacgctcatctgccgcgggctggactacttcagcagcctgtggatctggacgttggtggttggctatgtgttgactgtttcattcaagtggaatgcaagcactgaacgctacttgagagcagtttcaattcctgtctggattatattgctttttcatttagcatccctggctggctcatggagaattccagtattcctggttattgttttcctgatgtctgtgggtaccctctatgaaaaacagaatggaaaagagtcttctggggcagagttaccagggcaggttatctccatggcagcttctactctggcaaacttggccatctctatcacagggtatgaatcaagcagtgaagaccagccctccactcagcctgcagaagcagtggacaggggagaatccgctccaacgttgtccacctccccttcaccctcctccccttcacccacttccccttcacctactctgggcagacgaaggcctgaaataggaacgtttcttagaaagaagaaaactagtgacatctactttgtgtctctagtttgggccattgtcgtcatgcagatctggttgaacctgtggattgtgcagttgctgccagtgccgattgcagtctggatactcaaaaagcttgtcattcactttggagttgtggatttcctagagaaacgctaccatgtgtggtggggcattatagaaagcttcctgaaggagcggcagggagctctcgcgccttggcccattgtcgggcttggaaaattcttgttaaaagttgatagcaagatgatcatctggttggagaagatgttagataaaataattagcattttcatcatatttttgttagtgataggaactcttcttttagccctactcctgactgcaaaggtacatcaagagagtgtacacatgattgaagtcacaagtaatttgattaatgaaactctagcaaatcaccctgagtgggcaaattggcttcctgaggctcaggtagtccaaagagccctgaattctgcggctaacaacgtgtatcagtatggacgagaatggataactcacaagctccataaaattctaggagataaggtgaacaatactgctgtaattgaaaagcaagtactagaactttgggacagactgtatcactcttggtttgtaaagaatgtaacacactctggaaggcacaaaggacagaagttgcatgtcagtcgtcagaatagctggctgggagacattctggactggcaggatattgtttcctttgttcacgagaacattgagacatttctttcgatcttggagtctctgtggatcgttatgagccggaatgtgagcctgctgttcaccactgtcactacactcttgaccatcctcttctacagcgggacagcccttctcaattttgtactctctctgataattttcctgaccacactattttatctattaagttccagtgatgagtactacaagccagtgaagtgggtgataagcctgactccactatctcagccaggtccttcttctaatattattggccagtctgtggaagaagctatcagaggggtgtttgatgcttccctcaaaatggctggcttctatggattgtatacctggctgactcatactatgtttggcatcaatattgtcttcataccatcagcattagcagcaatccttggagcagtgccattcctggggacatactgggcagcagtacctgcagttcttgacctgtggctgacacaagggttaggatgcaaggccattttactgttgatttttcatctcttgccaacatactttgtagatactgcaatctactctgacatatcaggaggtggccatccttacctgacaggcttggcagtggccggtggagcatactacctaggcctggaaggagcaatcatcggtcctattcttctctgcatacttgtggttgcttccaatatctatagtgccatgctagtgagtcccacgaattcagttcccacgccaaaccagaccccatggcctgctcagcctcagcggactttccgtgacatttctgaagatctgaaatcttcagtaggttgatgtggtttcctctgcagtgatttttctaggaagttcaaatttgacagcgagttcagctcagctgtggccctctgcccttccagctgtgcctagcaagcaaaacccaggaaagaagcagaagcctcctggccttacatacagaatgcctggacaagagagaacttgctgcgggctgctttgtattttaaaacacagcttgagagttcagagttggtggtttgctcacttaactgttgttaagatggcttgaaaagtttcattttatacactggtaccctggcttgaaatttttccactttggttatctatgttactatattatatatttataaagttattttaagaactctaaactacctgctgttaaaagaatagatggtgtaattttttcctggtttaagaaatgtattgttaaacttttctaagacagtcacttttcaaggaagagggctttcacttttgagtgtgtagttgagtgagcaggaaaaatgaatcttctacccttctcccacaatgtattatacgctctttaagaaataataaatcataagtataagggtggggtggcttatttgatgttcagttttatattataaccctgggagatacaaagactgaagctcttcctcctcttccttttctcttcacgcttctttacactattgccaaattataaaacttggctgaccacgttgaagtgaaatacttattaagctgctatgaatggtaacagtatgataaaattcatgctgttattaggttttctccttccaggtggttgaagtgaaaaatctcaggtgtagcaatactctgatttgttaaatgtatccgtttcattatttggaactctgccaataagttagttttcagcagaattttgtatttatgtagtattttcccatctcttagcacagtgccttgcacatgactctaaatgaatgcttgttgaattgaattgcaactttaaaaatatctcagatatcacaataaccagcatagtgctttacattttacaaagtccttttgcacatactatttcacaagtacatcacatcagctttcatatagctttatattattttacatcagttttacactgatggagaagctaaggttcagaaaagtgaccaactcaaagtcgtaaagtgtagtaggatttggcctcagatctttgactccgttgtgtgcagattctgctgtattagtgttccttctaaatattgtatgcagttttcccagtgttacgagattggtgttgctatccatttgttgtgaatgaagacttgtcctatagtacatgacagggctgagagtggactgtagttcttagctgaaccctttctactgtttaaaacaatcatcaggcctatcctctgctcccaggggaatgtgggagagaaaagggttcttggccaggctgtaggtggtggctcacatctgtaatcccagcactttggaaggctgaggtgggtggattgcttgagcccagggatttgagatcagcctaggcaacatggcaaaaccccatctctacaaaaaaaaaaaaaaaaaaaaaaaaattagctgggcacggtggtgtggctatagtctgagctactcaggaggctgatgtatgaggatcacctgagtccaggaggtcgaggctgcagtgagccaagatggcgccactgcactccagcctgggtgagagagtgagacactgtcccaaggaaaaaaaaaagtgttggggggtagttcttaagcgttgaagatttcctttttggaaagtatttaaaggtagaaatattaataatttttcctaaaacatctccctaagaagtcactgataattataattagtttaaatttattcttacactacttaagaaaaatttcatttagaaaaggctaccatgagatcttttgactatatggagtagactgcatacagatctctttatttctattatgaatattttagcgattataatcagctattccactgagtattagatttggtcactaagtaactcatgtttttctttagtcaatcattcattcattcactaaaacatttgttgagagttggctaaactctagattctgtgccaggcactgtacagggtgatggagatcactcataagaaggcctcttgctcttagccagatcatatgtaatactaaatttaaattttttgcattaaaaggctaaaaaatcatttgtttttgttaattatatactggttgatttatagatgtaattagcacatattcataagagacaaatatatacaatgagttactatacatatacaaagtgattttagctgtataaagtgatattgcaaaaaactacagctaatgtttcttgctgggtaattattagcataaatatcaggttcttagaggtctttaagagaatactttagagctaccaaaattagcagcagtgatgtaatatcaccctgaaataccaggagcagaggtgccccagagtgcttcacagctatgatcaggaaacttgacctgccccattgctacagcaacggcataaggactaggaaggtccactagctggggaggtcttggaaccctccgagccagaaagaagcattccagcatgattcctcagatgcaatgaggaaggtttacagaattttcacagggcaacagagatcaagtggtatgaaaaggtaggagttttaagctcaagtctcaaagataacctacctttacattctcagtcagaatttgacccagaaagaggaagtttcttcaggaacagaccgtacgttgatgaagtagaagtcatttcagtaaaaacggagtacagaacttggtcataatatcttgcattttatagatttattaaagattagtttcaagttcacattcgctattcagttgtaaaccgaatggatgggaggggagaaaatacaagctctccacacaggtatgctcctctcttttctgagagagaaggcatgggattttcagcataaattccatgttatgtgagtgctgtttgagttctgaagttcctatcaatatctgttcctgcaagtgatctctgtaagaccaccttacatgctggtcttagttattgttaaaattgcaaggtttcttcacaccctctttgataagaagtgtttagctggcagagctttcccttgacttctgagtctagtgtgggttggcccatgacagtgggaagaaatccaacatgttacatggagaccttgtatgtaaacaaactctgtagcctttgaaagtggaactgctttttacagttaaagggctgctaaatggcttgcagatgagatcttctggctcaccttgatcttcacatgaacccattgtgacctatctggatttcctaggacctgtagtttccatttgggttatattagtgcctcaggaatgtgtcactactggtcaagcaatactcagaaattcaggctgtgaggggttagattagaggaaagtaatttaggtgagctatccagagctttcaacctcagggtttataggaaaaaaaaacaaaatacaaaaacccttaggacttctcatactctagccctgaccttgcagtctcctctgaggggcctcctaagacccttaaaataatattacaataggactttgagtgtgcatttcacagtggaaatagcctctggctagcattacttccaaatgctagttccagctaaaaacaagtactttttattagtttcttgtctttcaacattctgccatcaaaatatattcattttattaacttaccgattattgggaacctgcaaaaaaaaaaaaaaaaaaacacacatgctgtctgcagccactgtttggttatttttgatagtttaagagaattataaatcaagttgttctgtctactagagtcagaaattctgtgctagaatgggacttctaaaattaggtggtcctgtcactttctagagaaagacccaaattcataggtttaagtggcttgtctgacatacacatacagccagttagtaacagaattcagaatagaatagagttcttttttttctgtcagtccgttgttctacttctctttccttttcttcatggttgagcagcttttggcaaaatgtgttccatatagcagtagttccaagagatgttaatagatgtaagaaaaaaagtgtgtgtgtgttgggggtgggggattgcatggtcaattaaaatgaaggaatgctgagtttgtttccttactgtaggacttctaagagttttgaacatgctattacacattgtgaatttataaaaggggacaaacactgtttgaccttagactgcactccccttctttattcctcagagcatctcaaaggactacagggtcctttgagaaacatggcccttgatcaagtttacaactctttgagaagacatccctaatggaaatactgaatggcagatctattactgtggtaccatgtagtgtgtaataaatcttgaagtccagaaagcaagtatatttgctgtttagagctatacttaaggtatagagattcttttccacctgtggtgtgtaaaatcagtattgtgtttaattttgcaggtttttcaaggatcaactaatgtgcaaatacagtggtgatatattgatattacattttaataatgcttttgtatggcactttatagttttcagacaccttttgtaacagccctgtgagacagacaatattatccttattgtacagatgggggggctctggaggctctgaaaagtttttggtgatattcccctaagtttataccacaaaatgatggagccagaatttagttgcagaacttctgactccaagtccagagttctttactagacatctggtttcttactagctttttgctagctttttattttacagtgaaaagtatggaagcaaatcctgataattttggcttattatcaaatatcatttattttttattgcagagacccagcagatgtaactctcattgtagccatcccaaagaaaacccttctttgccctttgcagtgccacttatttaggtaactgaagtgtatttccagtacaatttgattttgaactaagatttgatatagagttgtaattgcttacataactctttgaaaatgtatcatccctgggttctcaggtgaaggaggcaattcaaaagtaaaaaagaatattcgaatacaataaataccctctgttctcacacaaatgctgtttcttagctaacttgctttgacaacctactgatgtaacttctttattaatgtgaaatatttatattttgaaataaaattactagtgttgaatgaa

SEQ ID NO: 325365 - DNA, 8380 bp, Homo sapiens
cgcccctcgggggcggctgtggcggaggaacgatggccgacggcggcggccctaaggaggcgccaagcctgcggagctctcccgggccggcgccgcgggtcccgcgcgcggtcgggccgagtggcggtggcggggagaccccgcggaccgcggcgctggcgctgcgcttcgacaagcccattaagcaggccttctacaacaccggggccgtgctgttcgtgtgcctgtgctgcggcgccgcggtgctggtctacttcatcctggaggccttcctgcggccgctgctctgggccgtgctatgcggcacttttctgcaccccttcaagagctcgctgacgcgcctgggccgccactggctgcagcgcctgcaccgcgcgcacacgcccatcgtcctggccgcgctgctcctgccgctctgcttcgtcgactacggcgtcgaggccctgggcgagcaggcgctgcgccgccgccgcctgctcctgctgctcggcgccggcggcccgctcctgtacggcctctactgcctcggcagctacttgggcgtgcaggtgctgctggtgcacgctgccacgctcatctgccgcgggctggactacttcagcagcctgtggatctggacgttggtggttggctatgtgttgactgtttcattcaagtggaatgcaagcactgaacgctacttgagagcagtttcaattcctgtctggattatattgctttttcatttagcatccctggctggctcatggagaattccagtattcctggttattgttttcctgatgtctgtgggtaccctctatgaaaaacagaatggaaaagagtcttctggggcagagttaccagggcaggttatctccatggcagcttctactctggcaaacttggccatctctatcacagggtatgaatcaagcagtgaagaccagccctccactcagcctgcagaagcagtggacaggggagaatccgctccaacgttgtccacctccccttcaccctcctccccttcacccacttccccttcacctactctgggcagacgaaggcctgaaataggaacgtttcttagaaagaagaaaactagtgacatctactttgtgtctctagtttgggccattgtcgtcatgcagatctggttgaacctgtggattgtgcagttgctgccagtgccgattgcagtctggatactcaaaaagcttgtcattcactttggagttgtggatttcctagagaaacgctaccatgtgtggtggggcattatagaaagcttcctgaaggagcggcagggagctctcgcgccttggcccattgtcgggcttggaaaattcttgttaaaagttgatagcaagatgatcatctggttggagaagatgttagataaaataattagcattttcatcatatttttgttagtgataggaactcttcttttagccctactcctgactgcaaaggtacatcaagagagtgtacacatgattgaagtcacaagtaatttgattaatgaaactctagcaaatcaccctgagtgggcaaattggcttcctgaggctcaggtagtccaaagagccctgaattctgcggctaacaacgtgtatcagtatggacgagaatggataactcacaagctccataaaattctaggagataaggtgaacaatactgctgtaattgaaaagcaagtactagaactttgggacagactgtatcactcttggtttgtaaagaatgtaacacactctggaaggcacaaaggacagaagttgcatgtcagtcgtcagaatagctggctgggagacattctggactggcaggatattgtttcctttgttcacgagaacattgagacatttctttcgatcttggagtctctgtggatcgttatgagccggaatgtgagcctgctgttcaccactgtcactacactcttgaccatcctcttctacagcgggacagcccttctcaattttgtactctctctgataattttcctgaccacactattttatctattaagttccagtgatgagtactacaagccagtgaagtgggtgataagcctgactccactatctcagccaggtccttcttctaatattattggccagtctgtggaagaagctatcagaggggtgtttgatgcttccctcaaaatggctggcttctatggattgtatacctggctgactcatactatgtttggcatcaatattgtcttcataccatcagcattagcagcaatccttggagcagtgccattcctggggacatactgggcagcagtacctgcagttcttgacctgtggctgacacaagggttaggatgcaaggccattttactgttgatttttcatctcttgccaacatactttgtagatactgcaatctactctgacatatcaggaggtggccatccttacctgacaggcttggcagtggccggtggagcatactacctaggcctggaaggagcaatcatcggtcctattcttctctgcatacttgtggttgcttccaatatctatagtgccatgctagtgagtcccacgaattcagttcccacgccaaaccagaccccatggcctgctcagcctcagcggactttccgtgacatttctgaagatctgaaatcttcagtaggttgatgtggtttcctctgcagtgatttttctaggaagttcaaatttgacagcgagttcagctcagctgtggccctctgcccttccagctgtgcctagcaagcaaaacccaggaaagaagcagaagcctcctggccttacatacagaatgcctggacaagagagaacttgctgcgggctgctttgtattttaaaacacagcttgagagttcagagttggtggtttgctcacttaactgttgttaagatggcttgaaaagtttcattttatacactggtaccctggcttgaaatttttccactttggttatctatgttactatattatatatttataaagttattttaagaactctaaactacctgctgttaaaagaatagatggtgtaattttttcctggtttaagaaatgtattgttaaacttttctaagacagtcacttttcaaggaagagggctttcacttttgagtgtgtagttgagtgagcaggaaaaatgaatcttctacccttctcccacaatgtattatacgctctttaagaaataataaatcataagtataagggtggggtggcttatttgatgttcagttttatattataaccctgggagatacaaagactgaagctcttcctcctcttccttttctcttcacgcttctttacactattgccaaattataaaacttggctgaccacgttgaagtgaaatacttattaagctgctatgaatggtaacagtatgataaaattcatgctgttattaggttttctccttccaggtggttgaagtgaaaaatctcaggtgtagcaatactctgatttgttaaatgtatccgtttcattatttggaactctgccaataagttagttttcagcagaattttgtatttatgtagtattttcccatctcttagcacagtgccttgcacatgactctaaatgaatgcttgttgaattgaattgcaactttaaaaatatctcagatatcacaataaccagcatagtgctttacattttacaaagtccttttgcacatactatttcacaagtacatcacatcagctttcatatagctttatattattttacatcagttttacactgatggagaagctaaggttcagaaaagtgaccaactcaaagtcgtaaagtgtagtaggatttggcctcagatctttgactccgttgtgtgcagattctgctgtattagtgttccttctaaatattgtatgcagttttcccagtgttacgagattggtgttgctatccatttgttgtgaatgaagacttgtcctatagtacatgacagggctgagagtggactgtagttcttagctgaaccctttctactgtttaaaacaatcatcaggcctatcctctgctcccaggggaatgtgggagagaaaagggttcttggccaggctgtaggtggtggctcacatctgtaatcccagcactttggaaggctgaggtgggtggattgcttgagcccagggatttgagatcagcctaggcaacatggcaaaaccccatctctacaaaaaaaaaaaaaaaaaaaaaaaaattagctgggcacggtggtgtggctatagtctgagctactcaggaggctgatgtatgaggatcacctgagtccaggaggtcgaggctgcagtgagccaagatggcgccactgcactccagcctgggtgagagagtgagacactgtcccaaggaaaaaaaaaagtgttggggggtagttcttaagcgttgaagatttcctttttggaaagtatttaaaggtagaaatattaataatttttcctaaaacatctccctaagaagtcactgataattataattagtttaaatttattcttacactacttaagaaaaatttcatttagaaaaggctaccatgagatcttttgactatatggagtagactgcatacagatctctttatttctattatgaatattttagcgattataatcagctattccactgagtattagatttggtcactaagtaactcatgtttttctttagtcaatcattcattcattcactaaaacatttgttgagagttggctaaactctagattctgtgccaggcactgtacagggtgatggagatcactcataagaaggcctcttgctcttagccagatcatatgtaatactaaatttaaattttttgcattaaaaggctaaaaaatcatttgtttttgttaattatatactggttgatttatagatgtaattagcacatattcataagagacaaatatatacaatgagttactatacatatacaaagtgattttagctgtataaagtgatattgcaaaaaactacagctaatgtttcttgctgggtaattattagcataaatatcaggttcttagaggtctttaagagaatactttagagctaccaaaattagcagcagtgatgtaatatcaccctgaaataccaggagcagaggtgccccagagtgcttcacagctatgatcaggaaacttgacctgccccattgctacagcaacggcataaggactaggaaggtccactagctggggaggtcttggaaccctccgagccagaaagaagcattccagcatgattcctcagatgcaatgaggaaggtttacagaattttcacagggcaacagagatcaagtggtatgaaaaggtaggagttttaagctcaagtctcaaagataacctacctttacattctcagtcagaatttgacccagaaagaggaagtttcttcaggaacagaccgtacgttgatgaagtagaagtcatttcagtaaaaacggagtacagaacttggtcataatatcttgcattttatagatttattaaagattagtttcaagttcacattcgctattcagttgtaaaccgaatggatgggaggggagaaaatacaagctctccacacaggtatgctcctctcttttctgagagagaaggcatgggattttcagcataaattccatgttatgtgagtgctgtttgagttctgaagttcctatcaatatctgttcctgcaagtgatctctgtaagaccaccttacatgctggtcttagttattgttaaaattgcaaggtttcttcacaccctctttgataagaagtgtttagctggcagagctttcccttgacttctgagtctagtgtgggttggcccatgacagtgggaagaaatccaacatgttacatggagaccttgtatgtaaacaaactctgtagcctttgaaagtggaactgctttttacagttaaagggctgctaaatggcttgcagatgagatcttctggctcaccttgatcttcacatgaacccattgtgacctatctggatttcctaggacctgtagtttccatttgggttatattagtgcctcaggaatgtgtcactactggtcaagcaatactcagaaattcaggctgtgaggggttagattagaggaaagtaatttaggtgagctatccagagctttcaacctcagggtttataggaaaaaaaaacaaaatacaaaaacccttaggacttctcatactctagccctgaccttgcagtctcctctgaggggcctcctaagacccttaaaataatattacaataggactttgagtgtgcatttcacagtggaaatagcctctggctagcattacttccaaatgctagttccagctaaaaacaagtactttttattagtttcttgtctttcaacattctgccatcaaaatatattcattttattaacttaccgattattgggaacctgcaaaaaaaaaaaaaaaaaaacacacatgctgtctgcagccactgtttggttatttttgatagtttaagagaattataaatcaagttgttctgtctactagagtcagaaattctgtgctagaatgggacttctaaaattaggtggtcctgtcactttctagagaaagacccaaattcataggtttaagtggcttgtctgacatacacatacagccagttagtaacagaattcagaatagaatagagttcttttttttctgtcagtccgttgttctacttctctttccttttcttcatggttgagcagcttttggcaaaatgtgttccatatagcagtagttccaagagatgttaatagatgtaagaaaaaaagtgtgtgtgtgttgggggtgggggattgcatggtcaattaaaatgaaggaatgctgagtttgtttccttactgtaggacttctaagagttttgaacatgctattacacattgtgaatttataaaaggggacaaacactgtttgaccttagactgcactccccttctttattcctcagagcatctcaaaggactacagggtcctttgagaaacatggcccttgatcaagtttacaactctttgagaagacatccctaatggaaatactgaatggcagatctattactgtggtaccatgtagtgtgtaataaatcttgaagtccagaaagcaagtatatttgctgtttagagctatacttaaggtatagagattcttttccacctgtggtgtgtaaaatcagtattgtgtttaattttgcaggtttttcaaggatcaactaatgtgcaaatacagtggtgatatattgatattacattttaataatgcttttgtatggcactttatagttttcagacaccttttgtaacagccctgtgagacagacaatattatccttattgtacagatgggggggctctggaggctctgaaaagtttttggtgatattcccctaagtttataccacaaaatgatggagccagaatttagttgcagaacttctgactccaagtccagagttctttactagacatctggtttcttactagctttttgctagctttttattttacagtgaaaagtatggaagcaaatcctgataattttggcttattatcaaatatcatttattttttattgcagagacccagcagatgtaactctcattgtagccatcccaaagaaaacccttctttgccctttgcagtgccacttatttaggtaactgaagtgtatttccagtacaatttgattttgaactaagatttgatatagagttgtaattgcttacataactctttgaaaatgtatcatccctgggttctcaggtgaaggaggcaattcaaaagtaaaaaagaatattcgaatacaataaataccctctgttctcacacaaatgctgtttcttagctaacttgctttgacaacctactgatgtaacttctttattaatgtgaaatatttatattttgaaataaaattactagtgttgaatgaaaaaaaaaaaaaaaaaaaaacagggggggcgcgcgcgcccaaaaattccccccgggggggcgcccaagtgcgccgccccccatttttttgtggaaaaagggggcgccccccataaataggggagagcgcctataatatactaccgcaaggcgacgagggggccgcgcgggtctaaaacacccgtcggcagcggggggaaacacaacgctcgcgacagcggggaaatccgggggaggaaagggaccccatatactcgtggggggggaggaaaatagggtggaaaatatactaaaaggaactataaaagtctcagagggacaattatagatttttagggtgtatcagtggggttaacacaagtggatatagtgctgcgcgaggaaaattgtggctagggatattgattttagatatttttacggggagt

SEQ ID NO: 325366 - DNA, 8118 bp, Homo sapiens
cgcccctcgggggcggctgtggcggaggaacgatggccgacggcggcggccctaaggaggcgccaagcctgcggagctctcccgggccggcgccgcgggtcccgcgcgcggtcgggccgagtggcggtggcggggagaccccgcggaccgcggcgctggcgctgcgcttcgacaagcccattaagcaggccttctacaacaccggggccgtgctgttcgtgtgcctgtgctgcggcgccgcggtgctggtctacttcatcctggaggccttcctgcggccgctgctctgggccgtgctatgcggcacttttctgcaccccttcaagagctcgctgacgcgcctgggccgccactggctgcagcgcctgcaccgcgcgcacacgcccatcgtcctggccgcgctgctcctgccgctctgcttcgtcgactacggcgtcgaggccctgggcgagcaggcgctgcgccgccgccgcctgctcctgctgctcggcgccggcggcccgctcctgtacggcctctactgcctcggcagctacttgggcgtgcaggtgctgctggtgcacgctgccacgctcatctgccgcgggctggactacttcagcagcctgtggatctggacgttggtggttggctatgtgttgactgtttcattcaagtggaatgcaagcactgaacgctacttgagagcagtttcaattcctgtctggattatattgctttttcatttagcatccctggctggctcatggagaattccagtattcctggttattgttttcctgatgtctgtgggtaccctctatgaaaaacagaatggaaaagagtcttctggggcagagttaccagggcaggttatctccatggcagcttctactctggcaaacttggccatctctatcacagggtatgaatcaagcagtgaagaccagccctccactcagcctgcagaagcagtggacaggggagaatccgctccaacgttgtccacctccccttcaccctcctccccttcacccacttccccttcacctactctgggcagacgaaggcctgaaataggaacgtttcttagaaagaagaaaactagtgacatctactttgtgtctctagtttgggccattgtcgtcatgcagatctggttgaacctgtggattgtgcagttgctgccagtgccgattgcagtctggatactcaaaaagcttgtcattcactttggagttgtggatttcctagagaaacgctaccatgtgtggtggggcattatagaaagcttcctgaaggagcggcagggagctctcgcgccttggcccattgtcgggcttggaaaattcttgttaaaagttgatagcaagatgatcatctggttggagaagatgttagataaaataattagcattttcatcatatttttgttagtgataggaactcttcttttagccctactcctgactgcaaaggtacatcaagagagtgtacacatgattgaagtcacaagtaatttgattaatgaaactctagcaaatcaccctgagtgggcaaattggcttcctgaggctcaggtagtccaaagagccctgaattctgcggctaacaacgtgtatcagtatggacgagaatggataactcacaagctccataaaattctaggagataaggtgaacaatactgctgtaattgaaaagcaagtactagaactttgggacagactgtatcactcttggtttgtaaagaatgtaacacactctggaaggcacaaaggacagaagttgcatgtcagtcgtcagaatagctggctgggagacattctggactggcaggatattgtttcctttgttcacgagaacattgagacatttctttcgatcttggagtctctgtggatcgttatgagccggaatgtgagcctgctgttcaccactgtcactacactcttgaccatcctcttctacagcgggacagcccttctcaattttgtactctctctgataattttcctgaccacactattttatctattaagttccagtgatgagtactacaagccagtgaagtgggtgataagcctgactccactatctcagccaggtccttcttctaatattattggccagtctgtggaagaagctatcagaggggtgtttgatgcttccctcaaaatggctggcttctatggattgtatacctggctgactcatactatgtttggcatcaatattgtcttcataccatcagcattagcagcaatccttggagcagtgccattcctggggacatactgggcagcagtacctgcagttcttgacctgtggctgacacaagggttaggatgcaaggccattttactgttgatttttcatctcttgccaacatactttgtagatactgcaatctactctgacatatcaggaggtggccatccttacctgacaggcttggcagtggccggtggagcatactacctaggcctggaaggagcaatcatcggtcctattcttctctgcatacttgtggttgcttccaatatctatagtgccatgctagtgagtcccacgaattcagttcccacgccaaaccagaccccatggcctgctcagcctcagcggactttccgtgacatttctgaagatctgaaatcttcagtaggttgatgtggtttcctctgcagtgatttttctaggaagttcaaatttgacagcgagttcagctcagctgtggccctctgcccttccagctgtgcctagcaagcaaaacccaggaaagaagcagaagcctcctggccttacatacagaatgcctggacaagagagaacttgctgcgggctgctttgtattttaaaacacagcttgagagttcagagttggtggtttgctcacttaactgttgttaagatggcttgaaaagtttcattttatacactggtaccctggcttgaaatttttccactttggttatctatgttactatattatatatttataaagttattttaagaactctaaactacctgctgttaaaagaatagatggtgtaattttttcctggtttaagaaatgtattgttaaacttttctaagacagtcacttttcaaggaagagggctttcacttttgagtgtgtagttgagtgagcaggaaaaatgaatcttctacccttctcccacaatgtattatacgctctttaagaaataataaatcataagtataagggtggggtggcttatttgatgttcagttttatattataaccctgggagatacaaagactgaagctcttcctcctcttccttttctcttcacgcttctttacactattgccaaattataaaacttggctgaccacgttgaagtgaaatacttattaagctgctatgaatggtaacagtatgataaaattcatgctgttattaggttttctccttccaggtggttgaagtgaaaaatctcaggtgtagcaatactctgatttgttaaatgtatccgtttcattatttggaactctgccaataagttagttttcagcagaattttgtatttatgtagtattttcccatctcttagcacagtgccttgcacatgactctaaatgaatgcttgttgaattgaattgcaactttaaaaatatctcagatatcacaataaccagcatagtgctttacattttacaaagtccttttgcacatactatttcacaagtacatcacatcagctttcatatagctttatattattttacatcagttttacactgatggagaagctaaggttcagaaaagtgaccaactcaaagtcgtaaagtgtagtaggatttggcctcagatctttgactccgttgtgtgcagattctgctgtattagtgttccttctaaatattgtatgcagttttcccagtgttacgagattggtgttgctatccatttgttgtgaatgaagacttgtcctatagtacatgacagggctgagagtggactgtagttcttagctgaaccctttctactgtttaaaacaatcatcaggcctatcctctgctcccaggggaatgtgggagagaaaagggttcttggccaggctgtaggtggtggctcacatctgtaatcccagcactttggaaggctgaggtgggtggattgcttgagcccagggatttgagatcagcctaggcaacatggcaaaaccccatctctacaaaaaaaaaaaaaaaaaaaaaaaaattagctgggcacggtggtgtggctatagtctgagctactcaggaggctgatgtatgaggatcacctgagtccaggaggtcgaggctgcagtgagccaagatggcgccactgcactccagcctgggtgagagagtgagacactgtcccaaggaaaaaaaaaagtgttggggggtagttcttaagcgttgaagatttcctttttggaaagtatttaaaggtagaaatattaataatttttcctaaaacatctccctaagaagtcactgataattataattagtttaaatttattcttacactacttaagaaaaatttcatttagaaaaggctaccatgagatcttttgactatatggagtagactgcatacagatctctttatttctattatgaatattttagcgattataatcagctattccactgagtattagatttggtcactaagtaactcatgtttttctttagtcaatcattcattcattcactaaaacatttgttgagagttggctaaactctagattctgtgccaggcactgtacagggtgatggagatcactcataagaaggcctcttgctcttagccagatcatatgtaatactaaatttaaattttttgcattaaaaggctaaaaaatcatttgtttttgttaattatatactggttgatttatagatgtaattagcacatattcataagagacaaatatatacaatgagttactatacatatacaaagtgattttagctgtataaagtgatattgcaaaaaactacagctaatgtttcttgctgggtaattattagcataaatatcaggttcttagaggtctttaagagaatactttagagctaccaaaattagcagcagtgatgtaatatcaccctgaaataccaggagcagaggtgccccagagtgcttcacagctatgatcaggaaacttgacctgccccattgctacagcaacggcataaggactaggaaggtccactagctggggaggtcttggaaccctccgagccagaaagaagcattccagcatgattcctcagatgcaatgaggaaggtttacagaattttcacagggcaacagagatcaagtggtatgaaaaggtaggagttttaagctcaagtctcaaagataacctacctttacattctcagtcagaatttgacccagaaagaggaagtttcttcaggaacagaccgtacgttgatgaagtagaagtcatttcagtaaaaacggagtacagaacttggtcataatatcttgcattttatagatttattaaagattagtttcaagttcacattcgctattcagttgtaaaccgaatggatgggaggggagaaaatacaagctctccacacaggtatgctcctctcttttctgagagagaaggcatgggattttcagcataaattccatgttatgtgagtgctgtttgagttctgaagttcctatcaatatctgttcctgcaagtgatctctgtaagaccaccttacatgctggtcttagttattgttaaaattgcaaggtttcttcacaccctctttgataagaagtgtttagctggcagagctttcccttgacttctgagtctagtgtgggttggcccatgacagtgggaagaaatccaacatgttacatggagaccttgtatgtaaacaaactctgtagcctttgaaagtggaactgctttttacagttaaagggctgctaaatggcttgcagatgagatcttctggctcaccttgatcttcacatgaacccattgtgacctatctggatttcctaggacctgtagtttccatttgggttatattagtgcctcaggaatgtgtcactactggtcaagcaatactcagaaattcaggctgtgaggggttagattagaggaaagtaatttaggtgagctatccagagctttcaacctcagggtttataggaaaaaaaaacaaaatacaaaaacccttaggacttctcatactctagccctgaccttgcagtctcctctgaggggcctcctaagacccttaaaataatattacaataggactttgagtgtgcatttcacagtggaaatagcctctggctagcattacttccaaatgctagttccagctaaaaacaagtactttttattagtttcttgtctttcaacattctgccatcaaaatatattcattttattaacttaccgattattgggaacctgcaaaaaaaaaaaaaaaaaaacacacatgctgtctgcagccactgtttggttatttttgatagtttaagagaattataaatcaagttgttctgtctactagagtcagaaattctgtgctagaatgggacttctaaaattaggtggtcctgtcactttctagagaaagacccaaattcataggtttaagtggcttgtctgacatacacatacagccagttagtaacagaattcagaatagaatagagttcttttttttctgtcagtccgttgttctacttctctttccttttcttcatggttgagcagcttttggcaaaatgtgttccatatagcagtagttccaagagatgttaatagatgtaagaaaaaaagtgtgtgtgtgttgggggtgggggattgcatggtcaattaaaatgaaggaatgctgagtttgtttccttactgtaggacttctaagagttttgaacatgctattacacattgtgaatttataaaaggggacaaacactgtttgaccttagactgcactccccttctttattcctcagagcatctcaaaggactacagggtcctttgagaaacatggcccttgatcaagtttacaactctttgagaagacatccctaatggaaatactgaatggcagatctattactgtggtaccatgtagtgtgtaataaatcttgaagtccagaaagcaagtatatttgctgtttagagctatacttaaggtatagagattcttttccacctgtggtgtgtaaaatcagtattgtgtttaattttgcaggtttttcaaggatcaactaatgtgcaaatacagtggtgatatattgatattacattttaataatgcttttgtatggcactttatagttttcagacaccttttgtaacagccctgtgagacagacaatattatccttattgtacagatgggggggctctggaggctctgaaaagtttttggtgatattcccctaagtttataccacaaaatgatggagccagaatttagttgcagaacttctgactccaagtccagagttctttactagacatctggtttcttactagctttttgctagctttttattttacagtgaaaagtatggaagcaaatcctgataattttggcttattatcaaatatcatttattttttattgcagagacccagcagatgtaactctcattgtagccatcccaaagaaaacccttctttgccctttgcagtgccacttatttaggtaactgaagtgtatttccagtacaatttgattttgaactaagatttgatatagagttgtaattgcttacataactctttgaaaatgtatcatccctgggttctcaggtgaaggaggcaattcaaaagtaaaaaagaatattcgaatacaataaataccctctgttctcacacaaaaaaaaaaaaaaaaaaaaaaaaaaaaaaaaaaaaaaaaaaaaaaaaaaaaaaaccttgtcgcccgcttggcccaagtcaattttaaactcgaccaagttaatccttgcggccgaatttggggctaattggcccaattccccttatagggagccgtttaacatttaattgcccgcggtttaaaaacgtcggaactggaaaacccttggggttcccaaattaaatcgctttgaagaaaatccccttttcgcaagttgccgaattacca

SEQ ID NO: 325367 - DNA, 7914 bp, Homo sapiens
cgcccctcgggggcggctgtggcggaggaacgatggccgacggcggcggccctaaggaggcgccaagcctgcggagctctcccgggccggcgccgcgggtcccgcgcgcggtcgggccgagtggcggtggcggggagaccccgcggaccgcggcgctggcgctgcgcttcgacaagcccattaagcaggccttctacaacaccggggccgtgctgttcgtgtgcctgtgctgcggcgccgcggtgctggtctacttcatcctggaggccttcctgcggccgctgctctgggccgtgctatgcggcacttttctgcaccccttcaagagctcgctgacgcgcctgggccgccactggctgcagcgcctgcaccgcgcgcacacgcccatcgtcctggccgcgctgctcctgccgctctgcttcgtcgactacggcgtcgaggccctgggcgagcaggcgctgcgccgccgccgcctgctcctgctgctcggcgccggcggcccgctcctgtacggcctctactgcctcggcagctacttgggcgtgcaggtgctgctggtgcacgctgccacgctcatctgccgcgggctggactacttcagcagcctgtggatctggacgttggtggttggctatgtgttgactgtttcattcaagtggaatgcaagcactgaacgctacttgagagcagtttcaattcctgtctggattatattgctttttcatttagcatccctggctggctcatggagaattccagtattcctggttattgttttcctgatgtctgtgggtaccctctatgaaaaacagaatggaaaagagtcttctggggcagagttaccagggcaggttatctccatggcagcttctactctggcaaacttggccatctctatcacagggtatgaatcaagcagtgaagaccagccctccactcagcctgcagaagcagtggacaggggagaatccgctccaacgttgtccacctccccttcaccctcctccccttcacccacttccccttcacctactctgggcagacgaaggcctgaaataggaacgtttcttagaaagaagaaaactagtgacatctactttgtgtctctagtttgggccattgtcgtcatgcagatctggttgaacctgtggattgtgcagttgctgccagtgccgattgcagtctggatactcaaaaagcttgtcattcactttggagttgtggatttcctagagaaacgctaccatgtgtggtggggcattatagaaagcttcctgaaggagcggcagggagctctcgcgccttggcccattgtcgggcttggaaaattcttgttaaaagttgatagcaagatgatcatctggttggagaagatgttagataaaataattagcattttcatcatatttttgttagtgataggaactcttcttttagccctactcctgactgcaaaggtacatcaagagagtgtacacatgattgaagtcacaagtaatttgattaatgaaactctagcaaatcaccctgagtgggcaaattggcttcctgaggctcaggtagtccaaagagccctgaattctgcggctaacaacgtgtatcagtatggacgagaatggataactcacaagctccataaaattctaggagataaggtgaacaatactgctgtaattgaaaagcaagtactagaactttgggacagactgtatcactcttggtttgtaaagaatgtaacacactctggaaggcacaaaggacagaagttgcatgtcagtcgtcagaatagctggctgggagacattctggactggcaggatattgtttcctttgttcacgagaacattgagacatttctttcgatcttggagtctctgtggatcgttatgagccggaatgtgagcctgctgttcaccactgtcactacactcttgaccatcctcttctacagcgggacagcccttctcaattttgtactctctctgataattttcctgaccacactattttatctattaagttccagtgatgagtactacaagccagtgaagtgggtgataagcctgactccactatctcagccaggtccttcttctaatattattggccagtctgtggaagaagctatcagaggggtgtttgatgcttccctcaaaatggctggcttctatggattgtatacctggctgactcatactatgtttggcatcaatattgtcttcataccatcagcattagcagcaatccttggagcagtgccattcctggggacatactgggcagcagtacctgcagttcttgacctgtggctgacacaagggttaggatgcaaggccattttactgttgatttttcatctcttgccaacatactttgtagatactgcaatctactctgacatatcaggaggtggccatccttacctgacaggcttggcagtggccggtggagcatactacctaggcctggaaggagcaatcatcggtcctattcttctctgcatacttgtggttgcttccaatatctatagtgccatgctagtgagtcccacgaattcagttcccacgccaaaccagaccccatggcctgctcagcctcagcggactttccgtgacatttctgaagatctgaaatcttcagtaggttgatgtggtttcctctgcagtgatttttctaggaagttcaaatttgacagcgagttcagctcagctgtggccctctgcccttccagctgtgcctagcaagcaaaacccaggaaagaagcagaagcctcctggccttacatacagaatgcctggacaagagagaacttgctgcgggctgctttgtattttaaaacacagcttgagagttcagagttggtggtttgctcacttaactgttgttaagatggcttgaaaagtttcattttatacactggtaccctggcttgaaatttttccactttggttatctatgttactatattatatatttataaagttattttaagaactctaaactacctgctgttaaaagaatagatggtgtaattttttcctggtttaagaaatgtattgttaaacttttctaagacagtcacttttcaaggaagagggctttcacttttgagtgtgtagttgagtgagcaggaaaaatgaatcttctacccttctcccacaatgtattatacgctctttaagaaataataaatcataagtataagggtggggtggcttatttgatgttcagttttatattataaccctgggagatacaaagactgaagctcttcctcctcttccttttctcttcacgcttctttacactattgccaaattataaaacttggctgaccacgttgaagtgaaatacttattaagctgctatgaatggtaacagtatgataaaattcatgctgttattaggttttctccttccaggtggttgaagtgaaaaatctcaggtgtagcaatactctgatttgttaaatgtatccgtttcattatttggaactctgccaataagttagttttcagcagaattttgtatttatgtagtattttcccatctcttagcacagtgccttgcacatgactctaaatgaatgcttgttgaattgaattgcaactttaaaaatatctcagatatcacaataaccagcatagtgctttacattttacaaagtccttttgcacatactatttcacaagtacatcacatcagctttcatatagctttatattattttacatcagttttacactgatggagaagctaaggttcagaaaagtgaccaactcaaagtcgtaaagtgtagtaggatttggcctcagatctttgactccgttgtgtgcagattctgctgtattagtgttccttctaaatattgtatgcagttttcccagtgttacgagattggtgttgctatccatttgttgtgaatgaagacttgtcctatagtacatgacagggctgagagtggactgtagttcttagctgaaccctttctactgtttaaaacaatcatcaggcctatcctctgctcccaggggaatgtgggagagaaaagggttcttggccaggctgtaggtggtggctcacatctgtaatcccagcactttggaaggctgaggtgggtggattgcttgagcccagggatttgagatcagcctaggcaacatggcaaaaccccatctctacaaaaaaaaaaaaaaaaaaaaaaaaattagctgggcacggtggtgtggctatagtctgagctactcaggaggctgatgtatgaggatcacctgagtccaggaggtcgaggctgcagtgagccaagatggcgccactgcactccagcctgggtgagagagtgagacactgtcccaaggaaaaaaaaaagtgttggggggtagttcttaagcgttgaagatttcctttttggaaagtatttaaaggtagaaatattaataatttttcctaaaacatctccctaagaagtcactgataattataattagtttaaatttattcttacactacttaagaaaaatttcatttagaaaaggctaccatgagatcttttgactatatggagtagactgcatacagatctctttatttctattatgaatattttagcgattataatcagctattccactgagtattagatttggtcactaagtaactcatgtttttctttagtcaatcattcattcattcactaaaacatttgttgagagttggctaaactctagattctgtgccaggcactgtacagggtgatggagatcactcataagaaggcctcttgctcttagccagatcatatgtaatactaaatttaaattttttgcattaaaaggctaaaaaatcatttgtttttgttaattatatactggttgatttatagatgtaattagcacatattcataagagacaaatatatacaatgagttactatacatatacaaagtgattttagctgtataaagtgatattgcaaaaaactacagctaatgtttcttgctgggtaattattagcataaatatcaggttcttagaggtctttaagagaatactttagagctaccaaaattagcagcagtgatgtaatatcaccctgaaataccaggagcagaggtgccccagagtgcttcacagctatgatcaggaaacttgacctgccccattgctacagcaacggcataaggactaggaaggtccactagctggggaggtcttggaaccctccgagccagaaagaagcattccagcatgattcctcagatgcaatgaggaaggtttacagaattttcacagggcaacagagatcaagtggtatgaaaaggtaggagttttaagctcaagtctcaaagataacctacctttacattctcagtcagaatttgacccagaaagaggaagtttcttcaggaacagaccgtacgttgatgaagtagaagtcatttcagtaaaaacggagtacagaacttggtcataatatcttgcattttatagatttattaaagattagtttcaagttcacattcgctattcagttgtaaaccgaatggatgggaggggagaaaatacaagctctccacacaggtatgctcctctcttttctgagagagaaggcatgggattttcagcataaattccatgttatgtgagtgctgtttgagttctgaagttcctatcaatatctgttcctgcaagtgatctctgtaagaccaccttacatgctggtcttagttattgttaaaattgcaaggtttcttcacaccctctttgataagaagtgtttagctggcagagctttcccttgacttctgagtctagtgtgggttggcccatgacagtgggaagaaatccaacatgttacatggagaccttgtatgtaaacaaactctgtagcctttgaaagtggaactgctttttacagttaaagggctgctaaatggcttgcagatgagatcttctggctcaccttgatcttcacatgaacccattgtgacctatctggatttcctaggacctgtagtttccatttgggttatattagtgcctcaggaatgtgtcactactggtcaagcaatactcagaaattcaggctgtgaggggttagattagaggaaagtaatttaggtgagctatccagagctttcaacctcagggtttataggaaaaaaaaacaaaatacaaaaacccttaggacttctcatactctagccctgaccttgcagtctcctctgaggggcctcctaagacccttaaaataatattacaataggactttgagtgtgcatttcacagtggaaatagcctctggctagcattacttccaaatgctagttccagctaaaaacaagtactttttattagtttcttgtctttcaacattctgccatcaaaatatattcattttattaacttaccgattattgggaacctgcaaaaaaaaaaaaaaaaaaacacacatgctgtctgcagccactgtttggttatttttgatagtttaagagaattataaatcaagttgttctgtctactagagtcagaaattctgtgctagaatgggacttctaaaattaggtggtcctgtcactttctagagaaagacccaaattcataggtttaagtggcttgtctgacatacacatacagccagttagtaacagaattcagaatagaatagagttcttttttttctgtcagtccgttgttctacttctctttccttttcttcatggttgagcagcttttggcaaaatgtgttccatatagcagtagttccaagagatgttaatagatgtaagaaaaaaagtgtgtgtgtgttgggggtgggggattgcatggtcaattaaaatgaaggaatgctgagtttgtttccttactgtaggacttctaagagttttgaacatgctattacacattgtgaatttataaaaggggacaaacactgtttgaccttagactgcactccccttctttattcctcagagcatctcaaaggactacagggtcctttgagaaacatggcccttgatcaagtttacaactctttgagaagacatccctaatggaaatactgaatggcagatctattactgtggtaccatgtagtgtgtaataaatcttgaagtccagaaagcaagtatatttgctgtttagagctatacttaaggtatagagattcttttccacctgtggtgtgtaaaatcagtattgtgtttaattttgcaggtttttcaaggatcaactaatgtgcaaatacagtggtgatatattgatattacattttaataatgcttttgtatggcactttatagttttcagacaccttttgtaacagccctgtgagacagacaatattatccttattgtacagatgggggggctctggaggctctgaaaagtttttggtgatattcccctaagtttataccacaaaatgatggagccagaatttagttgcagaacttctgactccaagtccagagttctttactagacatctggtttcttactagctttttgctagctttttattttacagtgaaaagtatggaagcaaatcctgataattttggcttattatcaaatatcatttattttttattgcagaaaacccttctttgccctttgcagtgccacttatttaggtaactgaagtgtatttccagtacaatttgattttgaactaagatttgatatagagttgtaattgcttacataactctttgaaaatgtatcatccctgggttctcaggtgaaggaggcaattcaaaagtaaaaaagaatattcgaatacaataaataccctctgttctcacacaaatgctgtttcttagctaacttgctttgacaacctactgatgtaacttctttattaatgtgaaatatttatattttgaaataaaattactagtgttgaatgaa

SEQ ID NO: 325368 - DNA, 7901 bp, Homo sapiens
cgcccctcgggggcggctgtggcggaggaacgatggccgacggcggcggccctaaggaggcgccaagcctgcggagctctcccgggccggcgccgcgggtcccgcgcgcggtcgggccgagtggcggtggcggggagaccccgcggaccgcggcgctggcgctgcgcttcgacaagcccattaagcaggccttctacaacaccggggccgtgctgttcgtgtgcctgtgctgcggcgccgcggtgctggtctacttcatcctggaggccttcctgcggccgctgctctgggccgtgctatgcggcacttttctgcaccccttcaagagctcgctgacgcgcctgggccgccactggctgcagcgcctgcaccgcgcgcacacgcccatcgtcctggccgcgctgctcctgccgctctgcttcgtcgactacggcgtcgaggccctgggcgagcaggcgctgcgccgccgccgcctgctcctgctgctcggcgccggcggcccgctcctgtacggcctctactgcctcggcagctacttgggcgtgcaggtgctgctggtgcacgctgccacgctcatctgccgcgggctggactacttcagcagcctgtggatctggacgttggtggttggctatgtgttgactgtttcattcaagtggaatgcaagcactgaacgctacttgagagcagtttcaattcctgtctggattatattgctttttcatttagcatccctggctggctcatggagaattccagtattcctggttattgttttcctgatgtctgtgggtaccctctatgaaaaacagaatggaaaagagtcttctggggcagagttaccagggcaggttatctccatggcagcttctactctggcaaacttggccatctctatcacagggtatgaatcaagcagtgaagaccagccctccactcagcctgcagaagcagtggacaggggagaatccgctccaacgttgtccacctccccttcaccctcctccccttcacccacttccccttcacctactctgggcagacgaaggcctgaaataggaacgtttcttagaaagaagaaaactagtgacatctactttgtgtctctagtttgggccattgtcgtcatgcagatctggttgaacctgtggattgtgcagttgctgccagtgccgattgcagtctggatactcaaaaagcttgtcattcactttggagttgtggatttcctagagaaacgctaccatgtgtggtggggcattatagaaagcttcctgaaggagcggcagggagctctcgcgccttggcccattgtcgggcttggaaaattcttgttaaaagttgatagcaagatgatcatctggttggagaagatgttagataaaataattagcattttcatcatatttttgttagtgataggaactcttcttttagccctactcctgactgcaaaggtacatcaagagagtgtacacatgattgaagtcacaagtaatttgattaatgaaactctagcaaatcaccctgagtgggcaaattggcttcctgaggctcaggtagtccaaagagccctgaattctgcggctaacaacgtgtatcagtatggacgagaatggataactcacaagctccataaaattctaggagataaggtgaacaatactgctgtaattgaaaagcaagtactagaactttgggacagactgtatcactcttggtttgtaaagaatgtaacacactctggaaggcacaaaggacagaagttgcatgtcagtcgtcagaatagctggctgggagacattctggactggcaggatattgtttcctttgttcacgagaacattgagacatttctttcgatcttggagtctctgtggatcgttatgagccggaatgtgagcctgctgttcaccactgtcactacactcttgaccatcctcttctacagcgggacagcccttctcaattttgtactctctctgataattttcctgaccacactattttatctattaagttccagtgatgagtactacaagccagtgaagtgggtgataagcctgactccactatctcagccaggtccttcttctaatattattggccagtctgtggaagaagctatcagaggggtgtttgatgcttccctcaaaatggctggcttctatggattgtatacctggctgactcatactatgtttggcatcaatattgtcttcataccatcagcattagcagcaatccttggagcagtgccattcctggggacatactgggcagcagtacctgcagttcttgacctgtggctgacacaagggttaggatgcaaggccattttactgttgatttttcatctcttgccaacatactttgtagatactgcaatctactctgacatatcaggaggtggccatccttacctgacaggcttggcagtggccggtggagcatactacctaggcctggaaggagcaatcatcggtcctattcttctctgcatacttgtggttgcttccaatatctatagtgccatgctagtgagtcccacgaattcagttcccacgccaaaccagaccccatggcctgctcagcctcagcggactttccgtgacatttctgaagatctgaaatcttcagtaggttgatgtggtttcctctgcagtgatttttctaggaagttcaaatttgacagcgagttcagctcagctgtggccctctgcccttccagctgtgcctagcaagcaaaacccaggaaagaagcagaagcctcctggccttacatacagaatgcctggacaagagagaacttgctgcgggctgctttgtattttaaaacacagcttgagagttcagagttggtggtttgctcacttaactgttgttaagatggcttgaaaagtttcattttatacactggtaccctggcttgaaatttttccactttggttatctatgttactatattatatatttataaagttattttaagaactctaaactacctgctgttaaaagaatagatggtgtaattttttcctggtttaagaaatgtattgttaaacttttctaagacagtcacttttcaaggaagagggctttcacttttgagtgtgtagttgagtgagcaggaaaaatgaatcttctacccttctcccacaatgtattatacgctctttaagaaataataaatcataagtataagggtggggtggcttatttgatgttcagttttatattataaccctgggagatacaaagactgaagctcttcctcctcttccttttctcttcacgcttctttacactattgccaaattataaaacttggctgaccacgttgaagtgaaatacttattaagctgctatgaatggtaacagtatgataaaattcatgctgttattaggttttctccttccaggtggttgaagtgaaaaatctcaggtgtagcaatactctgatttgttaaatgtatccgtttcattatttggaactctgccaataagttagttttcagcagaattttgtatttatgtagtattttcccatctcttagcacagtgccttgcacatgactctaaatgaatgcttgttgaattgaattgcaactttaaaaatatctcagatatcacaataaccagcatagtgctttacattttacaaagtccttttgcacatactatttcacaagtacatcacatcagctttcatatagctttatattattttacatcagttttacactgatggagaagctaaggttcagaaaagtgaccaactcaaagtcgtaaagtgtagtaggatttggcctcagatctttgactccgttgtgtgcagattctgctgtattagtgttccttctaaatattgtatgcagttttcccagtgttacgagattggtgttgctatccatttgttgtgaatgaagacttgtcctatagtacatgacagggctgagagtggactgtagttcttagctgaaccctttctactgtttaaaacaatcatcaggcctatcctctgctcccaggggaatgtgggagagaaaagggttcttggccaggctgtaggtggtggctcacatctgtaatcccagcactttggaaggctgaggtgggtggattgcttgagcccagggatttgagatcagcctaggcaacatggcaaaaccccatctctacaaaaaaaaaaaaaaaaaaaaaaaaattagctgggcacggtggtgtggctatagtctgagctactcaggaggctgatgtatgaggatcacctgagtccaggaggtcgaggctgcagtgagccaagatggcgccactgcactccagcctgggtgagagagtgagacactgtcccaaggaaaaaaaaaagtgttggggggtagttcttaagcgttgaagatttcctttttggaaagtatttaaaggtagaaatattaataatttttcctaaaacatctccctaagaagtcactgataattataattagtttaaatttattcttacactacttaagaaaaatttcatttagaaaaggctaccatgagatcttttgactatatggagtagactgcatacagatctctttatttctattatgaatattttagcgattataatcagctattccactgagtattagatttggtcactaagtaactcatgtttttctttagtcaatcattcattcattcactaaaacatttgttgagagttggctaaactctagattctgtgccaggcactgtacagggtgatggagatcactcataagaaggcctcttgctcttagccagatcatatgtaatactaaatttaaattttttgcattaaaaggctaaaaaatcatttgtttttgttaattatatactggttgatttatagatgtaattagcacatattcataagagacaaatatatacaatgagttactatacatatacaaagtgattttagctgtataaagtgatattgcaaaaaactacagctaatgtttcttgctgggtaattattagcataaatatcaggttcttagaggtctttaagagaatactttagagctaccaaaattagcagcagtgatgtaatatcaccctgaaataccaggagcagaggtgccccagagtgcttcacagctatgatcaggaaacttgacctgccccattgctacagcaacggcataaggactaggaaggtccactagctggggaggtcttggaaccctccgagccagaaagaagcattccagcatgattcctcagatgcaatgaggaaggtttacagaattttcacagggcaacagagatcaagtggtatgaaaaggtaggagttttaagctcaagtctcaaagataacctacctttacattctcagtcagaatttgacccagaaagaggaagtttcttcaggaacagaccgtacgttgatgaagtagaagtcatttcagtaaaaacggagtacagaacttggtcataatatcttgcattttatagatttattaaagattagtttcaagttcacattcgctattcagttgtaaaccgaatggatgggaggggagaaaatacaagctctccacacaggtatgctcctctcttttctgagagagaaggcatgggattttcagcataaattccatgttatgtgagtgctgtttgagttctgaagttcctatcaatatctgttcctgcaagtgatctctgtaagaccaccttacatgctggtcttagttattgttaaaattgcaaggtttcttcacaccctctttgataagaagtgtttagctggcagagctttcccttgacttctgagtctagtgtgggttggcccatgacagtgggaagaaatccaacatgttacatggagaccttgtatgtaaacaaactctgtagcctttgaaagtggaactgctttttacagttaaagggctgctaaatggcttgcagatgagatcttctggctcaccttgatcttcacatgaacccattgtgacctatctggatttcctaggacctgtagtttccatttgggttatattagtgcctcaggaatgtgtcactactggtcaagcaatactcagaaattcaggctgtgaggggttagattagaggaaagtaatttaggtgagctatccagagctttcaacctcagggtttataggaaaaaaaaacaaaatacaaaaacccttaggacttctcatactctagccctgaccttgcagtctcctctgaggggcctcctaagacccttaaaataatattacaataggaatgctagttccagctaaaaacaagtactttttattagtttcttgtctttcaacattctgccatcaaaatatattcattttattaacttaccgattattgggaacctgcaaaaaaaaaaaaaaaaaaacacacatgctgtctgcagccactgtttggttatttttgatagtttaagagaattataaatcaagttgttctgtctactagagtcagaaattctgtgctagaatgggacttctaaaattaggtggtcctgtcactttctagagaaagacccaaattcataggtttaagtggcttgtctgacatacacatacagccagttagtaacagaattcagaatagaatagagttcttttttttctgtcagtccgttgttctacttctctttccttttcttcatggttgagcagcttttggcaaaatgtgttccatatagcagtagttccaagagatgttaatagatgtaagaaaaaaagtgtgtgtgtgttgggggtgggggattgcatggtcaattaaaatgaaggaatgctgagtttgtttccttactgtaggacttctaagagttttgaacatgctattacacattgtgaatttataaaaggggacaaacactgtttgaccttagactgcactccccttctttattcctcagagcatctcaaaggactacagggtcctttgagaaacatggcccttgatcaagtttacaactctttgagaagacatccctaatggaaatactgaatggcagatctattactgtggtaccatgtagtgtgtaataaatcttgaagtccagaaagcaagtatatttgctgtttagagctatacttaaggtatagagattcttttccacctgtggtgtgtaaaatcagtattgtgtttaattttgcaggtttttcaaggatcaactaatgtgcaaatacagtggtgatatattgatattacattttaataatgcttttgtatggcactttatagttttcagacaccttttgtaacagccctgtgagacagacaatattatccttattgtacagatgggggggctctggaggctctgaaaagtttttggtgatattcccctaagtttataccacaaaatgatggagccagaatttagttgcagaacttctgactccaagtccagagttctttactagacatctggtttcttactagctttttgctagctttttattttacagtgaaaagtatggaagcaaatcctgataattttggcttattatcaaatatcatttattttttattgcagagacccagcagatgtaactctcattgtagccatcccaaagaaaacccttctttgccctttgcagtgccacttatttaggtaactgaagtgtatttccagtacaatttgattttgaactaagatttgatatagagttgtaattgcttacataactctttgaaaatgtatcatccctgggttctcaggtgaaggaggcaattcaaaagtaaaaaagaatattcgaatacaataaataccctctgttctcacacaaatgctgtttcttagctaacttgctttgacaacctactgatgtaacttctttattaatgtgaaatatttatattttgaaataaaattactagtgttgaatgaa

SEQ ID NO: 325369 - DNA, 5573 bp, Homo sapiens
gttaaaggtcgtgctctttattccagaggtggccatccttacctgacaggcttggcagtggccggtggagcatactacctaggcctggaaggagcaatcatcggtcctattcttctctgcatacttgtggttgcttccaatatctatagtgccatgctagtgagtcccacgaattcagttcccacgccaaaccagaccccatggcctgctcagcctcagcggactttccgtgacatttctgaagatctgaaatcttcagtaggttgatgtggtttcctctgcagtgatttttctaggaagttcaaatttgacagcgagttcagctcagctgtggccctctgcccttccagctgtgcctagcaagcaaaacccaggaaagaagcagaagcctcctggccttacatacagaatgcctggacaagagagaacttgctgcgggctgctttgtattttaaaacacagcttgagagttcagagttggtggtttgctcacttaactgttgttaagatggcttgaaaagtttcattttatacactggtaccctggcttgaaatttttccactttggttatctatgttactatattatatatttataaagttattttaagaactctaaactacctgctgttaaaagaatagatggtgtaattttttcctggtttaagaaatgtattgttaaacttttctaagacagtcacttttcaaggaagagggctttcacttttgagtgtgtagttgagtgagcaggaaaaatgaatcttctacccttctcccacaatgtattatacgctctttaagaaataataaatcataagtataagggtggggtggcttatttgatgttcagttttatattataaccctgggagatacaaagactgaagctcttcctcctcttccttttctcttcacgcttctttacactattgccaaattataaaacttggctgaccacgttgaagtgaaatacttattaagctgctatgaatggtaacagtatgataaaattcatgctgttattaggttttctccttccaggtggttgaagtgaaaaatctcaggtgtagcaatactctgatttgttaaatgtatccgtttcattatttggaactctgccaataagttagttttcagcagaattttgtatttatgtagtattttcccatctcttagcacagtgccttgcacatgactctaaatgaatgcttgttgaattgaattgcaactttaaaaatatctcagatatcacaataaccagcatagtgctttacattttacaaagtccttttgcacatactatttcacaagtacatcacatcagctttcatatagctttatattattttacatcagttttacactgatggagaagctaaggttcagaaaagtgaccaactcaaagtcgtaaagtgtagtaggatttggcctcagatctttgactccgttgtgtgcagattctgctgtattagtgttccttctaaatattgtatgcagttttcccagtgttacgagattggtgttgctatccatttgttgtgaatgaagacttgtcctatagtacatgacagggctgagagtggactgtagttcttagctgaaccctttctactgtttaaaacaatcatcaggcctatcctctgctcccaggggaatgtgggagagaaaagggttcttggccaggctgtaggtggtggctcacatctgtaatcccagcactttggaaggctgaggtgggtggattgcttgagcccagggatttgagatcagcctaggcaacatggcaaaaccccatctctacaaaaaaaaaaaaaaaaaaaaaaaaattagctgggcacggtggtgtggctatagtctgagctactcaggaggctgatgtatgaggatcacctgagtccaggaggtcgaggctgcagtgagccaagatggcgccactgcactccagcctgggtgagagagtgagacactgtcccaaggaaaaaaaaaagtgttggggggtagttcttaagcgttgaagatttcctttttggaaagtatttaaaggtagaaatattaataatttttcctaaaacatctccctaagaagtcactgataattataattagtttaaatttattcttacactacttaagaaaaatttcatttagaaaaggctaccatgagatcttttgactatatggagtagactgcatacagatctctttatttctattatgaatattttagcgattataatcagctattccactgagtattagatttggtcactaagtaactcatgtttttctttagtcaatcattcattcattcactaaaacatttgttgagagttggctaaactctagattctgtgccaggcactgtacagggtgatggagatcactcataagaaggcctcttgctcttagccagatcatatgtaatactaaatttaaattttttgcattaaaaggctaaaaaatcatttgtttttgttaattatatactggttgatttatagatgtaattagcacatattcataagagacaaatatatacaatgagttactatacatatacaaagtgattttagctgtataaagtgatattgcaaaaaactacagctaatgtttcttgctgggtaattattagcataaatatcaggttcttagaggtctttaagagaatactttagagctaccaaaattagcagcagtgatgtaatatcaccctgaaataccaggagcagaggtgccccagagtgcttcacagctatgatcaggaaacttgacctgccccattgctacagcaacggcataaggactaggaaggtccactagctggggaggtcttggaaccctccgagccagaaagaagcattccagcatgattcctcagatgcaatgaggaaggtttacagaattttcacagggcaacagagatcaagtggtatgaaaaggtaggagttttaagctcaagtctcaaagataacctacctttacattctcagtcagaatttgacccagaaagaggaagtttcttcaggaacagaccgtacgttgatgaagtagaagtcatttcagtaaaaacggagtacagaacttggtcataatatcttgcattttatagatttattaaagattagtttcaagttcacattcgctattcagttgtaaaccgaatggatgggaggggagaaaatacaagctctccacacaggtatgctcctctcttttctgagagagaaggcatgggattttcagcataaattccatgttatgtgagtgctgtttgagttctgaagttcctatcaatatctgttcctgcaagtgatctctgtaagaccaccttacatgctggtcttagttattgttaaaattgcaaggtttcttcacaccctctttgataagaagtgtttagctggcagagctttcccttgacttctgagtctagtgtgggttggcccatgacagtgggaagaaatccaacatgttacatggagaccttgtatgtaaacaaactctgtagcctttgaaagtggaactgctttttacagttaaagggctgctaaatggcttgcagatgagatcttctggctcaccttgatcttcacatgaacccattgtgacctatctggatttcctaggacctgtagtttccatttgggttatattagtgcctcaggaatgtgtcactactggtcaagcaatactcagaaattcaggctgtgaggggttagattagaggaaagtaatttaggtgagctatccagagctttcaacctcagggtttataggaaaaaaaaacaaaatacaaaaacccttaggacttctcatactctagccctgaccttgcagtctcctctgaggggcctcctaagacccttaaaataatattacaataggactttgagtgtgcatttcacagtggaaatagcctctggctagcattacttccaaatgctagttccagctaaaaacaagtactttttattagtttcttgtctttcaacattctgccatcaaaatatattcattttattaacttaccgattattgggaacctgcaaaaaaaaaaaaaaaaaaacacacatgctgtctgcagccactgtttggttatttttgatagtttaagagaattataaatcaagttgttctgtctactagagtcagaaattctgtgctagaatgggacttctaaaattaggtggtcctgtcactttctagagaaagacccaaattcataggtttaagtggcttgtctgacatacacatacagccagttagtaacagaattcagaatagaatagagttcttttttttctgtcagtccgttgttctacttctctttccttttcttcatggttgagcagcttttggcaaaatgtgttccatatagcagtagttccaagagatgttaatagatgtaagaaaaaaagtgtgtgtgtgttgggggtgggggattgcatggtcaattaaaatgaaggaatgctgagtttgtttccttactgtaggacttctaagagttttgaacatgctattacacattgtgaatttataaaaggggacaaacactgtttgaccttagactgcactccccttctttattcctcagagcatctcaaaggactacagggtcctttgagaaacatggcccttgatcaagtttacaactctttgagaagacatccctaatggaaatactgaatggcagatctattactgtggtaccatgtagtgtgtaataaatcttgaagtccagaaagcaagtatatttgctgtttagagctatacttaaggtatagagattcttttccacctgtggtgtgtaaaatcagtattgtgtttaattttgcaggtttttcaaggatcaactaatgtgcaaatacagtggtgatatattgatattacattttaataatgcttttgtatggcactttatagttttcagacaccttttgtaacagccctgtgagacagacaatattatccttattgtacagatgggggggctctggaggctctgaaaagtttttggtgatattcccctaagtttataccacaaaatgatggagccagaatttagttgcagaacttctgactccaagtccagagttctttactagacatctggtttcttactagctttttgctagctttttattttacagtgaaaagtatggaagcaaatcctgataattttggcttattatcaaatatcatttattttttattgcagagacccagcagatgtaactctcattgtagccatcccaaagaaaacccttctttgccctttgcagtgccacttatttaggtaactgaagtgtatttccagtacaatttgattttgaactaagatttgatatagagttgtaattgcttacataactctttgaaaatgtatcatccctgggttctcaggtgaaggaggcaattcaaaagtaaaaaagaatattcgaatacaataaataccctctgttctcacacaaatgctgtttcttagctaacttgctttgacaacctactgatgtaacttctttattaatgtgaaatatttatattttgaaataaaattactagtgttgaatgaa

SEQ ID NO: 325370 - DNA, 5667 bp, Homo sapiens
ttgctcttctcttttaaggaactgcccagaagttgcacaacacttctacttaaatctcattaaccaaagcgtagtcacgtggtcatgtgtagtttcaggggagtctggggaaacagtcctttggatagatccagcaaaaagatggagttcttgttaatgagaatgagcaacaactagcagactttgaaacaatactcaatgaaaatcttaagaaaaaatagtgactatataatctcattagggctccaaaagattgtaaaaataggatactgttttatggtaatcaactaatcattccgtctttttttcttttaggactttccgtgacatttctgaagatctgaaatcttcagtaggttgatgtggtttcctctgcagtgatttttctaggaagttcaaatttgacagcgagttcagctcagctgtggccctctgcccttccagctgtgcctagcaagcaaaacccaggaaagaagcagaagcctcctggccttacatacagaatgcctggacaagagagaacttgctgcgggctgctttgtattttaaaacacagcttgagagttcagagttggtggtttgctcacttaactgttgttaagatggcttgaaaagtttcattttatacactggtaccctggcttgaaatttttccactttggttatctatgttactatattatatatttataaagttattttaagaactctaaactacctgctgttaaaagaatagatggtgtaattttttcctggtttaagaaatgtattgttaaacttttctaagacagtcacttttcaaggaagagggctttcacttttgagtgtgtagttgagtgagcaggaaaaatgaatcttctacccttctcccacaatgtattatacgctctttaagaaataataaatcataagtataagggtggggtggcttatttgatgttcagttttatattataaccctgggagatacaaagactgaagctcttcctcctcttccttttctcttcacgcttctttacactattgccaaattataaaacttggctgaccacgttgaagtgaaatacttattaagctgctatgaatggtaacagtatgataaaattcatgctgttattaggttttctccttccaggtggttgaagtgaaaaatctcaggtgtagcaatactctgatttgttaaatgtatccgtttcattatttggaactctgccaataagttagttttcagcagaattttgtatttatgtagtattttcccatctcttagcacagtgccttgcacatgactctaaatgaatgcttgttgaattgaattgcaactttaaaaatatctcagatatcacaataaccagcatagtgctttacattttacaaagtccttttgcacatactatttcacaagtacatcacatcagctttcatatagctttatattattttacatcagttttacactgatggagaagctaaggttcagaaaagtgaccaactcaaagtcgtaaagtgtagtaggatttggcctcagatctttgactccgttgtgtgcagattctgctgtattagtgttccttctaaatattgtatgcagttttcccagtgttacgagattggtgttgctatccatttgttgtgaatgaagacttgtcctatagtacatgacagggctgagagtggactgtagttcttagctgaaccctttctactgtttaaaacaatcatcaggcctatcctctgctcccaggggaatgtgggagagaaaagggttcttggccaggctgtaggtggtggctcacatctgtaatcccagcactttggaaggctgaggtgggtggattgcttgagcccagggatttgagatcagcctaggcaacatggcaaaaccccatctctacaaaaaaaaaaaaaaaaaaaaaaaaattagctgggcacggtggtgtggctatagtctgagctactcaggaggctgatgtatgaggatcacctgagtccaggaggtcgaggctgcagtgagccaagatggcgccactgcactccagcctgggtgagagagtgagacactgtcccaaggaaaaaaaaaagtgttggggggtagttcttaagcgttgaagatttcctttttggaaagtatttaaaggtagaaatattaataatttttcctaaaacatctccctaagaagtcactgataattataattagtttaaatttattcttacactacttaagaaaaatttcatttagaaaaggctaccatgagatcttttgactatatggagtagactgcatacagatctctttatttctattatgaatattttagcgattataatcagctattccactgagtattagatttggtcactaagtaactcatgtttttctttagtcaatcattcattcattcactaaaacatttgttgagagttggctaaactctagattctgtgccaggcactgtacagggtgatggagatcactcataagaaggcctcttgctcttagccagatcatatgtaatactaaatttaaattttttgcattaaaaggctaaaaaatcatttgtttttgttaattatatactggttgatttatagatgtaattagcacatattcataagagacaaatatatacaatgagttactatacatatacaaagtgattttagctgtataaagtgatattgcaaaaaactacagctaatgtttcttgctgggtaattattagcataaatatcaggttcttagaggtctttaagagaatactttagagctaccaaaattagcagcagtgatgtaatatcaccctgaaataccaggagcagaggtgccccagagtgcttcacagctatgatcaggaaacttgacctgccccattgctacagcaacggcataaggactaggaaggtccactagctggggaggtcttggaaccctccgagccagaaagaagcattccagcatgattcctcagatgcaatgaggaaggtttacagaattttcacagggcaacagagatcaagtggtatgaaaaggtaggagttttaagctcaagtctcaaagataacctacctttacattctcagtcagaatttgacccagaaagaggaagtttcttcaggaacagaccgtacgttgatgaagtagaagtcatttcagtaaaaacggagtacagaacttggtcataatatcttgcattttatagatttattaaagattagtttcaagttcacattcgctattcagttgtaaaccgaatggatgggaggggagaaaatacaagctctccacacaggtatgctcctctcttttctgagagagaaggcatgggattttcagcataaattccatgttatgtgagtgctgtttgagttctgaagttcctatcaatatctgttcctgcaagtgatctctgtaagaccaccttacatgctggtcttagttattgttaaaattgcaaggtttcttcacaccctctttgataagaagtgtttagctggcagagctttcccttgacttctgagtctagtgtgggttggcccatgacagtgggaagaaatccaacatgttacatggagaccttgtatgtaaacaaactctgtagcctttgaaagtggaactgctttttacagttaaagggctgctaaatggcttgcagatgagatcttctggctcaccttgatcttcacatgaacccattgtgacctatctggatttcctaggacctgtagtttccatttgggttatattagtgcctcaggaatgtgtcactactggtcaagcaatactcagaaattcaggctgtgaggggttagattagaggaaagtaatttaggtgagctatccagagctttcaacctcagggtttataggaaaaaaaaacaaaatacaaaaacccttaggacttctcatactctagccctgaccttgcagtctcctctgaggggcctcctaagacccttaaaataatattacaataggactttgagtgtgcatttcacagtggaaatagcctctggctagcattacttccaaatgctagttccagctaaaaacaagtactttttattagtttcttgtctttcaacattctgccatcaaaatatattcattttattaacttaccgattattgggaacctgcaaaaaaaaaaaaaaaaaaacacacatgctgtctgcagccactgtttggttatttttgatagtttaagagaattataaatcaagttgttctgtctactagagtcagaaattctgtgctagaatgggacttctaaaattaggtggtcctgtcactttctagagaaagacccaaattcataggtttaagtggcttgtctgacatacacatacagccagttagtaacagaattcagaatagaatagagttcttttttttctgtcagtccgttgttctacttctctttccttttcttcatggttgagcagcttttggcaaaatgtgttccatatagcagtagttccaagagatgttaatagatgtaagaaaaaaagtgtgtgtgtgttgggggtgggggattgcatggtcaattaaaatgaaggaatgctgagtttgtttccttactgtaggacttctaagagttttgaacatgctattacacattgtgaatttataaaaggggacaaacactgtttgaccttagactgcactccccttctttattcctcagagcatctcaaaggactacagggtcctttgagaaacatggcccttgatcaagtttacaactctttgagaagacatccctaatggaaatactgaatggcagatctattactgtggtaccatgtagtgtgtaataaatcttgaagtccagaaagcaagtatatttgctgtttagagctatacttaaggtatagagattcttttccacctgtggtgtgtaaaatcagtattgtgtttaattttgcaggtttttcaaggatcaactaatgtgcaaatacagtggtgatatattgatattacattttaataatgcttttgtatggcactttatagttttcagacaccttttgtaacagccctgtgagacagacaatattatccttattgtacagatgggggggctctggaggctctgaaaagtttttggtgatattcccctaagtttataccacaaaatgatggagccagaatttagttgcagaacttctgactccaagtccagagttctttactagacatctggtttcttactagctttttgctagctttttattttacagtgaaaagtatggaagcaaatcctgataattttggcttattatcaaatatcatttattttttattgcagagacccagcagatgtaactctcattgtagccatcccaaagaaaacccttctttgccctttgcagtgccacttatttaggtaactgaagtgtatttccagtacaatttgattttgaactaagatttgatatagagttgtaattgcttacataactctttgaaaatgtatcatccctgggttctcaggtgaaggaggcaattcaaaagtaaaaaagaatattcgaatacaataaataccctctgttctcacacaaatgctgtttcttagctaacttgctttgacaacctactgatgtaacttctttattaatgtgaaatatttatattttgaaataaaattactagtgttgaatgaa

SEQ ID NO: 325371 - DNA, 5418 bp, Homo sapiens
aaagtatggaagcttatcctgataattttggcttattatcaaatatcatttattttttattgcagagacccagcagatgtaactctcattgtagccatcccaaagaaaacccttctttgccctttgcagtgccacttatttaggtaactgaagtgtatttccagtacaatttgattttgaactaagatttgatatagagttgtaattgcttacataactctttgaaaatgtatcctcctggccttacatacagaatgcctggacaagagagaacttgctgcgggctgctttgtattttaaaacacagcttgagagttcagagttggtggtttgctcacttaactgttgttaagatggcttgaaaagtttcattttatacactggtaccctggcttgaaatttttccactttggttatctatgttactatattatatatttataaagttattttaagaactctaaactacctgctgttaaaagaatagatggtgtaattttttcctggtttaagaaatgtattgttaaacttttctaagacagtcacttttcaaggaagagggctttcacttttgagtgtgtagttgagtgagcaggaaaaatgaatcttctacccttctcccacaatgtattatacgctctttaagaaataataaatcataagtataagggtggggtggcttatttgatgttcagttttatattataaccctgggagatacaaagactgaagctcttcctcctcttccttttctcttcacgcttctttacactattgccaaattataaaacttggctgaccacgttgaagtgaaatacttattaagctgctatgaatggtaacagtatgataaaattcatgctgttattaggttttctccttccaggtggttgaagtgaaaaatctcaggtgtagcaatactctgatttgttaaatgtatccgtttcattatttggaactctgccaataagttagttttcagcagaattttgtatttatgtagtattttcccatctcttagcacagtgccttgcacatgactctaaatgaatgcttgttgaattgaattgcaactttaaaaatatctcagatatcacaataaccagcatagtgctttacattttacaaagtccttttgcacatactatttcacaagtacatcacatcagctttcatatagctttatattattttacatcagttttacactgatggagaagctaaggttcagaaaagtgaccaactcaaagtcgtaaagtgtagtaggatttggcctcagatctttgactccgttgtgtgcagattctgctgtattagtgttccttctaaatattgtatgcagttttcccagtgttacgagattggtgttgctatccatttgttgtgaatgaagacttgtcctatagtacatgacagggctgagagtggactgtagttcttagctgaaccctttctactgtttaaaacaatcatcaggcctatcctctgctcccaggggaatgtgggagagaaaagggttcttggccaggctgtaggtggtggctcacatctgtaatcccagcactttggaaggctgaggtgggtggattgcttgagcccagggatttgagatcagcctaggcaacatggcaaaaccccatctctacaaaaaaaaaaaaaaaaaaaaaaaaattagctgggcacggtggtgtggctatagtctgagctactcaggaggctgatgtatgaggatcacctgagtccaggaggtcgaggctgcagtgagccaagatggcgccactgcactccagcctgggtgagagagtgagacactgtcccaaggaaaaaaaaaagtgttggggggtagttcttaagcgttgaagatttcctttttggaaagtatttaaaggtagaaatattaataatttttcctaaaacatctccctaagaagtcactgataattataattagtttaaatttattcttacactacttaagaaaaatttcatttagaaaaggctaccatgagatcttttgactatatggagtagactgcatacagatctctttatttctattatgaatattttagcgattataatcagctattccactgagtattagatttggtcactaagtaactcatgtttttctttagtcaatcattcattcattcactaaaacatttgttgagagttggctaaactctagattctgtgccaggcactgtacagggtgatggagatcactcataagaaggcctcttgctcttagccagatcatatgtaatactaaatttaaattttttgcattaaaaggctaaaaaatcatttgtttttgttaattatatactggttgatttatagatgtaattagcacatattcataagagacaaatatatacaatgagttactatacatatacaaagtgattttagctgtataaagtgatattgcaaaaaactacagctaatgtttcttgctgggtaattattagcataaatatcaggttcttagaggtctttaagagaatactttagagctaccaaaattagcagcagtgatgtaatatcaccctgaaataccaggagcagaggtgccccagagtgcttcacagctatgatcaggaaacttgacctgccccattgctacagcaacggcataaggactaggaaggtccactagctggggaggtcttggaaccctccgagccagaaagaagcattccagcatgattcctcagatgcaatgaggaaggtttacagaattttcacagggcaacagagatcaagtggtatgaaaaggtaggagttttaagctcaagtctcaaagataacctacctttacattctcagtcagaatttgacccagaaagaggaagtttcttcaggaacagaccgtacgttgatgaagtagaagtcatttcagtaaaaacggagtacagaacttggtcataatatcttgcattttatagatttattaaagattagtttcaagttcacattcgctattcagttgtaaaccgaatggatgggaggggagaaaatacaagctctccacacaggtatgctcctctcttttctgagagagaaggcatgggattttcagcataaattccatgttatgtgagtgctgtttgagttctgaagttcctatcaatatctgttcctgcaagtgatctctgtaagaccaccttacatgctggtcttagttattgttaaaattgcaaggtttcttcacaccctctttgataagaagtgtttagctggcagagctttcccttgacttctgagtctagtgtgggttggcccatgacagtgggaagaaatccaacatgttacatggagaccttgtatgtaaacaaactctgtagcctttgaaagtggaactgctttttacagttaaagggctgctaaatggcttgcagatgagatcttctggctcaccttgatcttcacatgaacccattgtgacctatctggatttcctaggacctgtagtttccatttgggttatattagtgcctcaggaatgtgtcactactggtcaagcaatactcagaaattcaggctgtgaggggttagattagaggaaagtaatttaggtgagctatccagagctttcaacctcagggtttataggaaaaaaaaacaaaatacaaaaacccttaggacttctcatactctagccctgaccttgcagtctcctctgaggggcctcctaagacccttaaaataatattacaataggactttgagtgtgcatttcacagtggaaatagcctctggctagcattacttccaaatgctagttccagctaaaaacaagtactttttattagtttcttgtctttcaacattctgccatcaaaatatattcattttattaacttaccgattattgggaacctgcaaaaaaaaaaaaaaaaaaacacacatgctgtctgcagccactgtttggttatttttgatagtttaagagaattataaatcaagttgttctgtctactagagtcagaaattctgtgctagaatgggacttctaaaattaggtggtcctgtcactttctagagaaagacccaaattcataggtttaagtggcttgtctgacatacacatacagccagttagtaacagaattcagaatagaatagagttcttttttttctgtcagtccgttgttctacttctctttccttttcttcatggttgagcagcttttggcaaaatgtgttccatatagcagtagttccaagagatgttaatagatgtaagaaaaaaagtgtgtgtgtgttgggggtgggggattgcatggtcaattaaaatgaaggaatgctgagtttgtttccttactgtaggacttctaagagttttgaacatgctattacacattgtgaatttataaaaggggacaaacactgtttgaccttagactgcactccccttctttattcctcagagcatctcaaaggactacagggtcctttgagaaacatggcccttgatcaagtttacaactctttgagaagacatccctaatggaaatactgaatggcagatctattactgtggtaccatgtagtgtgtaataaatcttgaagtccagaaagcaagtatatttgctgtttagagctatacttaaggtatagagattcttttccacctgtggtgtgtaaaatcagtattgtgtttaattttgcaggtttttcaaggatcaactaatgtgcaaatacagtggtgatatattgatattacattttaataatgcttttgtatggcactttatagttttcagacaccttttgtaacagccctgtgagacagacaatattatccttattgtacagatgggggggctctggaggctctgaaaagtttttggtgatattcccctaagtttataccacaaaatgatggagccagaatttagttgcagaacttctgactccaagtccagagttctttactagacatctggtttcttactagctttttgctagctttttattttacagtgaaaagtatggaagcaaatcctgataattttggcttattatcaaatatcatttattttttattgcagagacccagcagatgtaactctcattgtagccatcccaaagaaaacccttctttgccctttgcagtgccacttatttaggtaactgaagtgtatttccagtacaatttgattttgaactaagatttgatatagagttgtaattgcttacataactctttgaaaatgtatcatccctgggttctcaggtgaaggaggcaattcaaaagtaaaaaagaatattcgaatacaataaataccctctgttctcacacaaatgctgtttcttagctaacttgctttgacaacctactgatgtaacttctttattaatgtgaaatatttatattttgaaataaaattactagtgttgaatgaa

SEQ ID NO: 325372 - DNA, 2297 bp, Homo sapiens
ttaaaattgcaaggtttcttcacacttcttatcaaagagggtgtgaagaaaccttgcaattttaacaataactaagaccagcatgtaaggtttcttcacaccctctttgataagaagtgtttagctggcagagctttcccttgacttctgagtctagtgtgggttggcccatgacagtgggaagaaatccaacatgttacatggagaccttgtatgtaaacaaactctgtagcctttgaaagtggaactgctttttacagttaaagggctgctaaatggcttgcagatgagatcttctggctcaccttgatcttcacatgaacccattgtgacctatctggatttcctaggacctgtagtttccatttgggttatattagtgcctcaggaatgtgtcactactggtcaagcaatactcagaaattcaggctgtgaggggttagattagaggaaagtaatttaggtgagctatccagagctttcaacctcagggtttataggaaaaaaaaacaaaatacaaaaacccttaggacttctcatactctagccctgaccttgcagtctcctctgaggggcctcctaagacccttaaaataatattacaataggactttgagtgtgcatttcacagtggaaatagcctctggctagcattacttccaaatgctagttccagctaaaaacaagtactttttattagtttcttgtctttcaacattctgccatcaaaatatattcattttattaacttaccgattattgggaacctgcaaaaaaaaaaaaaaaaaaacacacatgctgtctgcagccactgtttggttatttttgatagtttaagagaattataaatcaagttgttctgtctactagagtcagaaattctgtgctagaatgggacttctaaaattaggtggtcctgtcactttctagagaaagacccaaattcataggtttaagtggcttgtctgacatacacatacagccagttagtaacagaattcagaatagaatagagttcttttttttctgtcagtccgttgttctacttctctttccttttcttcatggttgagcagcttttggcaaaatgtgttccatatagcagtagttccaagagatgttaatagatgtaagaaaaaaagtgtgtgtgtgttgggggtgggggattgcatggtcaattaaaatgaaggaatgctgagtttgtttccttactgtaggacttctaagagttttgaacatgctattacacattgtgaatttataaaaggggacaaacactgtttgaccttagactgcactccccttctttattcctcagagcatctcaaaggactacagggtcctttgagaaacatggcccttgatcaagtttacaactctttgagaagacatccctaatggaaatactgaatggcagatctattactgtggtaccatgtagtgtgtaataaatcttgaagtccagaaagcaagtatatttgctgtttagagctatacttaaggtatagagattcttttccacctgtggtgtgtaaaatcagtattgtgtttaattttgcaggtttttcaaggatcaactaatgtgcaaatacagtggtgatatattgatattacattttaataatgcttttgtatggcactttatagttttcagacaccttttgtaacagccctgtgagacagacaatattatccttattgtacagatgggggggctctggaggctctgaaaagtttttggtgatattcccctaagtttataccacaaaatgatggagccagaatttagttgcagaacttctgactccaagtccagagttctttactagacatctggtttcttactagctttttgctagctttttattttacagtgaaaagtatggaagcaaatcctgataattttggcttattatcaaatatcatttattttttattgcagagacccagcagatgtaactctcattgtagccatcccaaagaaaacccttctttgccctttgcagtgccacttatttaggtaactgaagtgtatttccagtacaatttgattttgaactaagatttgatatagagttgtaattgcttacataactctttgaaaatgtatcatccctgggttctcaggtgaaggaggcaattcaaaagtaaaaaagaatattcgaatacaataaataccctctgttctcacacaaatgctgtttcttagctaacttgctttgacaacctactgatgtaacttctttattaatgtgaaatatttatattttgaaataaaattactagtgttgaatgaa

SEQ ID NO: 325373 - DNA, 3726 bp, Homo sapiens
cgcccctcgggggcggctgtggcggaggaacgatggccgacggcggcggccctaaggaggcgccaagcctgcggagctctcccgggccggcgccgcgggtcccgcgcgcggtcgggccgagtggcggtggcggggagaccccgcggaccgcggcgctggcgctgcgcttcgacaagcccattaagcaggccttctacaacaccggggccgtgctgttcgtgtgcctgtgctgcggcgccgcggtgctggtctacttcatcctggaggccttcctgcggccgctgctctgggccgtgctatgcggcacttttctgcaccccttcaagagctcgctgacgcgcctgggccgccactggctgcagcgcctgcaccgcgcgcacacgcccatcgtcctggccgcgctgctcctgccgctctgcttcgtcgactacggcgtcgaggccctgggcgagcaggcgctgcgccgccgccgcctgctcctgctgctcggcgccggcggcccgctcctgtacggcctctactgcctcggcagctacttgggcgtgcaggtgctgctggtgcacgctgccacgctcatctgccgcgggctggactacttcagcagcctgtggatctggacgttggtggttggctatgtgttgactgtttcattcaagtggaatgcaagcactgaacgctacttgagagcagtttcaattcctgtctggattatattgctttttcatttagcatccctggctggctcatggagaattccagtattcctggttattgttttcctgatgtctgtgggtaccctctatgaaaaacagaatggaaaagagtcttctggggcagagttaccagggcaggttatctccatggcagcttctactctggcaaacttggccatctctatcacagggtatgaatcaagcagtgaagaccagccctccactcagcctgcagaagcagtggacaggggagaatccgctccaacgttgtccacctccccttcaccctcctccccttcacccacttccccttcacctactctgggcagacgaaggcctgaaataggaacgtttcttagaaagaagaaaactagtgacatctactttgtgtctctagtttgggccattgtcgtcatgcagatctggttgaacctgtggattgtgcagttgctgccagtgccgattgcagtctggatactcaaaaagcttgtcattcactttggagttgtggatttcctagagaaacgctaccatgtgtggtggggcattatagaaagcttcctgaaggagcggcagggagctctcgcgccttggcccattgtcgggcttggaaaattcttgttaaaagttgatagcaagatgatcatctggttggagaagatgttagataaaataattagcattttcatcatatttttgttagtgataggaactcttcttttagccctactcctgactgcaaaggtacatcaagagagtgtacacatgattgaagtcacaagtaatttgattaatgaaactctagcaaatcaccctgagtgggcaaattggcttcctgaggctcaggtagtccaaagagccctgaattctgcggctaacaacgtgtatcagtatggacgagaatggataactcacaagctccataaaattctaggagataaggtgaacaatactgctgtaattgaaaagcaagtactagaactttgggacagactgtatcactcttggtttgtaaagaatgtaacacactctggaaggcacaaaggacagaagttgcatgtcagtcgtcagaatagctggctgggagacattctggactggcaggatattgtttcctttgttcacgagaacattgagacatttctttcgatcttggagtctctgtggatcgttatgagccggaatgtgagcctgctgttcaccactgtcactacactcttgaccatcctcttctacagcgggacagcccttctcaattttgtactctctctgataattttcctgaccacactattttatctattaagttccagtgatgagtactacaagccagtgaagtgggtgataagcctgactccactatctcagccaggtccttcttctaatattattggccagtctgtggaagaagctatcagaggggtgtttgatgcttccctcaaaatggctggcttctatggattgtatacctggctgactcatactatgtttggcatcaatattgtcttcataccatcagcattagcagcaatccttggagcagtgccattcctggggacatactgggcagcagtacctgcagttcttgacctgtggctgacacaagggttaggatgcaaggccattttactgttgatttttcatctcttgccaacatactttgtagatactgcaatctactctgacatatcaggaggtggccatccttacctgacaggcttggcagtggccggtggagcatactacctaggcctggaaggagcaatcatcggtcctattcttctctgcatacttgtggttgcttccaatatctatagtgccatgctagtgagtcccacgaattcagttcccacgccaaaccagaccccatggcctgctcagcctcagcggactttccgtgacatttctgaagatctgaaatcttcagtaggttgatgtggtttcctctgcagtgatttttctaggaagttcaaatttgacagcgagttcagctcagctgtggccctctgcccttccagctgtgcctagcaagcaaaacccaggaaagaagcagaagcctcctggccttacatacagaatgcctggacaagagagaacttgctgcgggctgctttgtattttaaaacacagcttgagagttcagagttggtggtttgctcacttaactgttgttaagatggcttgaaaagtttcattttatacactggtaccctggcttgaaatttttccactttggttatctatgttactatattatatatttataaagttattttaagaactctaaactacctgctgttaaaagaatagatggtgtaattttttcctggtttaagaaatgtattgttaaacttttctaagacagtcacttttcaaggaagagggctttcacttttgagtgtgtagttgagtgagcaggaaaaatgaatcttctacccttctcccacaatgtattatacgctctttaagaaataataaatcataagtataagggtggggtggcttatttgatgttcagttttatattataaccctgggagatacaaagactgaaaaaaaaaaaaaaaaaaaaaaaaaaaaaaaaaaaaaaaaaaaaaaaaaaaaaacagggggggcgcgcgcgcccaaaaattccccccgggggggcgcccaagtgcgccgccccccatttttttgtggaaaaagggggcgccccccataaataggggagagcgcctataatatactaccgcaaggcgacgagggggccgcgcgggtctaaaacacccgtcggcagcggggggaaacacaacgctcgcgacagcggggaaatccgggggaggaaagggaccccatatactcgtggggggggaggaaaatagggtggaaaatatactaaaaggaactataaaagtctcagagggacaattatagatttttagggtgtatcagtggggttaacacaagtggatatagtgctgcgcgaggaaaattgtggctagggatattgattttagatatttttacggggagt

SEQ ID NO: 325374 - DNA, 3082 bp, Homo sapiens
cgcccctcgggggcggctgtggcggaggaacgatggccgacggcggcggccctaaggaggcgccaagcctgcggagctctcccgggccggcgccgcgggtcccgcgcgcggtcgggccgagtggcggtggcggggagaccccgcggaccgcggcgctggcgctgcgcttcgacaagcccattaagcaggccttctacaacaccggggccgtgctgttcgtgtgcctgtgctgcggcgccgcggtgctggtctacttcatcctggaggccttcctgcggccgctgctctgggccgtgctatgcggcacttttctgcaccccttcaagagctcgctgacgcgcctgggccgccactggctgcagcgcctgcaccgcgcgcacacgcccatcgtcctggccgcgctgctcctgccgctctgcttcgtcgactacggcgtcgaggccctgggcgagcaggcgctgcgccgccgccgcctgctcctgctgctcggcgccggcggcccgctcctgtacggcctctactgcctcggcagctacttgggcgtgcaggtgctgctggtgcacgctgccacgctcatctgccgcgggctggactacttcagcagcctgtggatctggacgttggtggttggctatgtgttgactgtttcattcaagtggaatgcaagcactgaacgctacttgagagcagtttcaattcctgtctggattatattgctttttcatttagcatccctggctggctcatggagaattccagtattcctggttattgttttcctgatgtctgtgggtaccctctatgaaaaacagaatggaaaagagtcttctggggcagagttaccagggcaggttatctccatggcagcttctactctggcaaacttggccatctctatcacagggtatgaatcaagcagtgaagaccagccctccactcagcctgcagaagcagtggacaggggagaatccgctccaacgttgtccacctccccttcaccctcctccccttcacccacttccccttcacctactctgggcagacgaaggcctgaaataggaacgtttcttagaaagaagaaaactagtgacatctactttgtgtctctagtttgggccattgtcgtcatgcagatctggttgaacctgtggattgtgcagttgctgccagtgccgattgcagtctggatactcaaaaagcttgtcattcactttggagttgtggatttcctagagaaacgctaccatgtgtggtggggcattatagaaagcttcctgaaggagcggcagggagctctcgcgccttggcccattgtcgggcttggaaaattcttgttaaaagttgatagcaagatgatcatctggttggagaagatgttagataaaataattagcattttcatcatatttttgttagtgataggaactcttcttttagccctactcctgactgcaaaggtacatcaagagagtgtacacatgattgaagtcacaagtaatttgattaatgaaactctagcaaatcaccctgagtgggcaaattggcttcctgaggctcaggtagtccaaagagccctgaattctgcggctaacaacgtgtatcagtatggacgagaatggataactcacaagctccataaaattctaggagataaggtgaacaatactgctgtaattgaaaagcaagtactagaactttgggacagactgtatcactcttggtttgtaaagaatgtaacacactctggaaggcacaaaggacagaagttgcatgtcagtcgtcagaatagctggctgggagacattctggactggcaggatattgtttcctttgttcacgagaacattgagacatttctttcgatcttggagtctctgtggatcgttatgagccggaatgtgagcctgctgttcaccactgtcactacactcttgaccatcctcttctacagcgggacagcccttctcaattttgtactctctctgataattttcctgaccacactattttatctattaagttccagtgatgagtactacaagccagtgaagtgggtgataagcctgactccactatctcagccaggtccttcttctaatattattggccagtctgtggaagaagctatcagaggggtgtttgatgcttccctcaaaatggctggcttctatggattgtatacctggctgactcatactatgtttggcatcaatattgtcttcataccatcagcattagcagcaatccttggagcagtgccattcctggggacatactgggcagcagtacctgcagttcttgacctgtggctgacacaagggttaggatgcaaggccattttactgttgatttttcatctcttgccaacatactttgtagatactgcaatctactctgacatatcaggaggtggccatccttacctgacaggcttggcagtggccggtggagcatactacctaggcctggaaggagcaatcatcggtcctattcttctctgcatacttgtggttgcttccaatatctatagtgccatgctagtgagtcccacgaattcagttcccacgccaaaccagaccccatggcctgctcagcctcagcggtgagttaaagcagaataatcataagctgtatttatacattgaactgtcctgtctctgtatttgataagtagcttcatccagacttgtcaggataaaggtatttgagtaccaatgctgtgataaaggttgcagaagacactaagtaaatacaaatcgttggcagagttttgggtttcatataccaagaaaatttaaaacctatattggggccgggagcagtggctcacgcctataatcccagcactttgggagaacaaggcaggtggatcacctgaggtcaggagttcgagcccagcctggccaacatggcgaaaccccatctctactaaaaatacaaaaatcagccaggtgtggtggcacccgcctgtgaacccagctgtttgggaggctgaggcagaagaattgcttgaacccaggaggcggaggctgcagtgagcccagattgtgccactggactctagcctgggcaacagcatata

SEQ ID NO: 325375 - DNA, 371 bp, Homo sapiens
cctaatgagtggctctgtattcccatttcctcatgtggactaatgcggtgtgtggtgtttttcttttccttttcagaagcagtggacaggggagaatccgctccaacgttgtccacctccccttcaccctcctccccttcacccacttccccttcacctactctgggcagacgaaggcctgaaataggaacgtttcttagaaagaagaaaactagtgacatctactttgtgtctctagtttgggccattgtcgtcatgcagatctggttgaacctgtggattgtgcagttgctgccagtgccgattgcaggtcgttatctggttaagtacgatctcgtcttgtctttgaagattgatttttttcttttttt

SEQ ID NO: 325376 - DNA, 7037 bp, Homo sapiens
cgcccctcgggggcggctgtggcggaggaacgatggccgacggcggcggccctaaggaggcgccaagcctgcggagctctcccgggccggcgccgcgggtcccgcgcgcggtcgggccgagtggcggtggcggggagaccccgcggaccgcggcgctggcgctgcgcttcgacaagcccattaagcaggccttctacaacaccggggccgtgctgttcgtgtgcctgtgctgcggcgccgcggtgctggtctacttcatcctggaggccttcctgcggccgctgctctgggccgtgctatgcggcacttttctgcaccccttcaagagctcgctgacgcgcctgggccgccactggctgcagcgcctgcaccgcgcgcacacgcccatcgtcctggccgcgctgctcctgccgctctgcttcgtcgactacggcgtcgaggccctgggcgagcaggcgctgcgccgccgccgcctgctcctgctgctcggcgccggcggcccgctcctgtacggcctctactgcctcggcagctacttgggcgtgcaggtgctgctggtgcacgctgccacgctcatctgccgcgggctggactacttcagcagcctgtggatctggacgttggtggttggctatgtgttgactgtttcattcaagtggaatgcaagcactgaacgctacttgagagcagtttcaattcctgtctggattatattgctttttcatttagcatccctggctggctcatggagaattccagtattcctggttattgttttcctgatgtctgtgggtaccctctatgaaaaacagaatggaaaagagtcttctggggcagagttaccagggcaggttatctccatggcagcttctactctggcaaacttggccatctctatcacagggtatgaatcaagcagtgaagaccagccctccactcagcctgcagaagcagtggacaggggagaatccgctccaacgttgtccacctccccttcaccctcctccccttcacccacttccccttcacctactctgggcagacgaaggcctgaaataggaacgtttcttagaaagaagaaaactagtgacatctactttgtgtctctagtttgggccattgtcgtcatgcagatctggttgaacctgtggattgtgcagttgctgccagtgccgattgcagtctggatactcaaaaagcttgtcattcactttggagttgtggatttcctagagaaacgctaccatgtgtggtggggcattatagaaagcttcctgaaggagcggcagggagctctcgcgccttggcccattgtcgggcttggaaaattcttgttaaaagttgatagcaagatgatcatctggttggagaagatgttagataaaataattagcattttcatcatatttttgttagtgataggaactcttcttttagccctactcctgactgcaaaggtacatcaagagagtgtacacatgattgaagtcacaagtaatttgattaatgaaactctagcaaatcaccctgagtgggcaaattggcttcctgaggctcaggtagtccaaagagccctgaattctgcggctaacaacgtgtatcagtatggacgagaatggataactcacaagctccataaaattctaggagataaggtgaacaatactgctgtaattgaaaagcaagtactagaactttgggacagactgtatcactcttggtttgtaaagaatgtaacacactctggaaggcacaaaggacagaagttgcatgtcagtcgtcagaatagctggctgggagacattctggactggcaggatattgtttcctttgttcacgagaacattgagacatttctttcgatcttggagtctctgtggatcgttatgagccggaatgtgagcctgctgttcaccactgtcactacactcttgaccatcctcttctacagcgggacagcccttctcaattttgtactctctctgataattttcctgaccacactattttatctattaagttccagtgatgagtactacaagccagtgaagtgggtgataagcctgactccactatctcagccaggtccttcttctaatattattggccagtctgtggaagaagctatcagaggggtgtttgatgcttccctcaaaatggctggcttctatggattgtatacctggctgactcatactatgtttggcatcaatattgtcttcataccatcagcattagcagcaatccttggagcagtgccattcctggggacatactgggcagcagtacctgcagttcttgacctgtggctgacacaagggttaggatgcaaggccattttactgttgatttttcatctcttgccaacatactttgtagatactgcaatctactctgacatatcaggaggtggccatccttacctgacaggcttggcagtggccggtggagcatactacctaggcctggaaggagcaatcatcggtcctattcttctctgcatacttgtggttgcttccaatatctatagtgccatgctagtgagtcccacgaattcagttcccacgccaaaccagaccccatggcctgctcagcctcagcggactttccgtgacatttctgaagatctgaaatcttcagtaggttgatgtggtttcctctgcagtgatttttctaggaagttcaaatttgacagcgagttcagctcagctgtggccctctgcccttccagctgtgcctagcaagcaaaacccaggaaagaagcagaagcctcctggccttacatacagaatgcctggacaagagagaacttgctgcgggctgctttgtattttaaaacacagcttgagagttcagagttggtggtttgctcacttaactgttgttaagatggcttgaaaagtttcattttatacactggtaccctggcttgaaatttttccactttggttatctatgttactatattatatatttataaagttattttaagaactctaaactacctgctgttaaaagaatagatggtgtaattttttcctggtttaagaaatgtattgttaaacttttctaagacagtcacttttcaaggaagagggctttcacttttgagtgtgtagttgagtgagcaggaaaaatgaatcttctacccttctcccacaatgtattatacgctctttaagaaataataaatcataagtataagggtggggtggcttatttgatgttcagttttatattataaccctgggagatacaaagactgaagctcttcctcctcttccttttctcttcacgcttctttacactattgccaaattataaaacttggctgaccacgttgaagtgaaatacttattaagctgctatgaatggtaacagtatgataaaattcatgctgttattaggttttctccttccaggtggttgaagtgaaaaatctcaggtgtagcaatactctgatttgttaaatgtatccgtttcattatttggaactctgccaataagttagttttcagcagaattttgtatttatgtagtattttcccatctcttagcacagtgccttgcacatgactctaaatgaatgcttgttgaattgaattgcaactttaaaaatatctcagatatcacaataaccagcatagtgctttacattttacaaagtccttttgcacatactatttcacaagtacatcacatcagctttcatatagctttatattattttacatcagttttacactgatggagaagctaaggttcagaaaagtgaccaactcaaagtcgtaaagtgtagtaggatttggcctcagatctttgactccgttgtgtgcagattctgctgtattagtgttccttctaaatattgtatgcagttttcccagtgttacgagattggtgttgctatccatttgttgtgaatgaagacttgtcctatagtacatgacagggctgagagtggactgtagttcttagctgaaccctttctactgtttaaaacaatcatcaggcctatcctctgctcccaggggaatgtgggagagaaaagggttcttggccaggctgtaggtggtggctcacatctgtaatcccagcactttggaaggctgaggtgggtggattgcttgagcccagggatttgagatcagcctaggcaacatggcaaaaccccatctctacaaaaaaaaaaaaaaaaaaaaaaaaattagctgggcacggtggtgtggctatagtctgagctactcaggaggctgatgtatgaggatcacctgagtccaggaggtcgaggctgcagtgagccaagatggcgccactgcactccagcctgggtgagagagtgagacactgtcccaaggaaaaaaaaaagtgttggggggtagttcttaagcgttgaagatttcctttttggaaagtatttaaaggtagaaatattaataatttttcctaaaacatctccctaagaagtcactgataattataattagtttaaatttattcttacactacttaagaaaaatttcatttagaaaaggctaccatgagatcttttgactatatggagtagactgcatacagatctctttatttctattatgaatattttagcgattataatcagctattccactgagtattagatttggtcactaagtaactcatgtttttctttagtcaatcattcattcattcactaaaacatttgttgagagttggctaaactctagattctgtgccaggcactgtacagggtgatggagatcactcataagaaggcctcttgctcttagccagatcatatgtaatactaaatttaaattttttgcattaaaaggctaaaaaatcatttgtttttgttaattatatactggttgatttatagatgtaattagcacatattcataagagacaaatatatacaatgagttactatacatatacaaagtgattttagctgtataaagtgatattgcaaaaaactacagctaatgtttcttgctgggtaattattagcataaatatcaggttcttagaggtctttaagagaatactttagagctaccaaaattagcagcagtgatgtaatatcaccctgaaataccaggagcagaggtgccccagagtgcttcacagctatgatcaggaaacttgacctgccccattgctacagcaacggcataaggactaggaaggtccactagctggggaggtcttggaaccctccgagccagaaagaagcattccagcatgattcctcagatgcaatgaggaaggtttacagaattttcacagggcaacagagatcaagtggtatgaaaaggtaggagttttaagctcaagtctcaaagataacctacctttacattctcagtcagaatttgacccagaaagaggaagtttcttcaggaacagaccgtacgttgatgaagtagaagtcatttcagtaaaaacggagtacagaacttggtcataatatcttgcattttatagatttattaaagattagtttcaagttcacattcgctattcagttgtaaaccgaatggatgggaggggagaaaatacaagctctccacacaggtatgctcctctcttttctgagagagaaggcatgggattttcagcataaattccatgttatgtgagtgctgtttgagttctgaagttcctatcaatatctgttcctgcaagtgatctctgtaagaccaccttacatgctggtcttagttattgttaaaattgcaaggtttcttcacaccctctttgataagaagtgtttagctggcagagctttcccttgacttctgagtctagtgtgggttggcccatgacagtgggaagaaatccaacatgttacatggagaccttgtatgtaaacaaactctgtagcctttgaaagtggaactgctttttacagttaaagggctgctaaatggcttgcagatgagatcttctggctcaccttgatcttcacatgaacccattgtgacctatctggatttcctaggacctgtagtttccatttgggttatattagtgcctcaggaatgtgtcactactggtcaagcaatactcagaaattcaggctgtgaggggttagattagaggaaagtaatttaggtgagctatccagagctttcaacctcagggtttataggaaaaaaaaacaaaatacaaaaacccttaggacttctcatactctagccctgaccttgcagtctcctctgaggggcctcctaagacccttaaaataatattacaataggactttgagtgtgcatttcacagtggaaatagcctctggctagcattacttccaaatgctagttccagctaaaaacaagtactttttattagtttcttgtctttcaacattctgccatcaaaatatattcattttattaacttaccgattattgggaacctgcaaaaaaaaaaaaaaaaaaacacacatgctgtctgcagccactgtttggttatttttgatagtttaagagaattataaatcaagttgttctgtctactagagtcagaaattctgtgctagaatgggacttctaaaattaggtggtcctgtcactttctagagaaagacccaaattcataggtttaagtggcttgtctgacatacacatacagccagttagtaacagaattcagaatagaatagagttcttttttttctgtcagtccgttgttctacttctctttccttttcttcatggttgagcagcttttggcaaaatgtgttccatatagcagtagttccaagagatgttaatagatgtaagaaaaaaagtgtgtgtgtgttgggggtgggggattgcatggtcaattaaaatgaaggaatgctgagtttgtttccttactgtaggacttctaagagttttgaacatgctattacacattgtgaatttataaaaggggacaaacactgtttgaccttagactgcactccccttctttattccccccccgcctcttccccgcccaccgggcccccccccccacccccccccctgccctccagtcccccc

SEQ ID NO: 325377 - DNA, 4341 bp, Homo sapiens
cgcccctcgggggcggctgtggcggaggaacgatggccgacggcggcggccctaaggaggcgccaagcctgcggagctctcccgggccggcgccgcgggtcccgcgcgcggtcgggccgagtggcggtggcggggagaccccgcggaccgcggcgctggcgctgcgcttcgacaagcccattaagcaggccttctacaacaccggggccgtgctgttcgtgtgcctgtgctgcggcgccgcggtgctggtctacttcatcctggaggccttcctgcggccgctgctctgggccgtgctatgcggcacttttctgcaccccttcaagagctcgctgacgcgcctgggccgccactggctgcagcgcctgcaccgcgcgcacacgcccatcgtcctggccgcgctgctcctgccgctctgcttcgtcgactacggcgtcgaggccctgggcgagcaggcgctgcgccgccgccgcctgctcctgctgctcggcgccggcggcccgctcctgtacggcctctactgcctcggcagctacttgggcgtgcaggtgctgctggtgcacgctgccacgctcatctgccgcgggctggactacttcagcagcctgtggatctggacgttggtggttggctatgtgttgactgtttcattcaagtggaatgcaagcactgaacgctacttgagagcagtttcaattcctgtctggattatattgctttttcatttagcatccctggctggctcatggagaattccagtattcctggttattgttttcctgatgtctgtgggtaccctctatgaaaaacagaatggaaaagagtcttctggggcagagttaccagggcaggttatctccatggcagcttctactctggcaaacttggccatctctatcacagggtatgaatcaagcagtgaagaccagccctccactcagcctgcagaagcagtggacaggggagaatccgctccaacgttgtccacctccccttcaccctcctccccttcacccacttccccttcacctactctgggcagacgaaggcctgaaataggaacgtttcttagaaagaagaaaactagtgacatctactttgtgtctctagtttgggccattgtcgtcatgcagatctggttgaacctgtggattgtgcagttgctgccagtgccgattgcagtctggatactcaaaaagcttgtcattcactttggagttgtggatttcctagagaaacgctaccatgtgtggtggggcattatagaaagcttcctgaaggagcggcagggagctctcgcgccttggcccattgtcgggcttggaaaattcttgttaaaagttgatagcaagatgatcatctggttggagaagatgttagataaaataattagcattttcatcatatttttgttagtgataggaactcttcttttagccctactcctgactgcaaaggtacatcaagagagtgtacacatgattgaagtcacaagtaatttgattaatgaaactctagcaaatcaccctgagtgggcaaattggcttcctgaggctcaggtagtccaaagagccctgaattctgcggctaacaacgtgtatcagtatggacgagaatggataactcacaagctccataaaattctaggagataaggtgaacaatactgctgtaattgaaaagcaagtactagaactttgggacagactgtatcactcttggtttgtaaagaatgtaacacactctggaaggcacaaaggacagaagttgcatgtcagtcgtcagaatagctggctgggagacattctggactggcaggatattgtttcctttgttcacgagaacattgagacatttctttcgatcttggagtctctgtggatcgttatgagccggaatgtgagcctgctgttcaccactgtcactacactcttgaccatcctcttctacagcgggacagcccttctcaattttgtactctctctgataattttcctgaccacactattttatctattaagttccagtgatgagtactacaagccagtgaagtgggtgataagcctgactccactatctcagccaggtccttcttctaatattattggccagtctgtggaagaagctatcagaggggtgtttgatgcttccctcaaaatggctggcttctatggattgtatacctggctgactcatactatgtttggcatcaatattgtcttcataccatcagcattagcagcaatccttggagcagtgccattcctggggacatactgggcagcagtacctgcagttcttgacctgtggctgacacaagggttaggatgcaaggccattttactgttgatttttcatctcttgccaacatactttgtagatactgcaatctactctgacatatcaggaggtggccatccttacctgacaggcttggcagtggccggtggagcatactacctaggcctggaaggagcaatcatcggtcctattcttctctgcatacttgtggttgcttccaatatctatagtgccatgctagtgagtcccacgaattcagttcccacgccaaaccagaccccatggcctgctcagcctcagcggactttccgtgacatttctgaagatctgaaatcttcagtaggttgatgtggtttcctctgcagtgatttttctaggaagttcaaatttgacagcgagttcagctcagctgtggccctctgcccttccagctgtgcctagcaagcaaaacccaggaaagaagcagaagcctcctggccttacatacagaatgcctggacaagagagaacttgctgcgggctgctttgtattttaaaacacagcttgagagttcagagttggtggtttgctcacttaactgttgttaagatggcttgaaaagtttcattttatacactggtaccctggcttgaaatttttccactttggttatctatgttactatattatatatttataaagttattttaagaactctaaactacctgctgttaaaagaatagatggtgtaattttttcctggtttaagaaatgtattgttaaacttttctaagacagtcacttttcaaggaagagggctttcacttttgagtgtgtagttgagtgagcaggaaaaatgaatcttctacccttctcccacaatgtattatacgctctttaagaaataataaatcataagtataagggtggggtggcttatttgatgttcagttttatattataaccctgggagatacaaagactgaagctcttcctcctcttccttttctcttcacgcttctttacactattgccaaattataaaacttggctgaccacgttgaagtgaaatacttattaagctgctatgaatggtaacagtatgataaaattcatgctgttattaggttttctccttccaggtggttgaagtgaaaaatctcaggtgtagcaatactctgatttgttaaatgtatccgtttcattatttggaactctgccaataagttagttttcagcagaattttgtatttatgtagtattttcccatctcttagcacagtgccttgcacatgactctaaatgaatgcttgttgaattgaattgcaactttaaaaatatctcagatatcacaataaccagcatagtgctttacattttacaaagtccttttgcacatactatttcacaagtacatcacatcagctttcatatagctttatattattttacatcagttttacactgatggagaagctaaggttcagaaaagtgaccaactcaaagtcgtaaagtgtagtaggatttggcctcagatctttgactccgttgtgtgcagattctgctgtattagtgttccttctaaatattgtatgcagttttcccagtgttacgagattggtgttgctatccatttgttgtgaatgaagacttgtcctatagtacatgacagggctgagagtggactgtagttcttagctgaaccctttctactgtttaaaacaatcatcaggcctatcctctgctcccaggggaatgtgggagagaaaagggttcttgccatgttgcctaggctggtcatgaactcctgggcttaagcaatcctctagcttcagcttcccaagtagctgggactacaggcacgtgctactgtgcctggctaattttttaatttttggtagagatgagatcttgccaggtttccccggctggtctctaactcctggcctcaagtaatcctcctgccacagcctccccaaatgctggcattacaggtgtgagccacccatgcctggccttatgcaaccctttaaagcacaaagcacaaaacactgggcctct

SEQ ID NO: 325378 - DNA, 3313 bp, Homo sapiens
cgcccctcgggggcggctgtggcggaggaacgatggccgacggcggcggccctaaggaggcgccaagcctgcggagctctcccgggccggcgccgcgggtcccgcgcgcggtcgggccgagtggcggtggcggggagaccccgcggaccgcggcgctggcgctgcgcttcgacaagcccattaagcaggccttctacaacaccggggccgtgctgttcgtgtgcctgtgctgcggcgccgcggtgctggtctacttcatcctggaggccttcctgcggccgctgctctgggccgtgctatgcggcacttttctgcaccccttcaagagctcgctgacgcgcctgggccgccactggctgcagcgcctgcaccgcgcgcacacgcccatcgtcctggccgcgctgctcctgccgctctgcttcgtcgactacggcgtcgaggccctgggcgagcaggcgctgcgccgccgccgcctgctcctgctgctcggcgccggcggcccgctcctgtacggcctctactgcctcggcagctacttgggcgtgcaggtgctgctggtgcacgctgccacgctcatctgccgcgggctggactacttcagcagcctgtggatctggacgttggtggttggctatgtgttgactgtttcattcaagtggaatgcaagcactgaacgctacttgagagcagtttcaattcctgtctggattatattgctttttcatttagcatccctggctggctcatggagaattccagtattcctggttattgttttcctgatgtctgtgggtaccctctatgaaaaacagaatggaaaagagtcttctggggcagagttaccagggcaggttatctccatggcagcttctactctggcaaacttggccatctctatcacagggtatgaatcaagcagtgaagaccagccctccactcagcctgcagaagcagtggacaggggagaatccgctccaacgttgtccacctccccttcaccctcctccccttcacccacttccccttcacctactctgggcagacgaaggcctgaaataggaacgtttcttagaaagaagaaaactagtgacatctactttgtgtctctagtttgggccattgtcgtcatgcagatctggttgaacctgtggattgtgcagttgctgccagtgccgattgcagtctggatactcaaaaagcttgtcattcactttggagttgtggatttcctagagaaacgctaccatgtgtggtggggcattatagaaagcttcctgaaggagcggcagggagctctcgcgccttggcccattgtcgggcttggaaaattcttgttaaaagttgatagcaagatgatcatctggttggagaagatgttagataaaataattagcattttcatcatatttttgttagtgataggaactcttcttttagccctactcctgactgcaaaggtacatcaagagagtgtacacatgattgaagtcacaagtaatttgattaatgaaactctagcaaatcaccctgagtgggcaaattggcttcctgaggctcaggtagtccaaagagccctgaattctgcggctaacaacgtgtatcagtatggacgagaatggataactcacaagctccataaaattctaggagataaggtgaacaatactgctgtaattgaaaagcaagtactagaactttgggacagactgtatcactcttggtttgtaaagaatgtaacacactctggaaggcacaaaggacagaagttgcatgtcagtcgtcagaatagctggctgggagacattctggactggcaggatattgtttcctttgttcacgagaacattgagacatttctttcgatcttggagtctctgtggatcgttatgagccggaatgtgagcctgctgttcaccactgtcactacactcttgaccatcctcttctacagcgggacagcccttctcaattttgtactctctctgataattttcctgaccacactattttatctattaagttccagtgatgagtactacaagccagtgaagtgggtgataagcctgactccactatctcagccaggtccttcttctaatattattggccagtctgtggaagaagctatcagaggggtgtttgatgcttccctcaaaatggctggcttctatggattgtatacctggctgactcatactatgtttggcatcaatattgtcttcataccatcagcattagcagcaatccttggagcagtgccattcctggggacatactgggcagcagtacctgcagttcttgacctgtggctgacacaagggttaggatgcaaggccattttactgttgatttttcatctcttgccaacatactttgtagatactgcaatctactctgacatatcaggaggtggccatccttacctgacaggcttggcagtggccggtggagcatactacctaggcctggaaggagcaatcatcggtcctattcttctctgcatacttgtggttgcttccaatatctatagtgccatgctagtgagtcccacgaattcagttcccacgccaaaccagaccccatggcctgctcagcctcagcggactttccgtgacatttctgaagatctgaaatcttcagtaggttgatgtggtttcctctgcagtgatttttctaggaagttcaaatttgacagcgagttcagctcagctgtggccctctgcccttccagctgtgcctagcaagcaaaacccaggaaagaagcagaagcctcctggccttacatacagaatgcctggacaagagagaacttgctgcgggctgctttgtattttaaaacacagcttgagagttcagagttggtggtttgctcacttaactgttgttaagatggcttgaaaagtttcattttatacactggtaccctggcttgaaatttttccactttggttatctatgttactatattatatatttataaagttattttaagaactctaaactacctgctgttaaaagaatagatggtgtaattttttcctggtttaagaaatgtattgttaaacattcttcatatgtgatgtccttagtcactaaggttaaactttcccacccagaaaaggcaacttagataaaatcttagagtactttcatactcttctaagtcctcttccagcctcactttgagtcctccttggggttgataggaattttctcttgctttctcaataaagtctctattcatctcatgtttaatttgtacgcatagaattgctgagaaataaaatgttctgttcaacttaaaaaaaaacca

SEQ ID NO: 325379 - DNA, 433 bp, Homo sapiens
caccccttcaagagctcgctgacgcgcctgggccgccactggctgcagcgcctgcaccgcgcgcacacgcccatcgtcctggccgcgctgctcctgccgctctgcttcgtcgactacggcgtcgaggccctgggcgagcaggcgctgcgccgccgccgcctgctcctgctgctcggcgccggcggcccgctcctgtacggcctctactgcctcggcagctacttgggcgtgcaggtgctgctggtgcacgctgccacgctcatctgccgcgggctggactacttcagcagcctgtgggtgagtgagcggcagtccgcccccgtcccccgcccgtggtcccggcgctctggggtgcaatcctgcagctgttcctcccggtgcaggggcgacgaggggccacacctgtgctgcagtgaccgtccgtctccgcttt

SEQ ID NO: 325380 - DNA, 906 bp, Homo sapiens
accacaccccatgcccatgcaggatgatagtgaatagtggccaaaagatactataattagactcatgtaattaaggaatatttttgtcttgtacctattatgtgcctataaagactatgaaatctatttattcagtgatttattggaataccaaataagcaaagatcctatgtgctaaagattctaatattgtgctaagattttccctcagatgtttggctttctcaaattccctgagggctagaactttgccctactcatttgtgtttcccaagtgtctaacgcagtgcctgacacatacaggatctccaaacgcttgctgaatgtgtgaggaaggaattaaaataatgtaccgccgggcaaagtggctcatgcctataatcccagcactttgagagaccgaggtgggcagatcacttgaggtcaggagcttgagcccagcctggccaacatggtgaaaccccgtctctactaagaatacaaaaattagccgcgagttgtggcaggcgcctgtaatcccagctactcggaaggctgaagtgggagaatcacttgaacctgggaagcagaggtcgtagtgagccgagatcagaccgctgagctccagcctgggtgacagagcaagactccatctcgaaaaataaaagtaaaataaaataatgtactaactggacccagaacagattttccaattgattattgacaacaaaggaatctgaattatctaataaggtgaataagtacatattcatatatatatgtatatgtgtgtgtatttacatttttataaaagtgtaaaagtatatatactttttttcctttcttcaggtagaaacctctcctagattgtcactgaataaacattagcactaactatggcaatcaaatcacatattgattggtgtc

SEQ ID NO: 325381 - DNA, 1863 bp, Homo sapiens
  misc_feature (425)..(425): n is a, c, g, or t
tttccttctactataccattttaagttctgacctcaggcctccatttgggccgatggcctcttggaggcttaaagttttctgtaccttgtgatgaatgttaataggtgtttttattatacaaagctgaatgtcatttctcgtttgtagctttctgtcactcattccatcttccttcagacatcaccacgtttctctaaagtcagaaaacattccgttttggtctttttcaaaaaggtcccaaatgctgcactctacacatgaaggccctctcacacagacgtgacgtcctgccagaaagagaatgaatgacagaaaaaaaaaagagagacaaactctaggaacaatgccgattcattccacgcagcagtattgggggtggttcgggggaggggtgtttcggattttctttttttcttttcttttntttttttttttttgcagcaaccattaataaatgccaccacattctaccagcacaaggaaacataggcagcactgaaaaaaaaaaaaaaagctcatattaattagactgacaatatggccttggaaggctctcccttgtggaaccaagttgccatgggccttgggtgctctgcgataacgggtgtgggttggttttgtttgcaaaatggccaaaaaaaaaaaccggcttccccgagcagctgccctgaaagtaggggtggcggcggcggcgctgagtttatacattagttcagacctacttggtggcattaaactgtttgaatgcaaattcgatttcagattgaacttgttaagggagttaacgagggctgagttcagcaaatgctaaagtgttaatttcaaatatgcaaatttggtactgcagtttgttatgcaatattatatcaccaacccagtatcacaaaaactcatagaagatatcatgtaggccctgggctttgggggggtcccaaacatggtatgcagaaatgtgatggttacaggtcagtacaacctcagtccttagaacccctccacacttcagctctgcacccactttcctgtcatttatttatataggactgtagttttttttagttcgagagcctttcgaagcttaatttatattctttctttgtaccttttttctaaaattaccaaagatattacacaaaggtaaattatgttctctgttttatgctttatctgatgaagccaaatatcctcttattgttgatcaaaggaggcaaaagaatttagaggcaaatgacaagcgataggctattgcaacctgagaaagagaactgctccttcatcgtaaatttagaagaccaagtagataatggaaccaaagttgttacttttttctagtagttatttttcctttttctttttgtgtacctctacagagaccaaaactcattctcttaaagagattttatggggctactgcagataaaaataggacacaatattaaaggagctacagaaggaagggagtcccatctcaaaaaaaaaatgaatgtatgccactgcaattagagtatccaataaaggagacagtttagagtcaggacagaaaagcttccataattgaactagattacataatagtatttctagaaaaagagatatttttagattgtatgccacttttgtttaagaactgtgctgtgatcactgtattaattttggtttatcttggcatatatccttcagtttgtttttatttttaatttttcctttttttccgattaggctttggtcagcatttttcatttaaagaaaagtaacactcccatccactcataagcttggtacaaaaacttctctggcagttacttttgaagcttcactctgctttctgtataaagggcagtctgtggtcacgcaagacttta

SEQ ID NO: 325382 - DNA, 3949 bp, Homo sapiens
  misc_feature (425)..(425): n is a, c, g, or t
tttccttctactataccattttaagttctgacctcaggcctccatttgggccgatggcctcttggaggcttaaagttttctgtaccttgtgatgaatgttaataggtgtttttattatacaaagctgaatgtcatttctcgtttgtagctttctgtcactcattccatcttccttcagacatcaccacgtttctctaaagtcagaaaacattccgttttggtctttttcaaaaaggtcccaaatgctgcactctacacatgaaggccctctcacacagacgtgacgtcctgccagaaagagaatgaatgacagaaaaaaaaaagagagacaaactctaggaacaatgccgattcattccacgcagcagtattgggggtggttcgggggaggggtgtttcggattttctttttttcttttcttttntttttttttttttgcagcaaccattaataaatgccaccacattctaccagcacaaggaaacataggcagcactgaaaaaaaaaaaaaaagctcatattaattagactgacaatatggccttggaaggctctcccttgtggaaccaagttgccatgggccttgggtgctctgcgataacgggtgtgggttggttttgtttgcaaaatggccaaaaaaaaaaaccggcttccccgagcagctgccctgaaagtaggggtggcggcggcggcgctgagtttatacattagttcagacctacttggtggcattaaactgtttgaatgcaaattcgatttcagattgaacttgttaagggagttaacgagggctgagttcagcaaatgctaaagtgttaatttcaaatatgcaaatttggtactgcagtttgttatgcaatattatatcaccaacccagtatcacaaaaactcatagaagatatcatgtaggccctgggctttgggggggtcccaaacatggtatgcagaaatgtgatggttacaggtcagtacaacctcagtccttagaacccctccacacttcagctctgcacccactttcctgtcatttatttatataggactgtagttttttttagttcgagagcctttcgaagcttaatttatattctttctttgtaccttttttctaaaattaccaaagatattacacaaaggtaaattatgttctctgttttatgctttatctgatgaagccaaatatcctcttattgttgatcaaaggaggcaaaagaatttagaggcaaatgacaagcgataggctattgcaacctgagaaagagaactgctccttcatcgtaaatttagaagaccaagtagataatggaaccaaagttgttacttttttctagtagttatttttcctttttctttttgtgtacctctacagagaccaaaactcattctcttaaagagattttatggggctactgcagataaaaataggacacaatattaaaggagctacagaaggaagggagtcccatctcaaaaaaaaaatgaatgtatgccactgcaattagagtatccaataaaggagacagtttagagtcaggacagaaaagcttccataattgaactagattacataatagtatttctagaaaaagagatatttttagattgtatgccacttttgtttaagaactgtgctgtgatcactgtattaattttggtttatcttggcatatatccttcagtttgtttttatttttaatttttcctttttttccgattaggctttggtcagcatttttcatttaaagaaaagtaacactcccatccactcataagcttggtacaaaaacttctctggcagttacttttgaagcttcactctgctttctgtataaagggcagtctgtggtcacgcaagactttaaaaaaaaaaaaaaaaaaaaaaaaaaaaaaaaaaaaaacttttccaggcagcttcatgatgtgcaggcagtagccagacagggtcatgggaagggggccctgtgcttctaaactgagtggttgctggttagtttggtattcaaaagaggataaaaatctggtagattagttcattctcagcatgtgtagctagacatgagtaaagataacagcatgagaaactgttagtacgcatacctcagttcaaacctttagggaatgattaaaatttaaaaaaaaaacatttcactcagttgcacttagtcgtatgtcttgcatgcttagtctaaagactgtagcaaaaaaaaaaaaaaagaaaaattagattttacatatctttgcaggtatcacagccttgcagaagaaccaactgaaaaaaaaattctcaggctttacagcaagcaaacttcactatgatttttacaattctgattctgtatcccctgggggttatcccagttgcttctttaggatggggtttattacgttgtacatatatcccgatgtgtctgtgtgaatctttgtcttttttgggggagggcagagggcggttctttttttagatattgttcctaaaaaggaataaatgcatacacctgtttgtcaaaacacctttgctttttgtgcaactgctttatattaacgatactaaaaaaaaatagctttggaaaaaaaactactgtatgtaacggaattgcagaatatgctgcacatgtattttatttagttatccttgctttaagaatattggatgacatttcctgacatgtgggagggagaaactccctaactttttttttctgcttttaaactgtaacatagttgaagatttcttttttctgttctcattgattggagcattttgtacaggttttgtgtgtgtgtgtgtgtgtgtgtgcgcgcgtgcgtgtgtgttaatctgttttttgatacattcctatcccttgtgtttatcctaccactgccttcctggctatcttaaacaagttcatacatttgaaaagaaaaaaaaatgttgtttaaaaaatgttttctcctgctgcagtaaatattttgcatgatgaaattccagggtcacacttttccaagtttatcagtgaagtagtgattaacaatggggagtgtcaaaactattgaacttttgtataaaaaaaaaaaaactttacaaggtgccaagatgtaaagaaaatctgttactttttttttctcaaagaaaagcatacattagggaggtagtcccgtgtgtcagacaaatgcactgtcaggaatgaggatccaacctacctgtccctagagtccgtcttgtaagatgagttaggctgccccttggaccagccacaaaatggaatatcaaggcttatgtacatacgtgaagagttaccaccagtcctgccacctttggacagctctaacaccatccccagcatccagtcagacctagtaaagaaaaccttggattcttaacccaagataggctgtaaatcactagcttttttttcctcatgaaaaaaaatagagttaaaaaatatttcctctcttttccatattccagctgaactccgtttccaaaggcacaaagaagagtgtgcttattcagattttgaatctttttggtaccttttggttaatgacatagcctcctgaaattctggatgtcttcaaagtcagttttgcttctttatcctgaaaatcagatttacaatgctgaaggcatttcttgggcccagtgtagctcacgcaatctctgctacccataagccttgatgaagatgatacagtccggactgtgagcatggtgcttcatgtatatgtgctgccagtaacaagaatttttttgttttgttttgttttgttttgataaggcataaaagaaactcattccttgacatcaactgtaattccatcattccatgtctgcggatacagacaataaaaaaaatgttgtgtagtcagtactaattactgacattataagcattctcaaatgcaataaaaatgctggttgttcacgctggtagtaaaagttgccacagcctaagtttgtttcc

SEQ ID NO: 325383 - DNA, 3874 bp, Homo sapiens
  misc_feature (8)..(8): n is a, c, g, or t
  misc_feature (21)..(21): n is a, c, g, or t
  misc_feature (37)..(37): n is a, c, g, or t
  misc_feature (350)..(350): n is a, c, g, or t
gccctggngctaagccgtccntgtgtgatgaataggntattatacaaagctgaatgtcatttctcgtttgtagctttctgtcactcattccatcttccttcagacatcaccacgtttctctaaagtcagaaaacattccgttttggtctttttcaaaaaggtcccaaatgctgcactctacacatgaaggccctctcacacagacgtgacgtcctgccagaaagagaatgaatgacagaaaaaaaaaagagagacaaactctaggaacaatgccgattcattccacgcagcagtattgggggtggttcgggggaggggtgtttcggattttctttttttcttttcttttntttttttttttttgcagcaaccattaataaatgccaccacattctaccagcacaaggaaacataggcagcactgaaaaaaaaaaaaaaagctcatattaattagactgacaatatggccttggaaggctctcccttgtggaaccaagttgccatgggccttgggtgctctgcgataacgggtgtgggttggttttgtttgcaaaatggccaaaaaaaaaaaccggcttccccgagcagctgccctgaaagtaggggtggcggcggcggcgctgagtttatacattagttcagacctacttggtggcattaaactgtttgaatgcaaattcgatttcagattgaacttgttaagggagttaacgagggctgagttcagcaaatgctaaagtgttaatttcaaatatgcaaatttggtactgcagtttgttatgcaatattatatcaccaacccagtatcacaaaaactcatagaagatatcatgtaggccctgggctttgggggggtcccaaacatggtatgcagaaatgtgatggttacaggtcagtacaacctcagtccttagaacccctccacacttcagctctgcacccactttcctgtcatttatttatataggactgtagttttttttagttcgagagcctttcgaagcttaatttatattctttctttgtaccttttttctaaaattaccaaagatattacacaaaggtaaattatgttctctgttttatgctttatctgatgaagccaaatatcctcttattgttgatcaaaggaggcaaaagaatttagaggcaaatgacaagcgataggctattgcaacctgagaaagagaactgctccttcatcgtaaatttagaagaccaagtagataatggaaccaaagttgttacttttttctagtagttatttttcctttttctttttgtgtacctctacagagaccaaaactcattctcttaaagagattttatggggctactgcagataaaaataggacacaatattaaaggagctacagaaggaagggagtcccatctcaaaaaaaaaatgaatgtatgccactgcaattagagtatccaataaaggagacagtttagagtcaggacagaaaagcttccataattgaactagattacataatagtatttctagaaaaagagatatttttagattgtatgccacttttgtttaagaactgtgctgtgatcactgtattaattttggtttatcttggcatatatccttcagtttgtttttatttttaatttttcctttttttccgattaggctttggtcagcatttttcatttaaagaaaagtaacactcccatccactcataagcttggtacaaaaacttctctggcagttacttttgaagcttcactctgctttctgtataaagggcagtctgtggtcacgcaagactttaaaaaaaaaaaaaaaaaaaaaaaaaaaaaaaaaaaaaacttttccaggcagcttcatgatgtgcaggcagtagccagacagggtcatgggaagggggccctgtgcttctaaactgagtggttgctggttagtttggtattcaaaagaggataaaaatctggtagattagttcattctcagcatgtgtagctagacatgagtaaagataacagcatgagaaactgttagtacgcatacctcagttcaaacctttagggaatgattaaaatttaaaaaaaaaacatttcactcagttgcacttagtcgtatgtcttgcatgcttagtctaaagactgtagcaaaaaaaaaaaaaaagaaaaattagattttacatatctttgcaggtatcacagccttgcagaagaaccaactgaaaaaaaaattctcaggctttacagcaagcaaacttcactatgatttttacaattctgattctgtatcccctgggggttatcccagttgcttctttaggatggggtttattacgttgtacatatatcccgatgtgtctgtgtgaatctttgtcttttttgggggagggcagagggcggttctttttttagatattgttcctaaaaaggaataaatgcatacacctgtttgtcaaaacacctttgctttttgtgcaactgctttatattaacgatactaaaaaaaaatagctttggaaaaaaaactactgtatgtaacggaattgcagaatatgctgcacatgtattttatttagttatccttgctttaagaatattggatgacatttcctgacatgtgggagggagaaactccctaactttttttttctgcttttaaactgtaacatagttgaagatttcttttttctgttctcattgattggagcattttgtacaggttttgtgtgtgtgtgtgtgtgtgtgtgcgcgcgtgcgtgtgtgttaatctgttttttgatacattcctatcccttgtgtttatcctaccactgccttcctggctatcttaaacaagttcatacatttgaaaagaaaaaaaaatgttgtttaaaaaatgttttctcctgctgcagtaaatattttgcatgatgaaattccagggtcacacttttccaagtttatcagtgaagtagtgattaacaatggggagtgtcaaaactattgaacttttgtataaaaaaaaaaaaactttacaaggtgccaagatgtaaagaaaatctgttactttttttttctcaaagaaaagcatacattagggaggtagtcccgtgtgtcagacaaatgcactgtcaggaatgaggatccaacctacctgtccctagagtccgtcttgtaagatgagttaggctgccccttggaccagccacaaaatggaatatcaaggcttatgtacatacgtgaagagttaccaccagtcctgccacctttggacagctctaacaccatccccagcatccagtcagacctagtaaagaaaaccttggattcttaacccaagataggctgtaaatcactagcttttttttcctcatgaaaaaaaatagagttaaaaaatatttcctctcttttccatattccagctgaactccgtttccaaaggcacaaagaagagtgtgcttattcagattttgaatctttttggtaccttttggttaatgacatagcctcctgaaattctggatgtcttcaaagtcagttttgcttctttatcctgaaaatcagatttacaatgctgaaggcatttcttgggcccagtgtagctcacgcaatctctgctacccataagccttgatgaagatgatacagtccggactgtgagcatggtgcttcatgtatatgtgctgccagtaacaagaatttttttgttttgttttgttttgttttgataaggcataaaagaaactcattccttgacatcaactgtaattccatcattccatgtctgcggatacagacaataaaaaaaatgttgtgtagtcagtactaattactgacattataagcattctcaaatgcaataaaaatgctggttgttcacgctggtagtaaaagttgccacagcctaagtttgtttcc

SEQ ID NO: 325384 - DNA, 3276 bp, Homo sapiens
cctgagtgcatgggctgatctcccgcaggaacatggtgatgtcttaagagtaactgggagccacaggagagtcactgaggcctggggctgaagagatgtaagacataggggaggagcaccgtgaggctcgtgagtttgcaggtgattcctgggtctggggggctgactccagctgaaatctggggttgtttggagagtagctgggagacccaggagactcccagagagctgggggtgagctgctgggtgatggcagtaggaacatatggtatgcagaaatgtgatggttacaggtcagtacaacctcagtccttagaacccctccacacttcagctctgcacccactttcctgtcatttatttatataggactgtagttttttttagttcgagagcctttcgaagcttaatttatattctttctttgtaccttttttctaaaattaccaaagatattacacaaaggtaaattatgttctctgttttatgctttatctgatgaagccaaatatcctcttattgttgatcaaaggaggcaaaagaatttagaggcaaatgacaagcgataggctattgcaacctgagaaagagaactgctccttcatcgtaaatttagaagaccaagtagataatggaaccaaagttgttacttttttctagtagttatttttcctttttctttttgtgtacctctacagagaccaaaactcattctcttaaagagattttatggggctactgcagataaaaataggacacaatattaaaggagctacagaaggaagggagtcccatctcaaaaaaaaaatgaatgtatgccactgcaattagagtatccaataaaggagacagtttagagtcaggacagaaaagcttccataattgaactagattacataatagtatttctagaaaaagagatatttttagattgtatgccacttttgtttaagaactgtgctgtgatcactgtattaattttggtttatcttggcatatatccttcagtttgtttttatttttaatttttcctttttttccgattaggctttggtcagcatttttcatttaaagaaaagtaacactcccatccactcataagcttggtacaaaaacttctctggcagttacttttgaagcttcactctgctttctgtataaagggcagtctgtggtcacgcaagactttaaaaaaaaaaaaaaaaaaaaaaaaaaaaaaaaaaaaaacttttccaggcagcttcatgatgtgcaggcagtagccagacagggtcatgggaagggggccctgtgcttctaaactgagtggttgctggttagtttggtattcaaaagaggataaaaatctggtagattagttcattctcagcatgtgtagctagacatgagtaaagataacagcatgagaaactgttagtacgcatacctcagttcaaacctttagggaatgattaaaatttaaaaaaaaaacatttcactcagttgcacttagtcgtatgtcttgcatgcttagtctaaagactgtagcaaaaaaaaaaaaaaagaaaaattagattttacatatctttgcaggtatcacagccttgcagaagaaccaactgaaaaaaaaattctcaggctttacagcaagcaaacttcactatgatttttacaattctgattctgtatcccctgggggttatcccagttgcttctttaggatggggtttattacgttgtacatatatcccgatgtgtctgtgtgaatctttgtcttttttgggggagggcagagggcggttctttttttagatattgttcctaaaaaggaataaatgcatacacctgtttgtcaaaacacctttgctttttgtgcaactgctttatattaacgatactaaaaaaaaatagctttggaaaaaaaactactgtatgtaacggaattgcagaatatgctgcacatgtattttatttagttatccttgctttaagaatattggatgacatttcctgacatgtgggagggagaaactccctaactttttttttctgcttttaaactgtaacatagttgaagatttcttttttctgttctcattgattggagcattttgtacaggttttgtgtgtgtgtgtgtgtgtgtgtgcgcgcgtgcgtgtgtgttaatctgttttttgatacattcctatcccttgtgtttatcctaccactgccttcctggctatcttaaacaagttcatacatttgaaaagaaaaaaaaatgttgtttaaaaaatgttttctcctgctgcagtaaatattttgcatgatgaaattccagggtcacacttttccaagtttatcagtgaagtagtgattaacaatggggagtgtcaaaactattgaacttttgtataaaaaaaaaaaaactttacaaggtgccaagatgtaaagaaaatctgttactttttttttctcaaagaaaagcatacattagggaggtagtcccgtgtgtcagacaaatgcactgtcaggaatgaggatccaacctacctgtccctagagtccgtcttgtaagatgagttaggctgccccttggaccagccacaaaatggaatatcaaggcttatgtacatacgtgaagagttaccaccagtcctgccacctttggacagctctaacaccatccccagcatccagtcagacctagtaaagaaaaccttggattcttaacccaagataggctgtaaatcactagcttttttttcctcatgaaaaaaaatagagttaaaaaatatttcctctcttttccatattccagctgaactccgtttccaaaggcacaaagaagagtgtgcttattcagattttgaatctttttggtaccttttggttaatgacatagcctcctgaaattctggatgtcttcaaagtcagttttgcttctttatcctgaaaatcagatttacaatgctgaaggcatttcttgggcccagtgtagctcacgcaatctctgctacccataagccttgatgaagatgatacagtccggactgtgagcatggtgcttcatgtatatgtgctgccagtaacaagaatttttttgttttgttttgttttgttttgataaggcataaaagaaactcattccttgacatcaactgtaattccatcattccatgtctgcggatacagacaataaaaaaaatgttgtgtagtcagtactaattactgacattataagcattctcaaatgcaataaaaatgctggttgttcacgctggtagtaaaagttgccacagcctaagtttgtttcc

SEQ ID NO: 325385 - DNA, 2329 bp, Homo sapiens
taaattaatgtattaatgtatattattgactcagccaatgtctaattacccttaaatttttttctgggggagaaaacccatccttcttcttttttttttgaggctttgaattttctatttgtgaatctgtccttttatttgaatataattttttaaattgcatttattttgttttatgatcaagtgaaatttatggaaaaatatactaattaaatcatcctttgttagctttaaatcaaatagattattgtacataataaagtttatagtttatgataaatgtattcttttaaaactatgggatgatccagttcttctctagttgtctggaggacttttgtgtttcaggctattgagtgaatgaattagctaatgaatactttggtttaacttagcaaaggagacacaaaataatctaacatggcactatagcatttattgctaattttagaaggaaaatgattttgatttctgtcatttatatatacaatattttatgaatgggatagtacaaaataatcatttgtaaggtccaggatgtgtttctgttttcagaaaaaaaggaccatttactccatctatttgatggtatacttgttccttacagtaatctcattttttggatctaaacattttctttgacctaccacagtgttgtcagaaaatggttctgcagtggcttatacctgtaagtcctaatataatgcaatgtgggtatattattttcaagcttaaaaggacctttcagttttattagtggggaggagtacagagttacaattttgtgctttatttggctgccttccgagcggacgtggatgcagctactctagctcgcattgacctggagcgcagaattgaatctctcaacgaggagatcgcgttccttaagaaagtgcatgaagaggagatccgtgagttgcaggctcagcttcaggaacagcaggtccaggtggagatggacatgtctaagccagacctcactgccgccctcagggacatccgggctcagtatgagaccatcgcggctaagaacatttctgaagctgaggagtggtacaagtcgaaggtgtcagacctgacccaggcagccaacaagaacaacgacgccctgcgccaggccaagcaggagatgatggaataccgacaccagatccagtcctacacctgcgagattgacgccctgaagggcactaacgattccctgatgaggcagatgcgggaattggaggaccgatttgccagtgaggccagtggctaccaggacaacattgcgcgcctggaggaggaaatccggcacctcaaggatgagatggcccgccatctgcgcgagtaccaggacctgctcaacgtgaagatggccctggatgtggagattgccacctaccggaagctgctggagggagaggagagccggatcaatctccccatccagacctactctgccctcaacttccgagaaaccagccctgagcaaaggggttctgaggtccataccaagaagacggtgatgatcaagaccatcgagacacgggatggggaggtcgtcagtgaggccacacagcagcagcatgaagtgctctaaagacagagaccctctgccaccagagaccgtcctcacccctgtcctcactgctccctgaagccagccttcttccatcccaggacaccacacccagcctcagtcctcccctcacagcctctgacccctcctcactggccatccctcgtggtccccaacagcgacatagcccatccctgcctggtcacagggcatgccccggccacctctgcggaccccagctgtgagccttggctgttggcagtgagtgagcctggctcttgtgctggatggagcccaggcgggagcggtggccctgtccctcccacctctgtgacctcaggcactagcctttggctctggagacagccccagagcagggtgttgggatactgcagggccaggactgagccccgcagacctccccagcccctagcccaggagagagaaagccaggcaggtagccagggggactagcccctgtggagactggggggcttgaaattgtccccgtggtctcttactttcctttccccagcccagggtggacttagaaagcaggggctacaagagggaatccccgaaggtgctggaggtgggagcaggagattgagaaggagagaaagtgggtgagatgctggagaagagaggagaggagagaggcagagagcggtctcaggctggtgggaggggcgcccacctccccacgccctcccctcccctgctgcaggggctctggagagaaacaataaagagattcacacacaa

SEQ ID NO: 325386 - DNA, 702 bp, Homo sapiens
cccgctcagagccagtttctcccgctcagagccagtttctcccgctcagagccagtttctcccgctcagagccagtttctcccgctcagagccagtttctcccgctcagagccagtttctacacctgcgagattgacgccctcaagggcactaacgattccctgatgaggcagatgcgggaattggaggaccgatttgccagtgaggccagtggctaccaggacaacattgcgcgcctggaggaggaaatccggcacctcaaggatgagatggcccgccatctgcgcgagtaccaggacctgctcaacgtgaagatggccctggatgtggagattgccacctaccggaagctgctggagggagaggagagccggatcaatctccccatccagacctactctgccctcaacttccgagaaaccagccctgagcaaaggggttctgaggtccataccaagaagacggtgatgatcaagaccatcgagacacgggatggggaggtcgtcagtgaggccacacagcagcagcatgaagtgctctaaagacagagaccctctgccaccagagaccgtcctcacccctgtcctcactgctccctgaagccagccttcttccatcccaggacaccacacccagcctcagtcctcccctcaccctgctgcaggggctctggagagaaacaataaagagattcacacacaa

SEQ ID NO: 325387 - DNA, 1956 bp, Homo sapiens
aggggaggggaggcgggggctgatgtcaggagggatacaaatagtgccgacggctgggggccctgtctcccctcgccgcatccactctccggccggccgcctgcccgccgcctcctccgtgcgcccgccagcctcgcccgcgccgtcaccatgagccaggcctactcgtccagccagcgcttcctggagcagcagaacgcggcgctcgccgccgaagtgaaccggctcaagggccgcgagccgacgcgagtggccgagctctacgaggaggagctgcgggagctgcggcgccaggtggaggtgctcactaaccagcgcgcgcgcgtcgacgtcgagcgcgacaacctgctcgacgacctgcagcggctcaaggccaagctgcaggaggagattcagttgaaggaagaagcagagaacaatttggctgccttccgagcggacgtggatgcagctactctagctcgcattgacctggagcgcagaattgaatctctcaacgaggagatcgcgttccttaagaaagtgcatgaagaggagatccgtgagttgcaggctcagcttcaggaacagcaggtccaggtggagatggacatgtctaagccagacctcactgccgccctcagggacatccgggctcagtatgagaccatcgcggctaagaacatttctgaagctgaggagtggtacaagtcgaaggtgtcagacctgacccaggcagccaacaagaacaacgacgccctgcgccaggccaagcaggagatgatggaataccgacaccagatccagtcctacacctgcgagattgacgccctgaagggcactaacgattccctgatgaggcagatgcgggaattggaggaccgatttgccagtgaggccagtggctaccaggacaacattgcgcgcctggaggaggaaatccggcacctcaaggatgagatggcccgccatctgcgcgagtaccaggacctgctcaacgtgaagatggccctggatgtggagattgccacctaccggaagctgctggagggagaggagagccggatcaatctccccatccagacctactctgccctcaacttccgagaaaccagccctgagcaaaggggttctgaggtccataccaagaagacggtgatgatcaagaccatcgagacacgggatggggaggtcgtcagtgaggccacacagcagcagcatgaagtgctctaaagacagagaccctctgccaccagagaccgtcctcacccctgtcctcactgctccctgaagccagccttcttccatcccaggacaccacacccagcctcagtcctcccctcacagcctctgacccctcctcactggccatccctcgtggtccccaacagcgacatagcccatccctgcctggtcacagggcatgccccggccacctctgcggaccccagctgtgagccttggctgttggcagtgagtgagcctggctcttgtgctggatggagcccaggcgggagcggtggccctgtccctcccacctctgtgacctcaggcactagcctttggctctggagacagccccagagcagggtgttgggatactgcagggccaggactgagccccgcagacctccccagcccctagcccaggagagagaaagccaggcaggtagccagggggactagcccctgtggagactggggggcttgaaattgtccccgtggtctcttactttcctttccccagcccagggtggacttagaaagcaggggctacaagagggaatccccgaaggtgctggaggtgggagcaggagattgagaaggagagaaagtgggtgagatgctggagaagagaggagaggagagaggcagagagcggtctcaggctggtgggaggggcgcccacctccccacgccctcccctcccctgctgcaggggctctggagagaaacaataaagagattcacacacaa

SEQ ID NO: 325388 - DNA, 1286 bp, Homo sapiens
cccgctcagagccagtttctcccgctcagagccagtttctcccgctcagagccagtttctcccgctcagagccagtttctcccgctcagagccagtttctcccgctcagagccagtttctacacctgcgagattgacgccctcaagggcactaacgattccctgatgaggcagatgcgggaattggaggaccgatttgccagtgaggccagtggctaccaggacaacattgcgcgcctggaggaggaaatccggcacctcaaggatgagatggcccgccatctgcgcgagtaccaggacctgctcaacgtgaagatggccctggatgtggagattgccacctaccggaagctgctggagggagaggagagccggatcaatctccccatccagacctactctgccctcaacttccgagaaaccagccctgagcaaaggggttctgaggtccataccaagaagacggtgatgatcaagaccatcgagacacgggatggggaggtcgtcagtgaggccacacagcagcagcatgaagtgctctaaagacagagaccctctgccaccagagaccgtcctcacccctgtcctcactgctccctgaagccagccttcttccatcccaggacaccacacccagcctcagtcctcccctcacagcctctgacccctcctcactggccatccctcgtggtccccaacagcgacatagcccatccctgcctggtcacagggcatgccccggccacctctgcggaccccagctgtgagccttggctgttggcagtgagtgagcctggctcttgtgctggatggagcccaggcgggagcggtggccctgtccctcccacctctgtgacctcaggcactagcctttggctctggagacagccccagagcagggtgttgggatactgcagggccaggactgagccccgcagacctccccagcccctagcccaggagagagaaagccaggcaggtagccagggggactagcccctgtggagactggggggcttgaaattgtccccgtggtctcttactttcctttccccagcccagggtggacttagaaagcaggggctacaagagggaatccccgaaggtgctggaggtgggagcaggagattgagaaggagagaaagtgggtgagatgctggagaagagaggagaggagagaggcagagagcggtctcaggctggtgggaggggcgcccacctccccacgccctcccctcccctgctgcaggggctctggagagaaacaataaagagattcacacacaa

SEQ ID NO: 325389 - DNA, 960 bp, Homo sapiens
  misc_feature (46)..(46): n is a, c, g, or t
gagccggtacctttcaagcggagatgctggagggagaggagagccnggatcaatctccccatccagacctactctgccctcaacttccgagaaaccagccctgagcaaaggggttctgaggtccataccaagaagacggtgatgatcaagaccatcgagacacgggatggggaggtcgtcagtgaggccacacagcagcagcatgaagtgctctaaagacagagaccctctgccaccagagaccgtcctcacccctgtcctcactgctccctgaagccagccttcttccatcccaggacaccacacccagcctcagtcctcccctcacagcctctgacccctcctcactggccatccctcgtggtccccaacagcgacatagcccatccctgcctggtcacagggcatgccccggccacctctgcggaccccagctgtgagccttggctgttggcagtgagtgagcctggctcttgtgctggatggagcccaggcgggagcggtggccctgtccctcccacctctgtgacctcaggcactagcctttggctctggagacagccccagagcagggtgttgggatactgcagggccaggactgagccccgcagacctccccagcccctagcccaggagagagaaagccaggcaggtagccagggggactagcccctgtggagactggggggcttgaaattgtccccgtggtctcttactttcctttccccagcccagggtggacttagaaagcaggggctacaagagggaatccccgaaggtgctggaggtgggagcaggagattgagaaggagagaaagtgggtgagatgctggagaagagaggagaggagagaggcagagagcggtctcaggctggtgggaggggcgcccacctccccacgccctcccctcccctgctgcaggggctctggagagaaacaataaagagattcacacacaa

SEQ ID NO: 325390 - DNA, 2291 bp, Homo sapiens
  misc_feature (2263)..(2263): n is a, c, g, or t
aggggaggggaggcgggggctgatgtcaggagggatacaaatagtgccgacggctgggggccctgtctcccctcgccgcatccactctccggccggccgcctgcccgccgcctcctccgtgcgcccgccagcctcgcccgcgccgtcaccatgagccaggcctactcgtccagccagcgcgtgtcctcctaccgccgcaccttcggcggggccccgggcttcccgctcggctccccgctgagctcgcccgtgttcccgcgggcgggtttcggctctaagggctcctccagctcggtgacgtcccgcgtgtaccaggtgtcgcgcacgtcgggcggggccgggggcctggggtcgctgcgggccagccggctggggaccacccgcacgccctcctcctacggcgcaggcgagctgctggacttctcactggccgacgcggtgaaccaggagtttctgaccacgcgcaccaacgagaaggtggagctgcaggagctcaatgaccgcttcgccaactacatcgagaaggtgcgcttcctggagcagcagaacgcggcgctcgccgccgaagtgaaccggctcaagggccgcgagccgacgcgagtggccgagctctacgaggaggagctgcgggagctgcggcgccaggtggaggtgctcactaaccagcgcgcgcgcgtcgacgtcgagcgcgacaacctgctcgacgacctgcagcggctcaaggccaagctgcaggaggagattcagttgaaggaagaagcagagaacaatttggctgccttccgagcggacgtggatgcagctactctagctcgcattgacctggagcgcagaattgaatctctcaacgaggagatcgcgttccttaagaaagtgcatgaagaggagatccgtgagttgcaggctcagcttcaggaacagcaggtccaggtggagatggacatgtctaagccagacctcactgccgccctcagggacatccgggctcagtatgagaccatcgcggctaagaacatttctgaagctgaggagtggtacaagtcgaaggtgtcagacctgacccaggcagccaacaagaacaacgacgccctgcgccaggccaagcaggagatgatggaataccgacaccagatccagtcctacacctgcgagattgacgccctgaagggcactaacgattccctgatgaggcagatgcgggaattggaggaccgatttgccagtgaggccagtggctaccaggacaacattgcgcgcctggaggaggaaatccggcacctcaaggatgagatggcccgccatctgcgcgagtaccaggacctgctcaacgtgaagatggccctggatgtggagattgccacctaccggaagctgctggagggagaggagagccggatcaatctccccatccagacctactctgccctcaacttccgagaaaccagccctgagcaaaggggttctgaggtccataccaagaagacggtgatgatcaagaccatcgagacacgggatggggaggtcgtcagtgaggccacacagcagcagcatgaagtgctctaaagacagagaccctctgccaccagagaccgtcctcacccctgtcctcactgctccctgaagccagccttcttccatcccaggacaccacacccagcctcagtcctcccctcacagcctctgacccctcctcactggccatccctcgtggtccccaacagcgacatagcccatccctgcctggtcacagggcatgccccggccacctctgcggaccccagctgtgagccttggctgttggcagtgagtgagcctggctcttgtgctggatggagcccaggcgggagcggtggccctgtccctcccacctctgtgacctcaggcactagcctttggctctggagacagccccagagcagggtgttgggatactgcagggccaggactgagccccgcagacctccccagcccctagcccaggagagagaaagccaggcaggtagccagggggactagcccctgtggagactggggggcttgaaattgtccccgtggtctcttactttcctttccccagcccagggtggacttagaaagcaggggctacaagagggaatccccgaaggtgctggaggtgggagcaggagattgagaaggagagaaagtgggtgagatgctggagaagagaggagaggagagttttagtagcaagcggagcacctacgtccacaacgccctcaccttgacctcggtaacggggctntaggagaagaaatatagaggacaagatg

SEQ ID NO: 325391 - DNA, 1014 bp, Homo sapiens
tcttgaagaagtaacaagcctgtcttgaggggggttggggtctgctagggctctgcccaatgtggccccagatggactcccagcccctggtatagcccagcctggacttggtcaggctgagtgtgcgatggaccctgttacagaaaaaccagccctgagcaaaggggttctgaggtccataccaagaagacggtgatgatcaagaccatcgagacacgggatggggaggtcgtcagtgaggccacacagcagcagcatgaagtgctctaaagacagagaccctctgccaccagagaccgtcctcacccctgtcctcactgctccctgaagccagccttcttccatcccaggacaccacacccagcctcagtcctcccctcacagcctctgacccctcctcactggccatccctcgtggtccccaacagcgacatagcccatccctgcctggtcacagggcatgccccggccacctctgcggaccccagctgtgagccttggctgttggcagtgagtgagcctggctcttgtgctggatggagcccaggcgggagcggtggccctgtccctcccacctctgtgacctcaggcactagcctttggctctggagacagccccagagcagggtgttgggatactgcagggccaggactgagccccgcagacctccccagcccctagcccaggagagagaaagccaggcaggtagccagggggactagcccctgtggagactggggggcttgaaattgtccccgtggtctcttactttcctttccccagcccagggtggacttagaaagcaggggctacaagagggaatccccgaaggtgctggaggtgggagcaggagattgagaaggagagaaagtgggtgagatgctggagaagagaggagaggagagaggcagagagcggtctcaggctggtgggaggggcgcccacctccccacgccctcccctcccctgctgcaggggctctggagagaaacaataaagagattcacacacaa

SEQ ID NO: 325392 - DNA, 784 bp, Homo sapiens
ggtactgctcttgggggaggtgggagcaggagattgagagggagagaaagtgggtgagatgctggagaaagagaggagaggagaagaggcagagagcggtccagccttcttccatcccaggacaccacacccagcctcagtcctcccctcacagcctctgacccctcctcactggccatccctcgtggtccccaacagcgacatagcccatccctgcctggtcacagggcatgccccggccacctctgcggaccccagctgtgagccttggctgttggcagtgagtgagcctggctcttgtgctggatggagcccaggcgggagcggtggccctgtccctcccacctctgtgacctcaggcactagcctttggctctggagacagccccagagcagggtgttgggatactgcagggccaggactgagccccgcagacctccccagcccctagcccaggagagagaaagccaggcaggtagccagggggactagcccctgtggagactggggggcttgaaattgtccccgtggtctcttactttcctttccccagcccagggtggacttagaaagcaggggctacaagagggaatccccgaaggtgctggaggtgggagcaggagattgagaaggagagaaagtgggtgagatgctggagaagagaggagaggagagaggcagagagcggtctcaggctggtgggaggggcgcccacctccccacgccctcccctcccctgctgcaggggctctggagagaaacaataaagagattcacacacaa

SEQ ID NO: 325393 - DNA, 688 bp, Homo sapiens
gactctctcctctcctctgcttctccagcatctcagccactttctctccttctcacagcctctgacccctcctcactggccatccctcgtggtccccaacagcgacatagcccatccctgcctggtcacagggcatgccccggccacctctgcggaccccagctgtgagccttggctgttggcagtgagtgagcctggctcttgtgctggatggagcccaggcgggagcggtggccctgtccctcccacctctgtgacctcaggcactagcctttggctctggagacagccccagagcagggtgttgggatactgcagggccaggactgagccccgcagacctccccagcccctagcccaggagagagaaagccaggcaggtagccagggggactagcccctgtggagactggggggcttgaaattgtccccgtggtctcttactttcctttccccagcccagggtggacttagaaagcaggggctacaagagggaatccccgaaggtgctggaggtgggagcaggagattgagaaggagagaaagtgggtgagatgctggagaagagaggagaggagagaggcagagagcggtctcaggctggtgggaggggcgcccacctccccacgccctcccctcccctgctgcaggggctctggagagaaacaataaagagattcacacacaa

SEQ ID NO: 325394 - DNA, 2091 bp, Homo sapiens
aggggaggggaggcgggggctgatgtcaggagggatacaaatagtgccgacggctgggggccctgtctcccctcgccgcatccactctccggccggccgcctgcccgccgcctcctccgtgcgcccgccagcctcgcccgcgccgtcaccatgagccaggcctactcgtccagccagcgcgtgtcctcctaccgccgcaccttcggcggggccccgggcttcccgctcggctccccgctgagctcgcccgtgttcccgcgggcgggtttcggctctaagggctcctccagctcggtgacgtcccgcgtgtaccaggtgtcgcgcacgtcgggcggggccgggggcctggggtcgctgcgggccagccggctggggaccacccgcacgccctcctcctacggcgcaggcgagctgctggacttctcactggccgacgcggtgaaccaggagtttctgaccacgcgcaccaacgagaaggtggagctgcaggagctcaatgaccgcttcgccaactacatcgagaaggtgcgcttcctggagcagcagaacgcggcgctcgccgccgaagtgaaccggctcaagggccgcgagccgacgcgagtggccgagctctacgaggaggagctgcgggagctgcggcgccaggtggaggtgctcactaaccagcgcgcgcgcgtcgacgtcgagcgcgacaacctgctcgacgacctgcagcggctcaaggccaagctgcaggaggagattcagttgaaggaagaagcagagaacaatttggctgccttccgagcggacgtggatgcagctactctagctcgcattgacctggagcgcagaattgaatctctcaacgaggagatcgcgttccttaagaaagtgcatgaagaggagatccgtgagttgcaggctcagcttcaggaacagcaggtccaggtggagatggacatgtctaagccagacctcactgccgccctcagggacatccgggctcagtatgagaccatcgcggctaagaacatttctgaagctgaggagtggtacaagtcgaaggtgtcagacctgacccaggcagccaacaagaacaacgacgccctgcgccaggccaagcaggagatgatggaataccgacaccagatccagtcctacacctgcgagattgacgccctgaagggcactaacgattccctgatgaggcagatgcgggaattggaggaccgatttgccagtgaggccagtggctaccaggacaacattgcgcgcctggaggaggaaatccggcacctcaaggatgagatggcccgccatctgcgcgagtaccaggacctgctcaacgtgaagatggccctggatgtggagattgccacctaccggaagctgctggagggagaggagagccggatcaatctccccatccagacctactctgccctcaacttccgagaaaccagccctgagcaaaggggttctgaggtccataccaagaagacggtgatgatcaagaccatcgagacacgggatggggaggtcgtcagtgaggccacacagcagcagcatgaagtgctctaaagacagagaccctctgccaccagagaccgtcctcacccctgtcctcactgctccctgaagccagccttcttccatcccaggacaccacacccagcctcagtcctcccctcacagcctctgacccctcctcactggccatccctcgtggtccccaacagcgacatagcccatccctgcctggtcacagggcatgccccggccacctctgcggaccccagctgtgagccttggctgttggcagtgagtgagcctggctcttgtgctggatggagcccaggcgggagcggtggccctgtccctcccacctctgtgacctcaggcactagcctttggctctggagacagccccagagcagggtgttgggatactgcagggccaggactgagccccgcagacctccccagcccctagcccaggagaggcagagagcggtctcaggctggtgggaggggcgcccacctccccacgccctcccctcccctgctgcaggggctctggagagaaacaataaagagattcacacacaa

SEQ ID NO: 325395 - DNA, 1673 bp, Homo sapiens
aggggaggggaggcgggggctgatgtcaggagggatacaaatagtgccgacggctgggggccctgtctcccctcgccgcatccactctccggccggccgcctgcccgccgcctcctccgtgcgcccgccagcctcgcccgcgccgtcaccatgagccaggcctactcgtccagccagcgcgtgtcctcctaccgccgcaccttcggcggggccccgggcttcccgctcggctccccgctgagctcgcccgtgttcccgcgggcgggtttcggctctaagggctcctccagctcggtgacgtcccgcgtgtaccaggtgtcgcgcacgtcgggcggggccgggggcctggggtcgctgcgggccagccggctggggaccacccgcacgccctcctcctacggcgcaggcgagctgctggacttctcactggccgacgcggtgaaccaggagtttctgaccacgcgcaccaacgagaaggtggagctgcaggagctcaatgaccgcttcgccaactacatcgagaaggtgcgcttcctggagcagcagaacgcggcgctcgccgccgaagtgaaccggctcaagggccgcgagccgacgcgagtggccgagctctacgaggaggagctgcgggagctgcggcgccaggtggaggtgctcactaaccagcgcgcgcgcgtcgacgtcgagcgcgacaacctgctcgacgacctgcagcggctcaaggccaagctgcaggaggagattcagttgaaggaagaagcagagaacaatttggctgccttccgagcggacgtggatgcagctactctagctcgcattgacctggagcgcagaattgaatctctcaacgaggagatcgcgttccttaagaaagtgcatgaagaggagatccgtgagttgcaggctcagcttcaggaacagcaggtccaggtggagatggacatgtctaagccagacctcactgccgccctcagggacatccgggctcagtatgagaccatcgcggctaagaacatttctgaagctgaggagtggtacaagtcgaaggtgtcagacctgacccaggcagccaacaagaacaacgacgccctgcgccaggccaagcaggagatgatggaataccgacaccagatccagtcctacacctgcgagattgacgccctgaagggcactaacgattccctgatgaggcagatgcgggaattggaggaccgatttgccagtgaggccagtggctaccaggacaacattgcgcgcctggaggaggaaatccggcacctcaaggatgagatggcccgccatctgcgcgagtaccaggacctgctcaacgtgaagatggccctggatgtggagattgccacctaccggaagctgctggagggagaggagagccggatcaatctccccatccagacctactctgccctcaacttccgagaaaccagccctgagcaaaggggttctgaggtccataccaagaagacggtgatgatcaagaccatcgagacacgggatggggaggtcgtcagtgaggccacacagcagcagcatgaagtgctctaaagaggcagagagcggtctcaggctggtgggaggggcgcccacctccccacgccctcccctcccctgctgcaggggctctggagagaaacaataaagagattcacacacaa

SEQ ID NO: 325396 - DNA, 1461 bp, Homo sapiens
aggggaggggaggcgggggctgatgtcaggagggatacaaatagtgccgacggctgggggccctgtctcccctcgccgcatccactctccggccggccgcctgcccgccgcctcctccgtgcgcccgccagcctcgcccgcgccgtcaccatgagccaggcctactcgtccagccagcgcgtgtcctcctaccgccgcaccttcggcggggccccgggcttcccgctcggctccccgctgagctcgcccgtgttcccgcgggcgggtttcggctctaagggctcctccagctcggtgacgtcccgcgtgtaccaggtgtcgcgcacgtcgggcggggccgggggcctggggtcgctgcgggccagccggctggggaccacccgcacgccctcctcctacggcgcaggcgagctgctggacttctcactggccgacgcggtgaaccaggagtttctgaccacgcgcaccaacgagaaggtggagctgcaggagctcaatgaccgcttcgccaactacatcgagaaggtgcgcttcctggagcagcagaacgcggcgctcgccgccgaagtgaaccggctcaagggccgcgagccgacgcgagtggccgagctctacgaggaggagctgcgggagctgcggcgccaggtggaggtgctcactaaccagcgcgcgcgcgtcgacgtcgagcgcgacaacctgctcgacgacctgcagcggctcaaggccaagctgcaggaggagattcagttgaaggaagaagcagagaacaatttggctgccttccgagcggacgtggatgcagctactctagctcgcattgacctggagcgcagaattgaatctctcaacgaggagatcgcgttccttaagaaagtgcatgaagaggagatccgtgagttgcaggctcagcttcaggaacagcaggtccaggtggagatggacatgtctaagccagacctcactgccgccctcagggacatccgggctcagtatgagaccatcgcggctaagaacatttctgaagctgaggagtggtacaagtcgaaggtgtcagacctgacccaggcagccaacaagaacaacgacgccctgcgccaggccaagcaggagatgatggaataccgacaccagatccagtcctacacctgcgagattgacgccctgaagggcactaacgattccctgatgaggcagatgcgggaattggaggaccgatttgccagtgaggccagtggctaccaggacaacattgcgcgcctggaggaggaaatccggcacctcaaggatgagatggcccgccatctgcgcgagtaccaggacctgctcaacgtgaagatggccctggatgtggagattgccacctaccggaagctgctggagggagaggagagccggatcaatctccccatccagacctactctgccctcaacttccgaggtgagtgtctgctggcaggcgga

SEQ ID NO: 325397 - DNA, 1502 bp, Homo sapiens
aggggaggggaggcgggggctgatgtcaggagggatacaaatagtgccgacggctgggggccctgtctcccctcgccgcatccactctccggccggccgcctgcccgccgcctcctccgtgcgcccgccagcctcgcccgcgccgtcaccatgagccaggcctactcgtccagccagcgcgtgtcctcctaccgccgcaccttcggcggggccccgggcttcccgctcggctccccgctgagctcgcccgtgttcccgcgggcgggtttcggctctaagggctcctccagctcggtgacgtcccgcgtgtaccaggtgtcgcgcacgtcgggcggggccgggggcctggggtcgctgcgggccagccggctggggaccacccgcacgccctcctcctacggcgcaggcgagctgctggacttctcactggccgacgcggtgaaccaggagtttctgaccacgcgcaccaacgagaaggtggagctgcaggagctcaatgaccgcttcgccaactacatcgagaaggtgcgcttcctggagcagcagaacgcggcgctcgccgccgaagtgaaccggctcaagggccgcgagccgacgcgagtggccgagctctacgaggaggagctgcgggagctgcggcgccaggtggaggtgctcactaaccagcgcgcgcgcgtcgacgtcgagcgcgacaacctgctcgacgacctgcagcggctcaaggccaagctgcaggaggagattcagttgaaggaagaagcagagaacaatttggctgccttccgagcggacgtggatgcagctactctagctcgcattgacctggagcgcagaattgaatctctcaacgaggagatcgcgttccttaagaaagtgcatgaagaggagatccgtgagttgcaggctcagcttcaggaacagcaggtccaggtggagatggacatgtctaagccagacctcactgccgccctcagggacatccgggctcagtatgagaccatcgcggctaagaacatttctgaagctgaggagtggtacaagtcgaaggtgtcagacctgacccaggcagccaacaagaacaacgacgccctgcgccaggccaagcaggagatgatggaataccgacaccagatccagtcctacacctgcgagattgacgccctgaagggcactaacgattccctgatgaggcagatgcgggaattggaggaccgatttgccagtgaggccagtggctaccaggacaacattgcgcgcctggaggaggaaatccggcacctcaaggatgagatggcccgccatctgcgcgagtaccaggacctgctcaacgtgaagatggccctggatgtggagattgccacctaccggaagctgctggagggagaggagagccgaggcagagagcggtctcaggctggtgggaggggcgcccacctccccacgccctcccctcccctgctgcaggggctctggagagaaacaataaagagattcacacacaa

SEQ ID NO: 325398 - DNA, 341 bp, Homo sapiens
gggctccttacccttggtgggggctatggatgtgtctggggggactgtcttccacccagctgtgctggtctaggtccctggctagtggggcaagagagatcctgcggccctggggtggggatggctcagggctgaggctccattctctggctagcacatggttggactgggcttctcttcctccccaggtcgtcagtgaggccacacagcagcagcatgaagtgctctaaagacagagaccctctgccaccagagaccgtcctcacccctgtcctcactgctccctgaagccagccttcttccatcccaggacaccacacccagcctcagtcctcccctca

SEQ ID NO: 325399 - DNA, 2307 bp, Homo sapiens
aggggaggggaggcgggggctgatgtcaggagggatacaaatagtgccgacggctgggggccctgtctcccctcgccgcatccactctccggccggccgcctgcccgccgcctcctccgtgcgcccgccagcctcgcccgcgccgtcaccatgagccaggcctactcgtccagccagcgcgtgtcctcctaccgccgcaccttcggcggggccccgggcttcccgctcggctccccgctgagctcgcccgtgttcccgcgggcgggtttcggctctaagggctcctccagctcggtgacgtcccgcgtgtaccaggtgtcgcgcacgtcgggcggggccgggggcctggggtcgctgcgggccagccggctggggaccacccgcacgccctcctcctacggcgcaggcgagctgctggacttctcactggccgacgcggtgaaccaggagtttctgaccacgcgcaccaacgagaaggtggagctgcaggagctcaatgaccgcttcgccaactacatcgagaaggtgcgcttcctggagcagcagaacgcggcgctcgccgccgaagtgaaccggctcaagggccgcgagccgacgcgagtggccgagctctacgaggaggagctgcgggagctgcggcgccaggtggaggtgctcactaaccagcgcgcgcgcgtcgacgtcgagcgcgacaacctgctcgacgacctgcagcggctcaaggccaagctgcaggaggagattcagttgaaggaagaagcagagaacaatttggctgccttccgagcggacgtggatgcagctactctagctcgcattgacctggagcgcagaattgaatctctcaacgaggagatcgcgttccttaagaaagtgcatgaagaggagatccgtgagttgcaggctcagcttcaggaacagcaggtccaggtggagatggacatgtctaagccagacctcactgccgccctcagggacatccgggctcagtatgagaccatcgcggctaagaacatttctgaagctgaggagtggtacaagtcgaaggtgtcagacctgacccaggcagccaacaagaacaacgacgccctgcgccaggccaagcaggagatgatggaataccgacaccagatccagtcctacacctgcgagattgacgccctgaagggcactaacgattccctgatgaggcagatgcgggaattggaggaccgatttgccagtgaggccagtggctaccaggacaacattgcgcgcctggaggaggaaatccggcacctcaaggatgagatggcccgccatctgcgcgagtaccaggacctgctcaacgtgaagatggccctggatgtggagattgccacctaccggaagctgctggagggagaggagagccggatcaatctccccatccagacctactctgccctcaacttccgagaaaccagccctgagcaaaggggttctgaggtccataccaagaagacggtgatgatcaagaccatcgagacacgggatggggaggtcgtcagtgaggccacacagcagcagcatgaagtgctctaaagacagagaccctctgccaccagagaccgtcctcacccctgtcctcactgctccctgaagccagccttcttccatcccaggacaccacacccagcctcagtcctcccctcacagcctctgacccctcctcactggccatccctcgtggtccccaacagcgacatagcccatccctgcctggtcacagggcatgccccggccacctctgcggaccccagctgtgagccttggctgttggcagtgagtgagcctggctcttgtgctggatggagcccaggcgggagcggtggccctgtccctcccacctctgtgacctcaggcactagcctttggctctggagacagccccagagcagggtgttgggatactgcagggccaggactgagccccgcagacctccccagcccctagcccaggagagagaaagccaggcaggtagccagggggactagcccctgtggagactggggggcttgaaattgtccccgtggtctcttactttcctttccccagcccagggtggacttagaaagcaggggctacaagagggaatccccgaaggtgctggaggtgggagcaggagattgagaaggagagaaagtgggtgagatgctggagaagagaggagaggagagaggcagagagcggtctcaggctggtgggaggggcgcccacctccccacgccctcccctcccctgctgcaggggctctggagagaaacaataaagagattcacacacaa

SEQ ID NO: 325400 - DNA, 2717 bp, Homo sapiens
  misc_feature (2717)..(2717): n is a, c, g, or t
aggggaggggaggcgggggctgatgtcaggagggatacaaatagtgccgacggctgggggccctgtctcccctcgccgcatccactctccggccggccgcctgcccgccgcctcctccgtgcgcccgccagcctcgcccgcgccgtcaccatgagccaggcctactcgtccagccagcgcgtgtcctcctaccgccgcaccttcggcggggccccgggcttcccgctcggctccccgctgagctcgcccgtgttcccgcgggcgggtttcggctctaagggctcctccagctcggtgacgtcccgcgtgtaccaggtgtcgcgcacgtcgggcggggccgggggcctggggtcgctgcgggccagccggctggggaccacccgcacgccctcctcctacggcgcaggcgagctgctggacttctcactggccgacgcggtgaaccaggagtttctgaccacgcgcaccaacgagaaggtggagctgcaggagctcaatgaccgcttcgccaactacatcgagaaggtgcgcttcctggagcagcagaacgcggcgctcgccgccgaagtgaaccggctcaagggccgcgagccgacgcgagtggccgagctctacgaggaggagctgcgggagctgcggcgccaggtggaggtgctcactaaccagcgcgcgcgcgtcgacgtcgagcgcgacaacctgctcgacgacctgcagcggctcaaggccaagctgcaggaggagattcagttgaaggaagaagcagagaacaatttggctgccttccgagcggacgtggatgcagctactctagctcgcattgacctggagcgcagaattgaatctctcaacgaggagatcgcgttccttaagaaagtgcatgaagaggagatccgtgagttgcaggctcagcttcaggaacagcaggtccaggtggagatggacatgtctaagccagacctcactgccgccctcagggacatccgggctcagtatgagaccatcgcggctaagaacatttctgaagctgaggagtggtacaagtcgaaggtgtcagacctgacccaggcagccaacaagaacaacgacgccctgcgccaggccaagcaggagatgatggaataccgacaccagatccagtcctacacctgcgagattgacgccctgaagggcactaacgattccctgatgaggcagatgcgggaattggaggaccgatttgccagtgaggccagtggctaccaggacaacattgcgcgcctggaggaggaaatccggcacctcaaggatgagatggcccgccatctgcgcgagtaccaggacctgctcaacgtgaagatggccctggatgtggagattgccacctaccggaagctgctggagggagaggagagccggatcaatctccccatccagacctactctgccctcaacttccgagaaaccagccctgagcaaaggggttctgaggtccataccaagaagacggtgatgatcaagaccatcgagacacgggatggggaggtcgtcagtgaggccacacagcagcagcatgaagtgctctaaagacagagaccctctgccaccagagaccgtcctcacccctgtcctcactgctccctgaagccagccttcttccatcccaggacaccacacccagcctcagtcctcccctcacagcctctgacccctcctcactggccatccctcgtggtccccaacagcgacatagcccatccctgcctggtcacagggcatgccccggccacctctgcggaccccagctgtgagccttggctgttggcagtgagtgagcctggctcttgtgctggatggagcccaggcgggagcggtggccctgtccctcccacctctgtgacctcaggcactagcctttggctctggagacagccccagagcagggtgttgggatactgcagggccaggactgagccccgcagacctccccagcccctagcccaggagagagaaagccaggcaggtagccagggggactagcccctgtggagactggggggcttgaaattgtccccgtggtctcttactttcctttccccagcccagggtggacttagaaagcaggggctacaagagggaatccccgaaggtgctggaggtgggagcaggagattgagaaggagagaaagtgggtgagatgctggagaagagaggagaggagagaggcagagagcggtctcaggctggtgggaggggcgcccacctccccacgccctcccctcccctgctgcaggggctctggagagaaacaataaagagattcacacacaaaaaaaaaaaaaaaaaaaaaaaaaaaaaaaaaaaaaaaaaaaaaaaaaaaaaaaaaaaaaaaaaaaaaaaagggtgggggggcggcgcgcggggcgccgcggggaggttttgaaacccccgcgggggggcggcggcggcgccccaagagaggagaggagagagaaagagagggagaaaccagggggttacacagagaagacccgcgcgggcgcagaagaaagaggggcggagggatcccacacacaatataaaacaacggccgcgcggggagaaaccacgaggagtgtggcgaggaaaacacccagaagagggggcttctggaggggcgcacaagcggggggatcttaaaacagggggggcacaaagaggggcggcagaaaaaaaatttaccccccccggcggcgggggcn

SEQ ID NO: 325401 - DNA, 1698 bp, Homo sapiens
gcagagtaggtctggatggggagatagatccggctctcctctccctccagcagcttccggtaggtggcaatctccacatccagtgccatcttcacgttgagcaggtcctggtactcgcgcagatggcgggccatctcatccttgaggtgccggatttcctcctccaggcgcgcaatgttgtcctggtagccactggcctcactggcaaatcggtgctccaattcccgcatctgcctcaacgaggagatcgcgttccttaagaaagtgcatgaagaggagatccgtgagttgcaggctcagcttcaggaacagcaggtccaggtggagatggacatgtctaagccagacctcactgccgccctcagggacatccgggctcagtatgagaccatcgcggctaagaacatttctgaagctgaggagtggtacaagtcgaaggtgtcagacctgacccaggcagccaacaagaacaacgacgccctgcgccaggccaagcaggagatgatggaataccgacaccagatccagtcctacacctgcgagattgacgccctgaagggcactaacgattccctgatgaggcagatgcgggaattggaggaccgatttgccagtgaggccagtggctaccaggacaacattgcgcgcctggaggaggaaatccggcacctcaaggatgagatggcccgccatctgcgcgagtaccaggacctgctcaacgtgaagatggccctggatgtggagattgccacctaccggaagctgctggagggagaggagagccggatcaatctccccatccagacctactctgccctcaacttccgagaaaccagccctgagcaaaggggttctgaggtccataccaagaagacggtgatgatcaagaccatcgagacacgggatggggaggtcgtcagtgaggccacacagcagcagcatgaagtgctctaaagacagagaccctctgccaccagagaccgtcctcacccctgtcctcactgctccctgaagccagccttcttccatcccaggacaccacacccagcctcagtcctcccctcacagcctctgacccctcctcactggccatccctcgtggtccccaacagcgacatagcccatccctgcctggtcacagggcatgccccggccacctctgcggaccccagctgtgagccttggctgttggcagtgagtgagcctggctcttgtgctggatggagcccaggcgggagcggtggccctgtccctcccacctctgtgacctcaggcactagcctttggctctggagacagccccagagcagggtgttgggatactgcagggccaggactgagccccgcagacctccccagcccctagcccaggagagagaaagccaggcaggtagccagggggactagcccctgtggagactggggggcttgaaattgtccccgtggtctcttactttcctttccccagcccagggtggacttagaaagcaggggctacaagagggaatccccgaaggtgctggaggtgggagcaggagattgagaaggagagaaagtgggtgagatgctggagaagagaggagaggagagaggcagagagcggtctcaggctggtgggaggggcgcccacctccccacgccctcccctcccctgctgcaggggctctggagagaaacaataaagagattcacacacaa

SEQ ID NO: 325402 - DNA, 2206 bp, Homo sapiens
aggggaggggaggcgggggctgatgtcaggagggatacaaatagtgccgacggctgggggccctgtctcccctcgccgcatccactctccggccggccgcctgcccgccgcctcctccgtgcgcccgccagcctcgcccgcgccgtcaccatgagccaggcctactcgtccagccagcgcgtgtcctcctaccgccgcaccttcggcggggccccgggcttcccgctcggctccccgctgagctcgcccgtgttcccgcgggcgggtttcggctctaagggctcctccagctcggtgacgtcccgcgtgtaccaggtgtcgcgcacgtcgggcggggccgggggcctggggtcgctgcgggccagccggctggggaccacccgcacgccctcctcctacggcgcaggcgagctgctggacttctcactggccgacgcggtgaaccaggagtttctgaccacgcgcaccaacgagaaggtggagctgcaggagctcaatgaccgcttcgccaactacatcgagaaggtgcgcttcctggagcagcagaacgcggcgctcgccgccgaagtgaaccggctcaagggccgcgagccgacgcgagtggccgagctctacgaggaggagctgcgggagctgcggcgccaggtggaggtgctcactaaccagcgcgcgcgcgtcgacgtcgagcgcgacaacctgctcgacgacctgcagcggctcaaggccaagctgcaggaggagattcagttgaaggaagaagcagagaacaatttggctgccttccgagcggacgtggatgcagctactctagctcgcattgacctggagcgcagaattgaatctctcaacgaggagatcgcgttccttaagaaagtgcatgaagaggagatccgtgagttgcaggctcagcttcaggaacagcaggtccaggtggagatggacatgtctaagccagacctcactgccgccctcagggacatccgggctcagtatgagaccatcgcggctaagaacatttctgaagctgaggagtggtacaagtcgaaggtgtcagacctgacccaggcagccaacaagaacaacgacgccctgcgccaggccaagcaggagatgatggaataccgacaccagatccagtcctacacctgcgagattgacgccctgaagggcactaacgattccctgatgaggcagatgcgggaattggaggaccgatttgccagtgaggccagtggctaccaggacaacattgcgcgcctggaggaggaaatccggcacctcaaggatgagatggcccgccatctgcgcgagtaccaggacctgctcaacgtgaagatggccctggatgtggagattgccacctaccggaagctgctggagggagaggagagccggatcaatctccccatccagacctactctgccctcaacttccgagaaaccagccctgagcaaaggggttctgaggtccataccaagaagacggtgatgatcaagaccatcgagacacgggatggggaggtcgtcagtgaggccacacagcagcagcatgaagtgctctaaagacagagaccctctgccaccagagaccgtcctcacccctgtcctcactgctccctgaagccagccttcttccatcccaggacaccacacccagcctcagtcctcccctcacagcctctgacccctcctcactggccatccctcgtggtccccaacagcgacatagcccatccctgcctggtcacagggcatgccccggccacctctgcggaccccagctgtgagcctttggctctggagacagccccagagcagggtgttgggatactgcagggccaggactgagccccgcagacctccccagcccctagcccaggagagagaaagccaggcaggtagccagggggactagcccctgtggagactggggggcttgaaattgtccccgtggtctcttactttcctttccccagcccagggtggacttagaaagcaggggctacaagagggaatccccgaaggtgctggaggtgggagcaggagattgagaaggagagaaagtgggtgagatgctggagaagagaggagaggagagaggcagagagcggtctcaggctggtgggaggggcgcccacctccccacgccctcccctcccctgctgcaggggctctggagagaaacaataaagagattcacacacaa

SEQ ID NO: 325403 - DNA, 1109 bp, Homo sapiens
ggacagacacacacacccctgataaatcacatacactaaacacgcacacaccgcgcatgcacacaccacgagtgcacacacacatcactatccaccgggcacaaagcttttacctgctgctaatcccgtctcggcgttttctcccacaccctcatatttcaaacctactcccggtgtcattggccttcccgtcttctctaggtatggttattcggcgtgtgcaacacgccgaggacccataaaccagccctgagcaaaggggttctgaggtccataccaagaagacggtgatgatcaagaccatcgagacacgggatggggaggtcgtcagtgaggccacacagcagcagcatgaagtgctctaaagacagagaccctctgccaccagagaccgtcctcacccctgtcctcactgctccctgaagccagccttcttccatcccaggacaccacacccagcctcagtcctcccctcacagcctctgacccctcctcactggccatccctcgtggtccccaacagcgacatagcccatccctgcctggtcacagggcatgccccggccacctctgcggaccccagctgtgagccttggctgttggcagtgagtgagcctggctcttgtgctggatggagcccaggcgggagcggtggccctgtccctcccacctctgtgacctcaggcactagcctttggctctggagacagccccagagcagggtgttgggatactgcagggccaggactgagccccgcagacctccccagcccctagcccaggagagagaaagccaggcaggtagccagggggactagcccctgtggagactggggggcttgaaattgtccccgtggtctcttactttcctttccccagcccagggtggacttagaaagcaggggctacaagagggaatccccgaaggtgctggaggtgggagcaggagattgagaaggagagaaagtgggtgagatgctggagaagagaggagaggagagaggcagagagcggtctcaggctggtgggaggggcgcccacctccccacgccctcccctcccctgctgcaggggctctggagagaaacaataaagagattcacacacaa

SEQ ID NO: 325404 - DNA, 2045 bp, Homo sapiens
aggggaggggaggcgggggctgatgtcaggagggatacaaatagtgccgacggctgggggccctgtctcccctcgccgcatccactctccggccggccgcctgcccgccgcctcctccgtgcgcccgccagcctcgcccgcgccgtcaccatgagccaggcctactcgtccagccagcgcgtgtcctcctaccgccgcaccttcggcggggccccgggcttcccgctcggctccccgctgagctcgcccgtgttcccgcgggcgggtttcggctctaagggctcctccagctcggtgacgtcccgcgtgtaccaggtgtcgcgcacgtcgggcggggccgggggcctggggtcgctgcgggccagccggctggggaccacccgcacgccctcctcctacggcgcaggcgagctgctggacttctcactggccgacgcggtgaaccaggagtttctgaccacgcgcaccaacgagaaggtggagctgcaggagctcaatgaccgcttcgccaactacatcgagaaggtgcgcttcctggagcagcagaacgcggcgctcgccgccgaagtgaaccggctcaagggccgcgagccgacgcgagtggccgagctctacgaggaggagctgcgggagctgcggcgccaggtggaggtgctcactaaccagcgcgcgcgcgtcgacgtcgagcgcgacaacctgctcgacgacctgcagcggctcaaggccaagctgcaggaggagattcagttgaaggaagaagcagagaacaatttggctgccttccgagcggacgtggatgcagctactctagctcgcattgacctggagcgcagaattgaatctctcaacgaggagatcgcgttccttaagaaagtgcatgaagaggagatccgtgagttgcaggctcagcttcaggaacagcaggtccaggtggagatggacatgtctaagccagacctcactgccgccctcagggacatccgggctcagtatgagaccatcgcggctaagaacatttctgaagctgaggagtggtacaagtcgaaggtgtcagacctgacccaggcagccaacaagaacaacgacgccctgcgccaggccaagcaggagatgatggaataccgacaccagatccagtcctacacctgcgagattgacgccctgaagggcactaacgattccctgatgaggcagatgcgggaattggaggaccgatttgccagtgaggccagtggctaccaggacaacattgcgcgcctggaggaggaaatccggcacctcaaggatgagatggcccgccatctgcgcgagtaccaggacctgctcaacgtgaagatggccctggatgtggagattgccacctaccggaagctgctggagggagaggagagccggatcaatctccccatccagacctactctgccctcaacttccgagaaaccagccctgagcaaaggggttctgaggtccataccaagaagacggtgatgatcaagaccatcgagacacgggatggggaggtcgtcagtgaggccacacagcagcagcatgaagtgctctaaagacagagaccctctgccaccagagaccgtcctcacccctgtcctcactgctccctgaagccagccttcttccatcccaggacaccacacccagcctcagtcctcccctcacagcctctgacccctcctcactggccatccctcgtggtccccaacagcgacatagcccatccctgcctggtcacagggcatgccccggccacctctgcggaccccagctgtgagccttggctgttggcagtgagtgagcctggctcttgtgctggatggagcccaggcgggagcggtggccctgtccctcccacctctgtgacctcaggcactagcctttggctctggagacagccccagagcagggtgttgggatactgcagggccaggactgagccccgcagacctccccagcccctagcccaggagtattggtccagggagctaggcatggggcccacccctggaatcccagcactttgggaggctga

SEQ ID NO: 325405 - DNA, 826 bp, Homo sapiens
  misc_feature (771)..(772): n is a, c, g, or t
  misc_feature (780)..(781): n is a, c, g, or t
  misc_feature (784)..(784): n is a, c, g, or t
  misc_feature (787)..(787): n is a, c, g, or t
  misc_feature (792)..(792): n is a, c, g, or t
  misc_feature (800)..(800): n is a, c, g, or t
  misc_feature (807)..(807): n is a, c, g, or t
  misc_feature (809)..(809): n is a, c, g, or t
  misc_feature (811)..(811): n is a, c, g, or t
aggggaggggaggcgggggctgatgtcaggagggatacaaatagtgccgacggctgggggccctgtctcccctcgccgcatccactctccggccggccgcctgcccgccgcctcctccgtgcgcccgccagcctcgcccgcgccgtcaccatgagccaggcctactcgtccagccagcgcgtgtcctcctaccgccgcaccttcggcggggccccgggcttcccgctcggctccccgctgagctcgcccgtgttcccgcgggcgggtttcggctctaagggctcctccagctcggtgacgtcccgcgtgtaccaggtgtcgcgcacgtcgggcggggccgggggcctggggtcgctgcgggccagccggctggggaccacccgcacgccctcctcctacggcgcaggcgagctgctggacttctcactggccgacgcggtgaaccaggagtttctgaccacgcgcaccaacgagaaggtggagctgcaggagctcaatgaccgcttcgccaactacatcgagaaggtgcgcttcctggagcagcagaacgcggcgctcgccgccgaagtgaaccggctcaagggccgcgagccgacgcgagtggccgagctctacgaggaggagctgcgggagctgcggcgccaggtggaggtgctcactaaccagcgcgcgcgcgtcgacgtcgagcgcgacaacctgctcgacgacctgcagcggctcaaggccaagctgcagaggagatccagtgaaggaagaaccaaaaccattggnngcctcgannggncgngatcngtaccaancgcatgncngngggccatggatctca

SEQ ID NO: 325406 - DNA, 1558 bp, Homo sapiens
gcccccgcctccgccgcggcccccacctctgcctccttctactcgggcgccccggcggccgccacctctccccagcccaggagaggctgcggagccgcagccgcccagaccgcgcagcgcgggaggcaggttccgcacgaaataaatcagaatgagttatgcagaaaaacccgatgaaatcacgaaagatgagtggatggaaaagctcaataacttgcatgtccagagagcagacatgaaccgcctcatcatgaactacctggtcacagagggctttaaggaagcagcggagaagtttcgaatggaatctggaatcgaacctagtgtggatctggaaacacttgatgaacgaatcaagatccgggagatgatactgaaaggtcagattcaggaggccatcgccttgatcaacagcctccacccagagctcttggacacaaaccggtatctttacttccatttgcagcaacagcatttgatcgagctgatccgccagcgggagacagaggcggcgctggagtttgcacagactcagctggcggagcagggcgaggagagccgagagtgcctcacagagatggagcgtaccctggcactgctggcctttgacagtcccgaggagtcgcccttcggagacctcctccacaccatgcagaggcagaaggtgtggagtgaagttaaccaagctgtgctagattatgaaaatcgcgagtcaacacccaaactggcaaaattactgaaactactactttgggctcagaacgagctggaccagaagaaagtaaaatatcccaaaatgacagacctcagcaagggtgtgattgaggagcccaagtagcgcctgcgcttgcgtggtggatccaacaccagccctgcgtcgtgggacttgcctcagatcagcctgcgactgcaagattcttactgcagtagagaactctttttctcccttgtacttttttttgacctggcatctttttatagggaaaaatggcctttgtaggcagtggaaaacttgcaaggaaagctgccgtctctttggcagtctgatgcagagcctgcactctggcactcgctgaagaatctggaaggttgcggtttgctcttccagtgttcgggggcctctggctgctgaaggattcggtctaccacggagggctgtgctgttaggctgcatcccactcaaaatacaggaaaagcacgaatcatgattctgctttctgttagcttaggcagacattgggccttcacctacaagtttttccttacccctgtggtttttgtgtttttttttttttctttttccataggaaagaatatataaatttgtaaatcctaattcaaagatggctcatgtgtgagggcattgagtttgatttgttttccctttggtctgggttgtgtggcttttgggggatgcgtgtgagggggctatgtgttttttaattttttaaatatatattttggtgctgtgtgtggtaagagacttgttcctagtggatcaatgaaccatctcttctgggcagttttgttgaaaataaaggtttctctttgatttcaa

SEQ ID NO: 325407 - DNA, 187 bp, Homo sapiens
gcggccgcctactactactactgctcgaattcaagcttctaacgatgtacggggacatgtttgattctgtattctttattccagtgtggcatatgtgcccctctgtatcttttgagaagtgcggaataggttgcttctaccacctgttcttaatgtaacagtaaaagttttcacatttttctcagaa

SEQ ID NO: 325408 - DNA, 4627 bp, Homo sapiens
gcccccgcctccgccgcggcccccacctctgcctccttctactcgggcgccccggcggccgccacctctccccagcccaggagaggctgcggagccgcagccgcccagaccgcgcagcgcgggaggcaggttccgcacgaaaccgagcgggtgaggatgtaaagtgtggcatggaaagtaggagtcttcagcacacgggtgttttcttctgctgaatctttttatgctggagtttgagactaccgagttcttcctgctaacaggactggccagttctacaaagttgttgcttttcatgggcgcacgtaactgcccggagtggaagcgctgtgagtgccgatcaccgaatgggccgagagaaaagaaataaatcagaatgagttatgcagaaaaacccgatgaaatcacgaaagatgagtggatggaaaagctcaataacttgcatgtccagagagcagacatgaaccgcctcatcatgaactacctggtcacagagggctttaaggaagcagcggagaagtttcgaatggaatctggaatcgaacctagtgtggatctggaaacacttgatgaacgaatcaagatccgggagatgatactgaaaggtcagattcaggaggccatcgccttgatcaacagcctccacccagagctcttggacacaaaccggtatctttacttccatttgcagcaacagcatttgatcgagctgatccgccagcgggagacagaggcggcgctggagtttgcacagactcagctggcggagcagggcgaggagagccgagagtgcctcacagagatggagcgtaccctggcactgctggcctttgacagtcccgaggagtcgcccttcggagacctcctccacaccatgcagaggcagaaggtgtggagtgaagttaaccaagctgtgctagattatgaaaatcgcgagtcaacacccaaactggcaaaattactgaaactactactttgggctcagaacgagctggaccagaagaaagtaaaatatcccaaaatgacagacctcagcaagggtgtgattgaggagcccaagtagcgcctgcgcttgcgtggtggatccaacaccagccctgcgtcgtgggacttgcctcagatcagcctgcgactgcaagattcttactgcagtagagaactctttttctcccttgtacttttttttgacctggcatctttttatagggaaaaatggcctttgtaggcagtggaaaacttgcaaggaaagctgccgtctctttggcagtctgatgcagagcctgcactctggcactcgctgaagaatctggaaggttgcggtttgctcttccagtgttcgggggcctctggctgctgaaggattcggtctaccacggagggctgtgctgttaggctgcatcccactcaaaatacaggaaaagcacgaatcatgattctgctttctgttagcttaggcagacattgggccttcacctacaagtttttccttacccctgtggtttttgtgtttttttttttttctttttccataggaaagaatatataaatttgtaaatcctaattcaaagatggctcatgtgtgagggcattgagtttgatttgttttccctttggtctgggttgtgtggcttttgggggatgcgtgtgagggggctatgtgttttttaattttttaaatatatattttggtgctgtgtgtggtaagagacttgttcctagtggatcaatgaaccatctcttctgggcagttttgttgaaaataaaggtttctctttgatttcaagaatgaccaaaatggcctctaaaagatgttaatcatctcaaatgaccttttgtctttggggcgttcttccccctgtgatagcggcagtggctttttctggtacctgcagctggaaaggccacttggccctgtgctgagtgagcggccttcattagagcgaggcagcccttggccggtggggacgcagagccccagcaggtggtgcacgactgttggcggaaggaacgcgtgttcatcctcagtgatctgccctccagcatctcggcagcatctcatcctccatcgtcagccggctctgccgatgtcctgcttctgttcactcacagaactgtcccctgctccgtggtgggcaggagggaagtggtgcagggctgcgtgcattgcctgcgagtcgggacagttgatgggcacatggccttgtagctctgggcacagatgtgtttggattcattgcagcggaccaccgggcactgttgaccccactgagcagtgctaagtgttggtttagtggatgttcgtggaattgctgacccatccaagggcgtcctttggagccagtggagcctgccggcgcatctgaggggcagaatgctgctagcacttgaatctgggatctcgccttattctcaagtagcaaggcatctcgacaagcatggtctaggtctggtggccagcttgccagtacctgagccggtcgggtcatctgcctctgagggaccgtcctcaccgagctcctgcatcccttgagtgttgatcaggaggcgtccacagcattgttctcgcctctgaatgatgcttctttctgtgttggagcctggcgaagttgtgttttcaagccctctacttctctttccagtgggtaggagcttttggcagtgtttactttacctagatggcttatataatccagtaagagatgcaaagataaaattgctgcggttgttacagaagcatggcggcctccagactgacccattggttgccctttagattttgtaaggatgcggtgctggggaggtggtgcttccctaccccctagaaatgctgccttccaactaccactctcccagatgtgacccttgcgattatttcctctgaggtttgaggatgaagataagttggagggaaagagagtaactaataggggatgaaatatagcagaagctagaagaaagcggtgaggtgagagagatgcatctgcacgttttcttcaacagcaccaggtgattcagcatattcctaattacctttcactattcgtgtatataagatcgtttacttgcataatatatcatcaatttgacatattcttaaaactagagggtgtgagaagcacagcaataggaagtctctccacaaactaggggaacacaaatggggtcattcacgtgcctggactgtcactatgtggctgtcacgtgaagtgctggtgttgatttccatttcagccagtgggtagctgataagccagtgccagcatccagcatgagcagatgtcggggagactgggaagtctccagcgttactgctctccttcccttcatgataagccagtgccagcatccagcgtgagcagacgtcggggagactgggaagtctccgatgttactgcctgccttcctttcgtgtgaggggctgcacttgcttttcttgtgatctgttagtggacgaggtcttccaaggaagtgctttgcacactttctttgctcctttttacagtctttgtctttgcagcaagcaaatgaaattaagccactttgggataatgaacattcagtataattctactttgtctcattttggatctcactgttgtctttataaaaatggcacattttacaaagtagtttattcttattatactttctgctggagagtgccttgaaataaaatgtgagagtattctggtactctgtgttccagatgcatgaaattgggtgaggaataacccctagtctggaatctttgtgaagcatagggttattgcaaggcaaatgggaactaacacatcttgccatttgaatcagggtctccagtttctagaaaaggcagacactggttggggaccaaagtctccatggcacatgactgaagactggtggtcgtgtgtgtgcggagtccacggaagcctcggggaggtggagctgctccttccattccgtcaggacgtgatctgaaaacatgtagagaagatgagttgaggacagcttttctaaggcaatgtgatgtctttgctttcttatttctctttctctgcgttgttagttttgaagagtggaggagctaggggctccagaaagaatcttacacatgtgttgaagacattgatgtcatagggagcggggagctgcattcccttctgggctgttactgctaaatctcagtatgaacagaccaggcggaaagcttggtggccaagcagtctgtgtgcttccccgctgatggagaacgttgcgttgttcacaatagggcctcatgggtgtagccgcatggcagacccatggctggcgcagctgcctgttgccgtctgtcttcagtaactgctgctctgttaactgttctattctgatactacgcgtgttgttttttacaacaggtatgtttttgtttcagaaatatgtattgcttttctcatattttttgcaaattgtattgtcaacatgggtcatttaaagtcctgtatgaaccataacctgctgtggtacctttgtacatgtttgattctgtattctttattccagtgtggcatatgtgcccctctgtatcttttgagaagtgcggaataggttgcttctaccacctgttcttaatgtaacagtaaaagttttcacatttttctcagaa

SEQ ID NO: 325409 - DNA, 3699 bp, Homo sapiens
gcccccgcctccgccgcggcccccacctctgcctccttctactcgggcgccccggcggccgccacctctccccagcccaggagaggctgcggagccgcagccgcccagaccgcgcagcgcgggaggcaggttccgcacgaaataaatcagaatgagttatgcagaaaaacccgatgaaatcacgaaagatgagtggatggaaaagctcaataacttgcatgtccagagagcagacatgaaccgcctcatcatgaactacctggtcacagagggctttaaggaagcagcggagaagtttcgaatggaatctggaatcgaacctagtgtggatctggaaacacttgatgaacgaatcaagatccgggagatgatactgaaaggtcagattcaggaggccatcgccttgatcaacagcctccacccagagctcttggacacaaaccggtatctttacttccatttgcagcaacagcatttgatcgagctgatccgccagcgggagacagaggcggcgctggagtttgcacagactcagctggcggagcagggcgaggagagccgagagtgcctcacagagatggagcgtaccctggcactgctggcctttgacagtcccgaggagtcgcccttcggagacctcctccacaccatgcagaggcagaaggtgtggagtgaagttaaccaagctgtgctagattatgaaaatcgcgagtcaacacccaaactggcaaaattactgaaactactactttgggctcagaacgagctggaccagaagaaagtaaaatatcccaaaatgacagacctcagcaagggtgtgattgaggagcccaagtagcgcctgcgcttgcgtggtggatccaacaccagccctgcgtcgtgggacttgcctcagatcagcctgcgactgcaagattcttactgcagtagagaactctttttctcccttgtacttttttttgacctggcatctttttatagggaaaaatggcctttgtaggcagtggaaaacttgcaaggaaagctgccgtctctttggcagtctgatgcagagcctgcactctggcactcgctgaagaatctggaaggttgcggtttgctcttccagtgttcgggggcctctggctgctgaaggattcggtctaccacggagggctgtgctgttaggctgcatcccactcaaaatacaggaaaagcacgaatcatgattctgctttctgttagcttaggcagacattgggccttcacctacaagtttttccttacccctgtggtttttgtgtttttttttttttctttttccataggaaagaatatataaatttgtaaatcctaattcaaagatggctcatgtgtgagggcattgagtttgatttgttttccctttggtctgggttgtgtggcttttgggggatgcgtgtgagggggctatgtgttttttaattttttaaatatatattttggtgctgtgtgtggtaagagacttgttcctagtggatcaatgaaccatctcttctgggcagttttgttgaaaataaaggtttctctttgatttcaagaatgaccaaaatggcctctaaaagatgttaatcatctcaaatgaccttttgtctttggggcgttcttccccctgtgatagcggcagtggctttttctggtacctgcagctggaaaggccacttggccctgtgctgagtgagcggccttcattagagcgaggcagcccttggccggtggggacgcagagccccagcaggtggtgcacgactgttggcggaaggaacgcgtgttcatcctcagtgatctgccctccagcatctcggcagcatctcatcctccatcgtcagccggctctgccgatgtcctgcttctgttcactcacagaactgtcccctgctccgtggtgggcaggagggaagtggtgcagggctgcgtgcattgcctgcgagtcgggacagttgatgggcacatggccttgtagctctgggcacagatgtgtttggattcattgcagcggaccaccgggcactgttgaccccactgagcagtgctaagtgttggtttagtggatgttcgtggaattgctgacccatccaagggcgtcctttggagccagtggagcctgccggcgcatctgaggggcagaatgctgctagcacttgaatctgggatctcgccttattctcaagtagcaaggcatctcgacaagcatggtctaggtctggtggccagcttgccagtacctgagccggtcgggtcatctgcctctgagggaccgtcctcaccgagctcctgcatcccttgagtgttgatcaggaggcgtccacagcattgttctcgcctctgaatgatgcttctttctgtgttggagcctggcgaagttgtgttttcaagccctctacttctctttccagtgggtaggagcttttggcagtgtttactttacctagatggcttatataatccagtaagagatgcaaagataaaattgtgcacttgcttttcttgtgatctgttagtggacgaggtcttccaaggaagtgctttgcacactttctttgctcctttttacagtctttgtctttgcagcaagcaaatgaaattaagccactttgggataatgaacattcagtataattctactttgtctcattttggatctcactgttgtctttataaaaatggcacattttacaaagtagtttattcttattatactttctgctggagagtgccttgaaataaaatgtgagagtattctggtactctgtgttccagatgcatgaaattgggtgaggaataacccctagtctggaatctttgtgaagcatagggttattgcaaggcaaatgggaactaacacatcttgccatttgaatcagggtctccagtttctagaaaaggcagacactggttggggaccaaagtctccatggcacatgactgaagactggtggtcgtgtgtgtgcggagtccacggaagcctcggggaggtggagctgctccttccattccgtcaggacgtgatctgaaaacatgtagagaagatgagttgaggacagcttttctaaggcaatgtgatgtctttgctttcttatttctctttctctgcgttgttagttttgaagagtggaggagctaggggctccagaaagaatcttacacatgtgttgaagacattgatgtcatagggagcggggagctgcattcccttctgggctgttactgctaaatctcagtatgaacagaccaggcggaaagcttggtggccaagcagtctgtgtgcttccccgctgatggagaacgttgcgttgttcacaatagggcctcatgggtgtagccgcatggcagacccatggctggcgcagctgcctgttgccgtctgtcttcagtaactgctgctctgttaactgttctattctgatactacgcgtgttgttttttacaacaggtatgtttttgtttcagaaatatgtattgcttttctcatattttttgcaaattgtattgtcaacatgggtcatttaaagtcctgtatgaaccataacctgctgtggtacctttgtacatgtttgattctgtattctttattccagtgtggcatatgtgcccctctgtatcttttgagaagtgcggaataggttgcttctaccacctgttcttaatgtaacagtaaaagttttcacatttttctcagaa

SEQ ID NO: 325410 - DNA, 2137 bp, Homo sapiens
  misc_feature (1954)..(1954): n is a, c, g, or t
gcccccgcctccgccgcggcccccacctctgcctccttctactcgggcgccccggcggccgccacctctccccagcccaggagaggctgcggagccgcagccgcccagaccgcgcagcgcgggaggcaggttccgcacgaaataaatcagaatgagttatgcagaaaaacccgatgaaatcacgaaagatgagtggatggaaaagctcaataacttgcatgtccagagagcagacatgaaccgcctcatcatgaactacctggtcacagagggctttaaggaagcagcggagaagtttcgaatggaatctggaatcgaacctagtgtggatctggaaacacttgatgaacgaatcaagatccgggagatgatactgaaaggtcagattcaggaggccatcgccttgatcaacagcctccacccagagctcttggacacaaaccggtatctttacttccatttgcagcaacagcatttgatcgagctgatccgccagcgggagacagaggcggcgctggagtttgcacagactcagctggcggagcagggcgaggagagccgagagtgcctcacagagatggagcgtaccctggcactgctggcctttgacagtcccgaggagtcgcccttcggagacctcctccacaccatgcagaggcagaaggtgtggagtgaagttaaccaagctgtgctagattatgaaaatcgcgagtcaacacccaaactggcaaaattactgaaactactactttgggctcagaacgagctggaccagaagaaagtaaaatatcccaaaatgacagacctcagcaagggtgtgattgaggagcccaagtagcgcctgcgcttgcgtggtggatccaacaccagccctgcgtcgtgggacttgcctcagatcagcctgcgactgcaagattcttactgcagtagagaactctttttctcccttgtacttttttttgacctggcatctttttatagggaaaaatggcctttgtaggcagtggaaaacttgcaaggaaagctgccgtctctttggcagtctgatgcagagcctgcactctggcactcgctgaagaatctggaaggttgcggtttgctcttccagtgttcgggggcctctggctgctgaaggattcggtctaccacggagggctgtgctgttaggctgcatcccactcaaaatacaggaaaagcacgaatcatgattctgctttctgttagcttaggcagacattgggccttcacctacaagtttttccttacccctgtggtttttgtgtttttttttttttctttttccataggaaagaatatataaatttgtaaatcctaattcaaagatggctcatgtgtgagggcattgagtttgatttgttttccctttggtctgggttgtgtggcttttgggggatgcgtgtgagggggctatgtgttttttaattttttaaatatatattttggtgctgtgtgtggtaagagacttgttcctagtggatcaatgaaccatctcttctgggcagttttgttgaaaataaaggtttctctttgatttcaaaaaaaaaacaaataaaaaacaaaaaaaacaaaaaaaacaacaaaaaaagaaaacgacaaccacaaacaaacaacaaaaacccaacaaaaggagccaaaaaacaacaatcaaacacacagaagacaaaaaacaaagaacagcgggggggggcaactactaataacagacacacagcaaggaccgcgccgacaacaaatatacgcgacccaggaacacatttgtatgagcaagaggacgcagccccacaagaaagaagtaggatagtccaaaacaaagagacaacagacacaggcgcggcttgcggaacaaaaaaacgtacgaagcaggacgaagacaaacagaccaacggtcggcgcgcgctcatagtggaaggacaacaccacccactctccaggnggggggagcggaaagcatgaaacagagagaaaccccacatagcgaaaggcagatagacacggacgagtcgagaaaaaacagaaaccaaatgacgagatgatcgtacgaacaaccacacaccagacgaacgatcgggcgagagaaacgtggaggcgaagacgcagacagtaaacgaccaacagc

SEQ ID NO: 325411 - DNA, 4402 bp, Homo sapiens
gcccccgcctccgccgcggcccccacctctgcctccttctactcgggcgccccggcggccgccacctctccccagcccaggagaggctgcggagccgcagccgcccagaccgcgcagcgcgggaggcaggttccgcacgaaataaatcagaatgagttatgcagaaaaacccgatgaaatcacgaaagatgagtggatggaaaagctcaataacttgcatgtccagagagcagacatgaaccgcctcatcatgaactacctggtcacagagggctttaaggaagcagcggagaagtttcgaatggaatctggaatcgaacctagtgtggatctggaaacacttgatgaacgaatcaagatccgggagatgatactgaaaggtcagattcaggaggccatcgccttgatcaacagcctccacccagagctcttggacacaaaccggtatctttacttccatttgcagcaacagcatttgatcgagctgatccgccagcgggagacagaggcggcgctggagtttgcacagactcagctggcggagcagggcgaggagagccgagagtgcctcacagagatggagcgtaccctggcactgctggcctttgacagtcccgaggagtcgcccttcggagacctcctccacaccatgcagaggcagaaggtgtggagtgaagttaaccaagctgtgctagattatgaaaatcgcgagtcaacacccaaactggcaaaattactgaaactactactttgggctcagaacgagctggaccagaagaaagtaaaatatcccaaaatgacagacctcagcaagggtgtgattgaggagcccaagtagcgcctgcgcttgcgtggtggatccaacaccagccctgcgtcgtgggacttgcctcagatcagcctgcgactgcaagattcttactgcagtagagaactctttttctcccttgtacttttttttgacctggcatctttttatagggaaaaatggcctttgtaggcagtggaaaacttgcaaggaaagctgccgtctctttggcagtctgatgcagagcctgcactctggcactcgctgaagaatctggaaggttgcggtttgctcttccagtgttcgggggcctctggctgctgaaggattcggtctaccacggagggctgtgctgttaggctgcatcccactcaaaatacaggaaaagcacgaatcatgattctgctttctgttagcttaggcagacattgggccttcacctacaagtttttccttacccctgtggtttttgtgtttttttttttttctttttccataggaaagaatatataaatttgtaaatcctaattcaaagatggctcatgtgtgagggcattgagtttgatttgttttccctttggtctgggttgtgtggcttttgggggatgcgtgtgagggggctatgtgttttttaattttttaaatatatattttggtgctgtgtgtggtaagagacttgttcctagtggatcaatgaaccatctcttctgggcagttttgttgaaaataaaggtttctctttgatttcaagaatgaccaaaatggcctctaaaagatgttaatcatctcaaatgaccttttgtctttggggcgttcttccccctgtgatagcggcagtggctttttctggtacctgcagctggaaaggccacttggccctgtgctgagtgagcggccttcattagagcgaggcagcccttggccggtggggacgcagagccccagcaggtggtgcacgactgttggcggaaggaacgcgtgttcatcctcagtgatctgccctccagcatctcggcagcatctcatcctccatcgtcagccggctctgccgatgtcctgcttctgttcactcacagaactgtcccctgctccgtggtgggcaggagggaagtggtgcagggctgcgtgcattgcctgcgagtcgggacagttgatgggcacatggccttgtagctctgggcacagatgtgtttggattcattgcagcggaccaccgggcactgttgaccccactgagcagtgctaagtgttggtttagtggatgttcgtggaattgctgacccatccaagggcgtcctttggagccagtggagcctgccggcgcatctgaggggcagaatgctgctagcacttgaatctgggatctcgccttattctcaagtagcaaggcatctcgacaagcatggtctaggtctggtggccagcttgccagtacctgagccggtcgggtcatctgcctctgagggaccgtcctcaccgagctcctgcatcccttgagtgttgatcaggaggcgtccacagcattgttctcgcctctgaatgatgcttctttctgtgttggagcctggcgaagttgtgttttcaagccctctacttctctttccagtgggtaggagcttttggcagtgtttactttacctagatggcttatataatccagtaagagatgcaaagataaaattgctgcggttgttacagaagcatggcggcctccagactgacccattggttgccctttagattttgtaaggatgcggtgctggggaggtggtgcttccctaccccctagaaatgctgccttccaactaccactctcccagatgtgacccttgcgattatttcctctgaggtttgaggatgaagataagttggagggaaagagagtaactaataggggatgaaatatagcagaagctagaagaaagcggtgaggtgagagagatgcatctgcacgttttcttcaacagcaccaggtgattcagcatattcctaattacctttcactattcgtgtatataagatcgtttacttgcataatatatcatcaatttgacatattcttaaaactagagggtgtgagaagcacagcaataggaagtctctccacaaactaggggaacacaaatggggtcattcacgtgcctggactgtcactatgtggctgtcacgtgaagtgctggtgttgatttccatttcagccagtgggtagctgataagccagtgccagcatccagcatgagcagatgtcggggagactgggaagtctccagcgttactgctctccttcccttcatgataagccagtgccagcatccagcgtgagcagacgtcggggagactgggaagtctccgatgttactgcctgccttcctttcgtgtgaggggctgcacttgcttttcttgtgatctgttagtggacgaggtcttccaaggaagtgctttgcacactttctttgctcctttttacagtctttgtctttgcagcaagcaaatgaaattaagccactttgggataatgaacattcagtataattctactttgtctcattttggatctcactgttgtctttataaaaatggcacattttacaaagtagtttattcttattatactttctgctggagagtgccttgaaataaaatgtgagagtattctggtactctgtgttccagatgcatgaaattgggtgaggaataacccctagtctggaatctttgtgaagcatagggttattgcaaggcaaatgggaactaacacatcttgccatttgaatcagggtctccagtttctagaaaaggcagacactggttggggaccaaagtctccatggcacatgactgaagactggtggtcgtgtgtgtgcggagtccacggaagcctcggggaggtggagctgctccttccattccgtcaggacgtgatctgaaaacatgtagagaagatgagttgaggacagcttttctaaggcaatgtgatgtctttgctttcttatttctctttctctgcgttgttagttttgaagagtggaggagctaggggctccagaaagaatcttacacatgtgttgaagacattgatgtcatagggagcggggagctgcattcccttctgggctgttactgctaaatctcagtatgaacagaccaggcggaaagcttggtggccaagcagtctgtgtgcttccccgctgatggagaacgttgcgttgttcacaatagggcctcatgggtgtagccgcatggcagacccatggctggcgcagctgcctgttgccgtctgtcttcagtaactgctgctctgttaactgttctattctgatactacgcgtgttgttttttacaacaggtatgtttttgtttcagaaatatgtattgcttttctcatattttttgcaaattgtattgtcaacatgggtcatttaaagtcctgtatgaaccataacctgctgtggtacctttgtacatgtttgattctgtattctttattccagtgtggcatatgtgcccctctgtatcttttgagaagtgcggaataggttgcttctaccacctgttcttaatgtaacagtaaaagttttcacatttttctcagaa

SEQ ID NO: 325412 - DNA, 4107 bp, Homo sapiens
cggttgctctgcaagtgttcggggcctctggctgctgaaggattcggtctaccacggaggcctgtgctgttaggccgcatcccactcagaattcaggaggccatcgccttgatcaacagcctccacccagagctcttggacacaaaccggtatctttacttccatttgcagcaacagcatttgatcgagctgatccgccagcgggagacagaggcggcgctggagtttgcacagactcagctggcggagcagggcgaggagagccgagagtgcctcacagagatggagcgtaccctggcactgctggcctttgacagtcccgaggagtcgcccttcggagacctcctccacaccatgcagaggcagaaggtgtggagtgaagttaaccaagctgtgctagattatgaaaatcgcgagtcaacacccaaactggcaaaattactgaaactactactttgggctcagaacgagctggaccagaagaaagtaaaatatcccaaaatgacagacctcagcaagggtgtgattgaggagcccaagtagcgcctgcgcttgcgtggtggatccaacaccagccctgcgtcgtgggacttgcctcagatcagcctgcgactgcaagattcttactgcagtagagaactctttttctcccttgtacttttttttgacctggcatctttttatagggaaaaatggcctttgtaggcagtggaaaacttgcaaggaaagctgccgtctctttggcagtctgatgcagagcctgcactctggcactcgctgaagaatctggaaggttgcggtttgctcttccagtgttcgggggcctctggctgctgaaggattcggtctaccacggagggctgtgctgttaggctgcatcccactcaaaatacaggaaaagcacgaatcatgattctgctttctgttagcttaggcagacattgggccttcacctacaagtttttccttacccctgtggtttttgtgtttttttttttttctttttccataggaaagaatatataaatttgtaaatcctaattcaaagatggctcatgtgtgagggcattgagtttgatttgttttccctttggtctgggttgtgtggcttttgggggatgcgtgtgagggggctatgtgttttttaattttttaaatatatattttggtgctgtgtgtggtaagagacttgttcctagtggatcaatgaaccatctcttctgggcagttttgttgaaaataaaggtttctctttgatttcaagaatgaccaaaatggcctctaaaagatgttaatcatctcaaatgaccttttgtctttggggcgttcttccccctgtgatagcggcagtggctttttctggtacctgcagctggaaaggccacttggccctgtgctgagtgagcggccttcattagagcgaggcagcccttggccggtggggacgcagagccccagcaggtggtgcacgactgttggcggaaggaacgcgtgttcatcctcagtgatctgccctccagcatctcggcagcatctcatcctccatcgtcagccggctctgccgatgtcctgcttctgttcactcacagaactgtcccctgctccgtggtgggcaggagggaagtggtgcagggctgcgtgcattgcctgcgagtcgggacagttgatgggcacatggccttgtagctctgggcacagatgtgtttggattcattgcagcggaccaccgggcactgttgaccccactgagcagtgctaagtgttggtttagtggatgttcgtggaattgctgacccatccaagggcgtcctttggagccagtggagcctgccggcgcatctgaggggcagaatgctgctagcacttgaatctgggatctcgccttattctcaagtagcaaggcatctcgacaagcatggtctaggtctggtggccagcttgccagtacctgagccggtcgggtcatctgcctctgagggaccgtcctcaccgagctcctgcatcccttgagtgttgatcaggaggcgtccacagcattgttctcgcctctgaatgatgcttctttctgtgttggagcctggcgaagttgtgttttcaagccctctacttctctttccagtgggtaggagcttttggcagtgtttactttacctagatggcttatataatccagtaagagatgcaaagataaaattgctgcggttgttacagaagcatggcggcctccagactgacccattggttgccctttagattttgtaaggatgcggtgctggggaggtggtgcttccctaccccctagaaatgctgccttccaactaccactctcccagatgtgacccttgcgattatttcctctgaggtttgaggatgaagataagttggagggaaagagagtaactaataggggatgaaatatagcagaagctagaagaaagcggtgaggtgagagagatgcatctgcacgttttcttcaacagcaccaggtgattcagcatattcctaattacctttcactattcgtgtatataagatcgtttacttgcataatatatcatcaatttgacatattcttaaaactagagggtgtgagaagcacagcaataggaagtctctccacaaactaggggaacacaaatggggtcattcacgtgcctggactgtcactatgtggctgtcacgtgaagtgctggtgttgatttccatttcagccagtgggtagctgataagccagtgccagcatccagcatgagcagatgtcggggagactgggaagtctccagcgttactgctctccttcccttcatgataagccagtgccagcatccagcgtgagcagacgtcggggagactgggaagtctccgatgttactgcctgccttcctttcgtgtgaggggctgcacttgcttttcttgtgatctgttagtggacgaggtcttccaaggaagtgctttgcacactttctttgctcctttttacagtctttgtctttgcagcaagcaaatgaaattaagccactttgggataatgaacattcagtataattctactttgtctcattttggatctcactgttgtctttataaaaatggcacattttacaaagtagtttattcttattatactttctgctggagagtgccttgaaataaaatgtgagagtattctggtactctgtgttccagatgcatgaaattgggtgaggaataacccctagtctggaatctttgtgaagcatagggttattgcaaggcaaatgggaactaacacatcttgccatttgaatcagggtctccagtttctagaaaaggcagacactggttggggaccaaagtctccatggcacatgactgaagactggtggtcgtgtgtgtgcggagtccacggaagcctcggggaggtggagctgctccttccattccgtcaggacgtgatctgaaaacatgtagagaagatgagttgaggacagcttttctaaggcaatgtgatgtctttgctttcttatttctctttctctgcgttgttagttttgaagagtggaggagctaggggctccagaaagaatcttacacatgtgttgaagacattgatgtcatagggagcggggagctgcattcccttctgggctgttactgctaaatctcagtatgaacagaccaggcggaaagcttggtggccaagcagtctgtgtgcttccccgctgatggagaacgttgcgttgttcacaatagggcctcatgggtgtagccgcatggcagacccatggctggcgcagctgcctgttgccgtctgtcttcagtaactgctgctctgttaactgttctattctgatactacgcgtgttgttttttacaacaggtatgtttttgtttcagaaatatgtattgcttttctcatattttttgcaaattgtattgtcaacatgggtcatttaaagtcctgtatgaaccataacctgctgtggtacctttgtacatgtttgattctgtattctttattccagtgtggcatatgtgcccctctgtatcttttgagaagtgcggaataggttgcttctaccacctgttcttaatgtaacagtaaaagttttcacatttttctcagaa

SEQ ID NO: 325413 - DNA, 1335 bp, Homo sapiens
gcccccgcctccgccgcggcccccacctctgcctccttctactcgggcgccccggcggccgccacctctccccagcccaggagaggctgcggagccgcagccgcccagaccgcgcagcgcgggaggcaggttccgcacgaaataaatcagaatgagttatgcagaaaaacccgatgaaatcacgaaagatgagtggatggaaaagctcaataacttgcatgtccagagagcagacatgaaccgcctcatcatgaactacctggtcacagagggctttaaggaagcagcggagaagtttcgaatggaatctggaatcgaacctagtgtggatctggaaacacttgatgaacgaatcaagatccgggagatgatactgaaaggtcagattcaggaggccatcgccttgatcaacagcctccacccagagctcttggacacaaaccggtatctttacttccatttgcagcaacagcatttgatcgagctgatccgccagcgggagacagaggcggcgctggagtttgcacagactcagctggcggagcagggcgaggagagccgagagtgcctcacagagatggagcgtaccctggcactgctggcctttgacagtcccgaggagtcgcccttcggagacctcctccacaccatgcagaggcagaaggtgtggagtgaagttaaccaagctgtgctagattatgaaaatcgcgagtcaacacccaaactggcaaaattactgaaactactactttgggctcagaacgagctggaccagaagaaagtaaaatatcccaaaatgacagacctcagcaagggtgtgattgaggagcccaagtagcgcctgcgcttgcgtggtggatccaacaccagccctgcgtcgtgggacttgcctcagatcagcctgcgactgcaagattcttactgcagtagagaactctttttctcccttgtacttttttttgacctggcatctttttatagggaaaaatggcctttgtaggcagtggaaaacttgcaaggaaagctgccgtctctttggcagtctgatgcagagcctgcactctggcactcgctgaagaatctggaaggttgcggtttgctcttccagtgttcgggggcctctggctgctgaaggattcggtctaccacggagggctgtgctgttaggctgcatcccactcaaaatacaggaaaagcacgaatcatgattctgctttctgttagcttaggcagacattgggccttcacctacaagtttttccttacccctgtggtttttgtgtttttttttttttctttttccataggaaagaatatataaatttgtaaatccta

SEQ ID NO: 325414 - DNA, 3740 bp, Homo sapiens
cttccttgtactatccctatgaggcataatgattacaagctccatctgcgtacgacttacagacctggaatcgctcagagagcaagaggcagggagcggggtgctgaaggaatcctagctgtggaacaggtgggtgggttggtggagtttgatcttgtggcgttctcctctcccccttctttgggaagatgataggggtccctgccagatccacccagaagaaagggattcaggcatggggcccttgacctctaggccccagtccctggagcagaggcaggccctcgggagctgttccttgttttgatttctgttgtggtgcagccagctgctcagagagacctggcctaaaaatgactcccagcagccctctctcaccccagtgtcctgatatttgggctgtgatccttctggtgtatgtttgaatctttctaaaactgggtgccctcagttcagtttctaggcaggaagcctagaagtcaccagatctttttgggggatgtgagaaccttgagccgcgcacaccctggtgagacaccaattcccacaagcctgcagcagggcctggggctgagcctgggctgcccattcatctcagcgacttcagcctgagaagtgagccctgcctgggctccacacccagagagtccatacaaattctgctccgggaagagtcggggggtctattcaagtttctctgcagacaaaacttcccacaacaggtaccaatctggcctccttcctcagcaccggtagagaaagcaacagaatgggaagtttcctctgggttggagcctcagagctctgcccctcaaggtgacagggacgtccctgtggcttgttccctccacctccagtactgtatgcttgctacttcaaccccctatttggtgaatttctgcacagacacagatctctgtgcctggaatgggactgtgccctgtgcgggtctctcccttggcgtatatccatctagatatttagtctttgagaatctcaaagcagagctctctgggaagagaactgtccacattgctaaataattaagattccctcacttttttgagggccatgtgttgtgagagagagagagagagagagagtgtgtgtgtgtgtgtgtgtgtgtgtgtgtctgtgtatgcaagtgttggtaacttcccacttgaactaaataacatggggttagagaaaaaaaaataccaggcaagctgtctccattgaacaagtccttggcaatgggcaggtcccaagggactcacagcttctggcagcaagtgtgtcattcacacacatcattctggctggagagtgcaatgtgtcatttttttttctttttgtaattattttattaagtatttagttggaaatttcacactggcattaacaggtctagcataagtggcctaggcagtcatcccaggctccaaaatgaagatgtgcaaaagagatgccactgggaatagaaacactgagttggttcagttaggtcatcccctgcagacgtgtcatcgagcaggctgactcccacccctcagccatgccatgggtatgagaagccccttataatgaaagctgccagccctttcgtccttgtttcagagggtgggtcaggtggttggggtgagaacttgctcacggtgcacccaacaagacctgcaggtgcatataagtttagtcccaactgcagggccagaccaaacacttcctgggaagtgtgtggagggctgtgctagaccttcctgagtttctggctaaatcatcagccctgtttggtgcagtctcatgtctctgtggttcccaagctgcatgatcagagccagtgagaagacaggatcagtgacccacagctttggggaaaaacagccccactgttaacttccctcctgcaaacctgggtccccaggccataaggtgggcacactggtgcttacagactgggtggagagccctaccttccaaggtcttgatcccagcctgcctataaggttgggattagcatgcaatcccccttccccaatcctgtctttttaaaatctcaagtttgcacttaaccttgacaacagcaccctctcctactccagtcctagaactcagtggccttagagaatggggtcccctgcactgaaggtccccgccttgctcccagttccatcctggccaataggctgcgcctcaagaggtgaaagagaaaaaagggagggagggaggaagaattatttagaacaaaaggatggctcgagcacgttagaggcaagtgagaggcacgttggtgagaagagcatgtgcatgtttggggtagctggggcctactgtcccttcattagggaaggaggcttccagaagcggatgtcttctagaaagaaaaattgtgtgaaggctgaaaaggggcttggagttttgtctttgttgattagaaagaaggaagaagtcagctctgagtgtttcaggaagaagagagcaggtagaaagggaatttagtgatttaacacccaagggtccagccatagcaggttggaaaatcctccaaatttggccacagaagctggctaggaaaaaactgccactcattgggccacacgctgggtccccatcagttctcaatgaatggtcattgatttacttagcagagagaagtcaccagccacaaaccaatctttgagtttgcaggccctgattccagaatatatgcatccagctcccgggttctcagctggttttgcccacttccctttgactgtccaatccaaagccagtctctcaagttgtatggctcaaagagcagtgaccacaatgggtcatacagtagggacccacctccacaaattagaaccagagttcagactccattgggcacatctgggaggaaggcaacctcctttgtcgtcttgttggtaccagtcattctcaagtatctctgacacctgtggtggttcagtttgctgagcctgccacctggtatgaattagactgggtgtgatgaacattcatccatggatataccctaccattttgcgttgccttataaccaaggcacactccccataagagtttactgcagagaaagaacagcaaaacagccaccctccttgaatttacaactcattatctgcaacaggttttctttaaatccaagacacaggatgggaaatgggtttccccaccaggtactcagaggtctgcaggaagtgactcccgggcaaggcagacttcagtaatccctgaagcgtgagcatgtggactgcatggctgggtggggactggtggatgtctctggagctccagaaccttggagaattcctcatggaattcccctcccagctcttagtgggctctgtggggtcaggaggagcccttcctccaggttttccttctttcctcctcagcagagaaactggagaaaggacattaaactcagtgcagtcgatttgagtgctgaaatatttccagaatcaatggtggtgctaaactatctccatgtttctagcatttttaatagtggagttggtttgtttttaatctcatcacaaaaatgcagtgcccttggggaagggaccagccccttggcctgccactttccaggtgtcctttatcactttgacgggactctttggtctgcagaaaatgctctgtcttggcatgcttctagactgtaagatttgggttttgttttgtattttatgtttacatgcatcttatatttccctgaaaactaaataaagttttgggcctttttaaccgaa

SEQ ID NO: 325415 - DNA, 1901 bp, Homo sapiens
ggccccacagttctgaagcctgggccccgcagaggcctgcattcaggtcagttctcagcacgcgattaaaagatggaggttgtggtgttttctcagggcagcaacaggctctcttccctaagtccaggtcctcgaatccgcaggggctcagaatagacatgcaatcccccttccccaatcctgtctttttaaaatctcaagtttgcacttaaccttgacaacagcaccctctcctactccagtcctagaactcagtggccttagagaatggggtcccctgcactgaaggtccccgccttgctcccagttccatcctggccaataggctgcgcctcaagaggtgaaagagaaaaaagggagggagggaggaagaattatttagaacaaaaggatggctcgagcacgttagaggcaagtgagaggcacgttggtgagaagagcatgtgcatgtttggggtagctggggcctactgtcccttcattagggaaggaggcttccagaagcggatgtcttctagaaagaaaaattgtgtgaaggctgaaaaggggcttggagttttgtctttgttgattagaaagaaggaagaagtcagctctgagtgtttcaggaagaagagagcaggtagaaagggaatttagtgatttaacacccaagggtccagccatagcaggttggaaaatcctccaaatttggccacagaagctggctaggaaaaaactgccactcattgggccacacgctgggtccccatcagttctcaatgaatggtcattgatttacttagcagagagaagtcaccagccacaaaccaatctttgagtttgcaggccctgattccagaatatatgcatccagctcccgggttctcagctggttttgcccacttccctttgactgtccaatccaaagccagtctctcaagttgtatggctcaaagagcagtgaccacaatgggtcatacagtagggacccacctccacaaattagaaccagagttcagactccattgggcacatctgggaggaaggcaacctcctttgtcgtcttgttggtaccagtcattctcaagtatctctgacacctgtggtggttcagtttgctgagcctgccacctggtatgaattagactgggtgtgatgaacattcatccatggatataccctaccattttgcgttgccttataaccaaggcacactccccataagagtttactgcagagaaagaacagcaaaacagccaccctccttgaatttacaactcattatctgcaacaggttttctttaaatccaagacacaggatgggaaatgggtttccccaccaggtactcagaggtctgcaggaagtgactcccgggcaaggcagacttcagtaatccctgaagcgtgagcatgtggactgcatggctgggtggggactggtggatgtctctggagctccagaaccttggagaattcctcatggaattcccctcccagctcttagtgggctctgtggggtcaggaggagcccttcctccaggttttccttctttcctcctcagcagagaaactggagaaaggacattaaactcagtgcagtcgatttgagtgctgaaatatttccagaatcaatggtggtgctaaactatctccatgtttctagcatttttaatagtggagttggtttgtttttaatctcatcacaaaaatgcagtgcccttggggaagggaccagccccttggcctgccactttccaggtgtcctttatcactttgacgggactctttggtctgcagaaaatgctctgtcttggcatgcttctagactgtaagatttgggttttgttttgtattttatgtttacatgcatcttatatttccctgaaaactaaataaagttttgggcctttttaaccgaa

SEQ ID NO: 325416 - DNA, 4051 bp, Homo sapiens
cttccttgtactatccctatgaggcataatgattacaagctccatctgcgtacgacttacagacctggaatcgctcagagagcaagaggcagggagcggggtgctgaaggaatcctagctgtggaacaggtgggtgggttggtggagtttgatcttgtggcgttctcctctcccccttctttgggaagatgataggggtccctgccagatccacccagaagaaagggattcaggcatggggcccttgacctctaggccccagtccctggagcagaggcaggccctcgggagctgttccttgttttgatttctgttgtggtgcagccagctgctcagagagacctggcctaaaaatgactcccagcagccctctctcaccccagtgtcctgatatttgggctgtgatccttctggtgtatgtttgaatctttctaaaactgggtgccctcagttcagtttctaggcaggaagcctagaagtcaccagatctttttgggggatgtgagaaccttgagccgcgcacaccctggtgagacaccaattcccacaagcctgcagcagggcctggggctgagcctgggctgcccattcatctcagcgacttcagcctgagaagtgagccctgcctgggctccacacccagagagtccatacaaattctgctccgggaagagtcggggggtctattcaagtttctctgcagacaaaacttcccacaacaggtaccaatctggcctccttcctcagcaccggtagagaaagcaacagaatgggaagtttcctctgggttggagcctcagagctctgcccctcaaggtgacagggacgtccctgtggcttgttccctccacctccagtactgtatgcttgctacttcaaccccctatttggtgaatttctgcacagacacagatctctgtgcctggaatgggactgtgccctgtgcgggtctctcccttggcgtatatccatctagatatttagtctttgagaatctcaaagcagagctctctgggaagagaactgtccacattgctaaataattaagattccctcacttttttgagggccatgtgttgtgagagagagagagagagagagagtgtgtgtgtgtgtgtgtgtgtgtgtgtgtctgtgtatgcaagtgttggtaacttcccacttgaactaaataacatggggttagagaaaaaaaaataccaggcaagctgtctccattgaacaagtccttggcaatgggcaggtcccaagggactcacagcttctggcagcaagtgtgtcattcacacacatcattctggctggagagtgcaatgtgtcatttttttttctttttgtaattattttattaagtatttagttggaaatttcacactggcattaacaggtctagcataagtggcctaggcagtcatcccaggctccaaaatgaagatgtgcaaaagagatgccactgggaatagaaacactgagttggttcagttaggtcatcccctgcagacgtgtcatcgagcaggctgactcccacccctcagccatgccatgggtatgagaagccccttataatgaaagctgccagccctttcgtccttgtttcagagggtgggtcaggtggttggggtgagaacttgctcacggtgcacccaacaagacctgcaggtgcatataagtttagtcccaactgcagggccagaccaaacacttcctgggaagtgtgtggagggctgtgctagaccttcctgagtttctggctaaatcatcagccctgtttggtgcagtctcatgtctctgtggttcccaagctgcatgatcagagccagtgagaagacaggatcagtgacccacagctttggggaaaaacagccccactgttaacttccctcctgcaaacctgggtccccaggccataaggtgggcacactggtgcttacagactgggtggagagccctaccttccaaggtcttgatcccagcctgcctataaggttgggattagcatgcaatcccccttccccaatcctgtctttttaaaatctcaagtttgcacttaaccttgacaacagcaccctctcctactccagtcctagaactcagtggccttagagaatggggtcccctgcactgaaggtccccgccttgctcccagttccatcctggccaataggctgcgcctcaagaggtgaaagagaaaaaagggagggagggaggaagaattatttagaacaaaaggatggctcgagcacgttagaggcaagtgagaggcacgttggtgagaagagcatgtgcatgtttggggtagctggggcctactgtcccttcattagggaaggaggcttccagaagcggatgtcttctagaaagaaaaattgtgtgaaggctgaaaaggggcttggagttttgtctttgttgattagaaagaaggaagaagtcagctctgagtgtttcaggaagaagagagcaggtagaaagggaatttagtgatttaacacccaagggtccagccatagcaggttggaaaatcctccaaatttggccacagaagctggctaggaaaaaactgccactcattgggccacacgctgggtccccatcagttctcaatgaatggtcattgatttacttagcagagagaagtcaccagccacaaaccaatctttgagtttgcaggccctgattccagaatatatgcatccagctcccgggttctcagctggttttgcccacttccctttgactgtccaatccaaagccagtctctcaagttgtatggctcaaagagcagtgaccacaatgggtcatacagtagggacccacctccacaaattagaaccagagttcagactccattgggcacatctgggaggaaggcaacctcctttgtcgtcttgttggtaccagtcattctcaagtatctctgacacctgtggtggttcagtttgctgagcctgccacctggtatgaattagactgggtgtgatgaacattcatccatggatataccctaccattttgcgttgccttataaccaaggcacactccccataagagtttactgcagagaaagaacagcaaaacagccaccctccttgaatttacaactcattatctgcaacaggttttctttaaatccaagacacaggatgggaaatgggtttccccaccaggtactcagaggtctgcaggaagtgactcccgggcaaggcagacttcagtaatccctgaagcgtgagcatgtggactgcatggctgggtggggactggtggatgtctctggagctccagaaccttggagaattcctcatggaattcccctcccagctcttagtgggctctgtggggtcaggaggagcccttcctccaggttttccttctttcctcctcagcagagaaactggagaaaggacattaaactcagtgcagtcgatttgagtgctgaaatatttccagaatcaatggtggtgctaaactatctccatgtttctagcatttttaatagtggagttggtttgtttttaatctcatcacaaaaatgcagtgcccttggggaagggaccagccccttggcctgccactttccaggtgtcctttatcactttgacgggactctttggtctgcagaaaatgctctgtcttggcatgcttctagactgtaagatttgggttttgttttgtattttatgtttacatgcatcttatatttccctgaaaactaaataaagttttgggcctttttaaccgaaaaaaaaacaaaaaacagacacgcccgaaaacaacaagaccgcagcacaacggataccaccacaccaagacgggcggggcccgccccacaagaagtcccccccggagggggggccccaaacggacaacggcgagcacgcccagtcgtggtgtggacaaaaacgcgggcgcccacacagaggggaccggcgcacacacagcggcagaaaggagccgcgcgcgcggcagcctgcaaacagaggctggtagacggcggcgcaacccggggccagcgggggtgaccgtaggaacgaggccccccaacttggggaga

SEQ ID NO: 325417 - DNA, 3853 bp, Homo sapiens
cttccttgtactatccctatgaggcataatgattacaagctccatctgcgtacgacttacagacctggaatcgctcagagagcaagaggcagggagcggggtgctgaaggaatcctagctgtggaacaggtgggtgggttggtggagtttgatcttgtggcgttctcctctcccccttctttgggaagatgataggggtccctgccagatccacccagaagaaagggattcaggcatggggcccttgacctctaggccccagtccctggagcagaggcaggccctcgggagctgttccttgttttgatttctgttgtggtgcagccagctgctcagagagacctggcctaaaaatgactcccagcagccctctctcaccccagtgtcctgatatttgggctgtgatccttctggtgtatgtttgaatctttctaaaactgggtgccctcagttcagtttctaggcaggaagcctagaagtcaccagatctttttgggggatgtgagaaccttgagccgcgcacaccctggtgagacaccaattcccacaagcctgcagcagggcctggggctgagcctgggctgcccattcatctcagcgacttcagcctgagaagtgagccctgcctgggctccacacccagagagtccatacaaattctgctccgggaagagtcggggggtctattcaagtttctctgcagacaaaacttcccacaacaggtaccaatctggcctccttcctcagcaccggtagagaaagcaacagaatgggaagtttcctctgggttggagcctcagagctctgcccctcaaggtgacagggacgtccctgtggcttgttccctccacctccagtactgtatgcttgctacttcaaccccctatttggtgaatttctgcacagacacagatctctgtgcctggaatgggactgtgccctgtgcgggtctctcccttggcgtatatccatctagatatttagtctttgagaatctcaaagcagagctctctgggaagagaactgtccacattgctaaataattaagattccctcacttttttgagggccatgtgttgtgagagagagagagagagagagagtgtgtgtgtgtgtgtgtgtgtgtgtgtgtctgtgtatgcaagtgttggtaacttcccacttgaactaaataacatggggttagagaaaaaaaaataccaggcaagctgtctccattgaacaagtccttggcaatgggcaggtcccaagggactcacagcttctggcagcaagtgtgtcattcacacacatcattctggctggagagtgcaatgtgtcatttttttttctttttgtaattattttattaagtatttagttggaaatttcacactggcattaacaggtctagcataagtggcctaggcagtcatcccaggctccaaaatgaagatgtgcaaaagagatgccactgggaatagaaacactgagttggttcagttaggtcatcccctgcagacgtgtcatcgagcaggctgactcccacccctcagccatgccatgggtatgagaagccccttataatgaaagctgccagccctttcgtccttgtttcagagggtgggtcaggtggttggggtgagaacttgctcacggtgcacccaacaagacctgcaggtgcatataagtttagtcccaactgcagggccagaccaaacacttcctgggaagtgtgtggagggctgtgctagaccttcctgagtttctggctaaatcatcagccctgtttggtgcagtctcatgtctctgtggttcccaagctgcatgatcagagccagtgagaagacaggatcagtgacccacagctttggggaaaaacagccccactgttaacttccctcctgcaaacctgggtccccaggccataaggtgggcacactggtgcttacagactgggtggagagccctaccttccaaggtcttgatcccagcctgcctataaggttgggattagcatgcaatcccccttccccaatcctgtctttttaaaatctcaagtttgcacttaaccttgacaacagcaccctctcctactccagtcctagaactcagtggccttagagaatggggtcccctgcactgaaggtccccgccttgctcccagttccatcctggccaataggctgcgcctcaagaggtgaaagagaaaaaagggagggagggaggaagaattatttagaacaaaaggatggctcgagcacgttagaggcaagtgagaggcacgttggtgagaagagcatgtgcatgtttggggtagctggggcctactgtcccttcattagggaaggaggcttccagaagcggatgtcttctagaaagaaaaattgtgtgaaggctgaaaaggggcttggagttttgtctttgttgattagaaagaaggaagaagtcagctctgagtgtttcaggaagaagagagcaggtagaaagggaatttagtgatttaacacccaagggtccagccatagcaggttggaaaatcctccaaatttggccacagaagctggctaggaaaaaactgccactcattgggccacacgctgggtccccatcagttctcaatgaatggtcattgatttacttagcagagagaagtcaccagccacaaaccaatctttgagtttgcaggccctgattccagaatatatgcatccagctcccgggttctcagctggttttgcccacttccctttgactgtccaatccaaagccagtctctcaagttgtatggctcaaagagcagtgaccacaatgggtcatacagtagggacccacctccacaaattagaaccagagttcagactccattgggcacatctgggaggaaggcaacctcctttgtcgtcttgttggtaccagtcattctcaagtatctctgacacctgtggtggttcagtttgctgagcctgccacctggtatgaattagactgggtgtgatgaacattcatccatggatataccctaccattttgcgttgccttataaccaaggcacactccccataagagtttactgcagagaaagaacagcaaaacagccaccctccttgaatttacaactcattatctgcaacaggttttctttaaatccaagacacaggatgggaaatgggtttccccaccaggtactcagaggtctgcaggaagtgactcccgggcaaggcagacttcagtaatccctgaagcgtgagcatgtggactgcatggctgggtggggactggtggatgtctctggagctccagaaccttggagaattcctcatggaattcccctcccagctcttagtgggctctgtggggtcaggaggagcccttcctccaggttttccttctttcctcctcagcagagaaactggagaaaggacattaaactcagtgcagtcgatttgagtgctgaaatatttccagaatcaatggtggtgctaaactatctccatgtttctagcatttttaatagtggagttggtttgtttttaatctcatcacaaaaatgcagtgcccttggggaagggaccagccccttggcctgccactttccaggtgtcctttatcactttgacgggactctttggtctgcagaaaatgctctgtcttggcatgcttctagactgtaagatttgggttttgttttgtattttatgtttacatgcatcttatatttccctgaaaactaaataaagttttgggcctttttaaccgaactacacaaaacaacaacccgcaacaaacaacacaccacaaaacacaaccaacaaacgaacaacacaaacaaaaacaaaagaagggggaaaacacccgcagggacaaagaacaa

SEQ ID NO: 325418 - DNA, 3816 bp, Homo sapiens
cttccttgtactatccctatgaggcataatgattacaagctccatctgcgtacgacttacagacctggaatcgctcagagagcaagaggcagggagcggggtgctgaaggaatcctagctgtggaacaggtgggtgggttggtggagtttgatcttgtggcgttctcctctcccccttctttgggaagatgataggggtccctgccagatccacccagaagaaagggattcaggcatggggcccttgacctctaggccccagtccctggagcagaggcaggccctcgggagctgttccttgttttgatttctgttgtggtgcagccagctgctcagagagacctggcctaaaaatgactcccagcagccctctctcaccccagtgtcctgatatttgggctgtgatccttctggtgtatgtttgaatctttctaaaactgggtgccctcagttcagtttctaggcaggaagcctagaagtcaccagatctttttgggggatgtgagaaccttgagccgcgcacaccctggtgagacaccaattcccacaagcctgcagcagggcctggggctgagcctgggctgcccattcatctcagcgacttcagcctgagaagtgagccctgcctgggctccacacccagagagtccatacaaattctgctccgggaagagtcggggggtctattcaagtttctctgcagacaaaacttcccacaacaggtaccaatctggcctccttcctcagcaccggtagagaaagcaacagaatgggaagtttcctctgggttggagcctcagagctctgcccctcaaggtgacagggacgtccctgtggcttgttccctccacctccagtactgtatgcttgctacttcaaccccctatttggtgaatttctgcacagacacagatctctgtgcctggaatgggactgtgccctgtgcgggtctctcccttggcgtatatccatctagatatttagtctttgagaatctcaaagcagagctctctgggaagagaactgtccacattgctaaataattaagattccctcacttttttgagggccatgtgttgtgagagagagagagagagagagagtgtgtgtgtgtgtgtgtgtgtgtgtgtgtctgtgtatgcaagtgttggtaacttcccacttgaactaaataacatggggttagagaaaaaaaaataccaggcaagctgtctccattgaacaagtccttggcaatgggcaggtcccaagggactcacagcttctggcagcaagtgtgtcattcacacacatcattctggctggagagtgcaatgtgtcatttttttttctttttgtaattattttattaagtatttagttggaaatttcacactggcattaacaggtctagcataagtggcctaggcagtcatcccaggctccaaaatgaagatgtgcaaaagagatgccactgggaatagaaacactgagttggttcagttaggtcatcccctgcagacgtgtcatcgagcaggctgactcccacccctcagccatgccatgggtatgagaagccccttataatgaaagctgccagccctttcgtccttgtttcagagggtgggtcaggtggttggggtgagaacttgctcacggtgcacccaacaagacctgcaggtgcatataagtttagtcccaactgcagggccagaccaaacacttcctgggaagtgtgtggagggctgtgctagaccttcctgagtttctggctaaatcatcagccctgtttggtgcagtctcatgtctctgtggttcccaagctgcatgatcagagccagtgagaagacaggatcagtgacccacagctttggggaaaaacagccccactgttaacttccctcctgcaaacctgggtccccaggccataaggtgggcacactggtgcttacagactgggtggagagccctaccttccaaggtcttgatcccagcctgcctataaggttgggattagcatgcaatcccccttccccaatcctgtctttttaaaatctcaagtttgcacttaaccttgacaacagcaccctctcctactccagtcctagaactcagtggccttagagaatggggtcccctgcactgaaggtccccgccttgctcccagttccatcctggccaataggctgcgcctcaagaggtgaaagagaaaaaagggagggagggaggaagaattatttagaacaaaaggatggctcgagcacgttagaggcaagtgagaggcacgttggtgagaagagcatgtgcatgtttggggtagctggggcctactgtcccttcattagggaaggaggcttccagaagcggatgtcttctagaaagaaaaattgtgtgaaggctgaaaaggggcttggagttttgtctttgttgattagaaagaaggaagaagtcagctctgagtgtttcaggaagaagagagcaggtagaaagggaatttagtgatttaacacccaagggtccagccatagcaggttggaaaatcctccaaatttggccacagaagctggctaggaaaaaactgccactcattgggccacacgctgggtccccatcagttctcaatgaatggtcattgatttacttagcagagagaagtcaccagccacaaaccaatctttgagtttgcaggccctgattccagaatatatgcatccagctcccgggttctcagctggttttgcccacttccctttgactgtccaatccaaagccagtctctcaagttgtatggctcaaagagcagtgaccacaatgggtcatacagtagggacccacctccacaaattagaaccagagttcagactccattgggcacatctgggaggaaggcaacctcctttgtcgtcttgttggtaccagtcattctcaagtatctctgacacctgtggtggttcagtttgctgagcctgccacctggtatgaattagactgggtgtgatgaacattcatccatggatataccctaccattttgcgttgccttataaccaaggcacactccccataagagtttactgcagagaaagaacagcaaaacagccaccctccttgaatttacaactcattatctgcaacaggttttctttaaatccaagacacaggatgggaaatgggtttccccaccaggtactcagaggtctgcaggaagtgactcccgggcaaggcagacttcagtaatccctgaagcgtgagcatgtggactgcatggctgggtggggactggtggatgtctctggagctccagaaccttggagaattcctcatggaattcccctcccagctcttagtgggctctgtggggtcaggaggagcccttcctccaggttttccttctttcctcctcagcagagaaactggagaaaggacattaaactcagtgcagtcgatttgagtgctgaaatatttccagaatcaatggtggtgctaaactatctccatgtttctagcatttttaatagtggagttggtttgtttttaatctcatcacaaaaatgcagtgcccttggggaagggaccagccccttggcctgccactttccaggtgtcctttatcactttgacgggactctttggtctgcagaaaatgctctgtcttggcatgcttctagactgtaagatttgggttttgttttgtattttatgtttacatgcatcttatatttccctgaaaactaaataaagttttgggcctttttaaccgaaaaaaaaaacaggggggcgctaaaaatccccggggcccatacctaccccctcttgacaagggccccaaaggggaaac

SEQ ID NO: 325419 - DNA, 3808 bp, Homo sapiens
cttccttgtactatccctatgaggcataatgattacaagctccatctgcgtacgacttacagacctggaatcgctcagagagcaagaggcagggagcggggtgctgaaggaatcctagctgtggaacaggtgggtgggttggtggagtttgatcttgtggcgttctcctctcccccttctttgggaagatgataggggtccctgccagatccacccagaagaaagggattcaggcatggggcccttgacctctaggccccagtccctggagcagaggcaggccctcgggagctgttccttgttttgatttctgttgtggtgcagccagctgctcagagagacctggcctaaaaatgactcccagcagccctctctcaccccagtgtcctgatatttgggctgtgatccttctggtgtatgtttgaatctttctaaaactgggtgccctcagttcagtttctaggcaggaagcctagaagtcaccagatctttttgggggatgtgagaaccttgagccgcgcacaccctggtgagacaccaattcccacaagcctgcagcagggcctggggctgagcctgggctgcccattcatctcagcgacttcagcctgagaagtgagccctgcctgggctccacacccagagagtccatacaaattctgctccgggaagagtcggggggtctattcaagtttctctgcagacaaaacttcccacaacaggtaccaatctggcctccttcctcagcaccggtagagaaagcaacagaatgggaagtttcctctgggttggagcctcagagctctgcccctcaaggtgacagggacgtccctgtggcttgttccctccacctccagtactgtatgcttgctacttcaaccccctatttggtgaatttctgcacagacacagatctctgtgcctggaatgggactgtgccctgtgcgggtctctcccttggcgtatatccatctagatatttagtctttgagaatctcaaagcagagctctctgggaagagaactgtccacattgctaaataattaagattccctcacttttttgagggccatgtgttgtgagagagagagagagagagagagtgtgtgtgtgtgtgtgtgtgtgtgtgtgtctgtgtatgcaagtgttggtaacttcccacttgaactaaataacatggggttagagaaaaaaaaataccaggcaagctgtctccattgaacaagtccttggcaatgggcaggtcccaagggactcacagcttctggcagcaagtgtgtcattcacacacatcattctggctggagagtgcaatgtgtcatttttttttctttttgtaattattttattaagtatttagttggaaatttcacactggcattaacaggtctagcataagtggcctaggcagtcatcccaggctccaaaatgaagatgtgcaaaagagatgccactgggaatagaaacactgagttggttcagttaggtcatcccctgcagacgtgtcatcgagcaggctgactcccacccctcagccatgccatgggtatgagaagccccttataatgaaagctgccagccctttcgtccttgtttcagagggtgggtcaggtggttggggtgagaacttgctcacggtgcacccaacaagacctgcaggtgcatataagtttagtcccaactgcagggccagaccaaacacttcctgggaagtgtgtggagggctgtgctagaccttcctgagtttctggctaaatcatcagccctgtttggtgcagtctcatgtctctgtggttcccaagctgcatgatcagagccagtgagaagacaggatcagtgacccacagctttggggaaaaacagccccactgttaacttccctcctgcaaacctgggtccccaggccataaggtgggcacactggtgcttacagactgggtggagagccctaccttccaaggtcttgatcccagcctgcctataaggttgggattagcatgcaatcccccttccccaatcctgtctttttaaaatctcaagtttgcacttaaccttgacaacagcaccctctcctactccagtcctagaactcagtggccttagagaatggggtcccctgcactgaaggtccccgccttgctcccagttccatcctggccaataggctgcgcctcaagaggtgaaagagaaaaaagggagggagggaggaagaattatttagaacaaaaggatggctcgagcacgttagaggcaagtgagaggcacgttggtgagaagagcatgtgcatgtttggggtagctggggcctactgtcccttcattagggaaggaggcttccagaagcggatgtcttctagaaagaaaaattgtgtgaaggctgaaaaggggcttggagttttgtctttgttgattagaaagaaggaagaagtcagctctgagtgtttcaggaagaagagagcaggtagaaagggaatttagtgatttaacacccaagggtccagccatagcaggttggaaaatcctccaaatttggccacagaagctggctaggaaaaaactgccactcattgggccacacgctgggtccccatcagttctcaatgaatggtcattgatttacttagcagagagaagtcaccagccacaaaccaatctttgagtttgcaggccctgattccagaatatatgcatccagctcccgggttctcagctggttttgcccacttccctttgactgtccaatccaaagccagtctctcaagttgtatggctcaaagagcagtgaccacaatgggtcatacagtagggacccacctccacaaattagaaccagagttcagactccattgggcacatctgggaggaaggcaacctcctttgtcgtcttgttggtaccagtcattctcaagtatctctgacacctgtggtggttcagtttgctgagcctgccacctggtatgaattagactgggtgtgatgaacattcatccatggatataccctaccattttgcgttgccttataaccaaggcacactccccataagagtttactgcagagaaagaacagcaaaacagccaccctccttgaatttacaactcattatctgcaacaggttttctttaaatccaagacacaggatgggaaatgggtttccccaccaggtactcagaggtctgcaggaagtgactcccgggcaaggcagacttcagtaatccctgaagcgtgagcatgtggactgcatggctgggtggggactggtggatgtctctggagctccagaaccttggagaattcctcatggaattcccctcccagctcttagtgggctctgtggggtcaggaggagcccttcctccaggttttccttctttcctcctcagcagagaaactggagaaaggacattaaactcagtgcagtcgatttgagtgctgaaatatttccagaatcaatggtggtgctaaactatctccatgtttctagcatttttaatagtggagttggtttgtttttaatctcatcacaaaaatgcagtgcccttggggaagggaccagccccttggcctgccactttccaggtgtcctttatcactttgacgggactctttggtctgcagaaaatgctctgtcttggcatgcttctagactgtaagatttgggttttgttttgtattttatgtttacatgcatcttatatttccctgaaaactaaataaagttttgggcctttttaaccgaagaacggaatcacctcttaattctccctgtcaccaaaaacacccatccagctgaacagccaatgtccca

SEQ ID NO: 325420 - DNA, 1032 bp, Homo sapiens
  misc_feature (18)..(18): n is a, c, g, or t
cgagctcggtaccccttntggggtctttgtccaatccaaagccagtctctcaagttgtatggctcaaagagcagtgaccacaatgggtcatacagtagggacccacctccacaaattagaaccagagttcagactccattgggcacatctgggaggaaggcaacctcctttgtcgtcttgttggtaccagtcattctcaagtatctctgacacctgtggtggttcagtttgctgagcctgccacctggtatgaattagactgggtgtgatgaacattcatccatggatataccctaccattttgcgttgccttataaccaaggcacactccccataagagtttactgcagagaaagaacagcaaaacagccaccctccttgaatttacaactcattatctgcaacaggttttctttaaatccaagacacaggatgggaaatgggtttccccaccaggtactcagaggtctgcaggaagtgactcccgggcaaggcagacttcagtaatccctgaagcgtgagcatgtggactgcatggctgggtggggactggtggatgtctctggagctccagaaccttggagaattcctcatggaattcccctcccagctcttagtgggctctgtggggtcaggaggagcccttcctccaggttttccttctttcctcctcagcagagaaactggagaaaggacattaaactcagtgcagtcgatttgagtgctgaaatatttccagaatcaatggtggtgctaaactatctccatgtttctagcatttttaatagtggagttggtttgtttttaatctcatcacaaaaatgcagtgcccttggggaagggaccagccccttggcctgccactttccaggtgtcctttatcactttgacgggactctttggtctgcagaaaatgctctgtcttggcatgcttctagactgtaagatttgggttttgttttgtattttatgtttacatgcatcttatatttccctgaaaactaaataaagttttgggcctttttaaccgaa

SEQ ID NO: 325421 - DNA, 497 bp, Homo sapiens
gaattcctcatggaattctccaaggttctggagctccagaaccttggagaattcctcatggaattcccctcccagctcttagtgggctctgtggggtcaggaggagcccttcctccaggttttccttctttcctcctcagcagagaaactggagaaaggacattaaactcagtgcagtcgatttgagtgctgaaatatttccagaatcaatggtggtgctaaactatctccatgtttctagcatttttaatagtggagttggtttgtttttaatctcatcacaaaaatgcagtgcccttggggaagggaccagccccttggcctgccactttccaggtgtcctttatcactttgacgggactctttggtctgcagaaaatgctctgtcttggcatgcttctagactgtaagatttgggttttgttttgtattttatgtttacatgcatcttatatttccctgaaaactaaataaagttttgggcctttttaaccgaa

SEQ ID NO: 325422 - DNA, 1103 bp, Homo sapiens
cttccttgtactatccctatgaggcataatgattacaagctccatctgcgtacgacttacagacctggaatcgctcagagagcaagaggcagggagcggggtgctgaaggaatcctagctgtggaacaggtgggtgggttggtggagtttgatcttgtggcgttctcctctcccccttctttgggaagatgataggggtccctgccagatccacccagaagaaagggattcaggcatggggcccttgacctctaggccccagtccctggagcagaggcaggccctcgggagctgttccttgttttgatttctgttgtggtgcagccagctgctcagagagacctggcctaaaaatgactcccagcagccctctctcaccccagtgtcctgatatttgggctgtgatccttctggtgtatgtttgaatctttctaaaactgggtgccctcagttcagtttctaggcaggaagcctagaagtcaccagatctttttgggggatgtgagaaccttgagccgcgcacaccctggtgagacaccaattcccacaagcctgcagcagggcctggggctgagcctgggctgcccattcatctcagcgacttcagcctgagaagtgagccctgcctgggctccacacccagagagtccatacaaattctgctccgggaagagtcggggggtctattcaagtttctctgcagacaaaacttcccttcctccaggttttccttctttcctcctcagcagagaaactggagaaaggacattaaactcagtgcagtcgatttgagtgctgaaatatttccagaatcaatggtggtgctaaactatctccatgtttctagcatttttaatagtggagttggtttgtttttaatctcatcacaaaaatgcagtgcccttggggaagggaccagccccttggcctgccactttccaggtgtcctttatcactttgacgggactctttggtctgcagaaaatgctctgtcttggcatgcttctagactgtaagatttgggttttgttttgtattttatgtttacatgcatcttatatttccctgaaaactaaataaagttttgggcctttttaaccgaa

SEQ ID NO: 325423 - DNA, 825 bp, Homo sapiens
agacaggaaaagtgcaatattaccaagatggatgccagggctcattggggacaatggagggaataccagtggcgctcagagagcaagaggcagggagcggggtgctgaaggaatcctagctgtggaacaggtgggtgggttggtggagtttgatcttgtggcgttctcctctcccccttctttgggaagatgataggggtccctgccagatccacccagaagaaagggattcaggcatggggcccttgacctctaggccccagtccctggagcagaggcaggccctcgggagctgttccttgttttgatttctgttgtggtgcagccagctgctcagagagacctggcctaaaaatgactcccagcagccctctctcaccccagtgtcctgatatttgggctgtgatccttctggtgtatgtttgaatctttctaaaactgggtgccctcagttcagtttctaggcaggaagcctagaagtcaccagatctttttgggggatgtgagaaccttgagccgcgcacaccctggtgagacaccaattcccacaagcctgcagcagggcctggggctgagcctgggctgcccattcatctcagcgacttcagcctgagaagtgagccctgcctgggctccacacccagagagtccatacaaattctgctccgggaagagtcggggggtctattcaagtttctctgcagacaaaacttcccacaacaggtaccaatctggcctccttcctcagcaccggtagagaaagcaacagaatgggaagtttcctctgggttggagcctcagagctctgcccctcaaggtgacagg

SEQ ID NO: 325424 - DNA, 808 bp, Homo sapiens
gaattcctcatggaattctccaaggttctggagctccagaaccttggagaattcctcatggaattcccctcccagctcttagtgggctctgtggggtcaggaggagcccttcctccaggttttccttctttcctcctcagcagagaaactggagaaaggacattaaactcagtgcagtcgatttgagtgctgaaatatttccagaatcaatggtggtgctaaactatctccatgtttctagcatttttaatagtggagttggtttgtttttaatctcatcacaaaaatgcagtgcccttggggaagggaccagccccttggcctgccactttccaggtgtcctttatcactttgacgggactctttggtctgcagaaaatgctctgtcttggcatgcttctagactgtaagatttgggttttgttttgtattttatgtttacatgcatcttatatttccctgaaaactaaataaagttttgggcctttttaaccgaaaaaaaaacaaaaaacagacacgcccgaaaacaacaagaccgcagcacaacggataccaccacaccaagacgggcggggcccgccccacaagaagtcccccccggagggggggccccaaacggacaacggcgagcacgcccagtcgtggtgtggacaaaaacgcgggcgcccacacagaggggaccggcgcacacacagcggcagaaaggagccgcgcgcgcggcagcctgcaaacagaggctggtagacggcggcgcaacccggggccagcgggggtgaccgtaggaacgaggccccccaacttggggaga

SEQ ID NO: 325425 - DNA, 722 bp, Homo sapiens
  misc_feature (708)..(708): n is a, c, g, or t
gggaggctgaggtgggagtatcacctgagccctggaggttgaggctgcaatgagagctgtgatcatgccactgcactccagcctgggcaacagatgagaccctgtgtcacaacaaggaatttttagaaggtgctttttatattactcttcacagagttaaattttcagaggatttagtattattgaactaagtttcataagtgtattttaagcaagtaaatctctaatgtaggaaaatccccaaaatggtagcatttactaatgttttatatggtaatttttgaaaaatatatctgatatttcttcagtaaaaatggtgttgttttaataacttaataagaatgtttaaagattctttaagtctggcttatctagctaatgtgggcctattaaataataggcagacttctgccttccttatattctttagatcttttcaaatactccattccaatatccatcaaaagacttctctttatgccacttattatctatactagtttttaatgttcaattactacaagattataattactgtttttattcatgttcccaagaaaaatacataagattcacacccaacacacttcgaaatttatttcactccctttgactatatgtgattatcaaaaaagtatttttcaagatattaaaaataagtaaaggaaaatgaaatatttttaggacattcgactttcatacggtagntaaccccacaggcg

SEQ ID NO: 325426 - DNA, 345 bp, Homo sapiens
atgtggctcaaactcttagttggaagagagtaagaattgaggtaatccgcccaggtacggtggctcacgcctgtaatcccagcactttgggaggccgaggcgggcagatcgcttgaggtcaggagttagagaccagcctgcccgacatggtgaagccccatctttactaaaaatacaaaaattagccgggtgaggtggtgctcacctttaatcccagcgactcgggaggctgaggcaggagaatctcttgaacctgggaagcggaggttgcagtcagctgagatccccccagtgcactccaacctgggtgacaatgaggctctgtctcaaaagagaaaaacaaag

SEQ ID NO: 325427 - DNA, 480 bp, Homo sapiens
gtataatgtcagtgctaagtagtattttttattaataaaaagtcttggtttcattggcaatgtcagacttttagggtagataacaagtattctgttggcacatttaagaatggcctttgtaggagggaagagttcagatagtttatatctggattttttttttttttttaagaaagagttttgctctgtcactccagcctgggcgttgcagtgagactccgtctcaacaacaacaaaaaggtggatacatgtcaaaagggcacaggagccacttgaaggattatacttgctaaatctgtgtcaattatcaaaataaactggtagcaacgttacaactcactgaataagataccatgattccatgttgacttaaaaatggagagaagagaaagctctaacttgaatgtcagctaatttaaggtgaaaggattttatgtgttagaaaaatcaccattttgcaaactagttttcagaatcctt

SEQ ID NO: 325428 - DNA, 4018 bp, Homo sapiens
tcggagcgagcgcccgagatccctttcccagagtgctctgcgccgtgaagaagcggctcccggggactgggggcattttgtgttggctggagctggagtaacaagatggcgtcgtccgcggagtgacaggggtccctctgggccggagccggcggcagtggtggcagcggtatcgccgccctagctcaccgcgccccttttccagcccgcgacgtcgccgcgcaagcgaggcagcggcggccgccgagaaacaagtggcccagcctggtaaccgccgagaagcccttcacaaactgcggcctggcaaaaagaaacctgactgagcggcggtgatcaggttcccctctgctgattctgggccccgaaccccggtaaaggcctccgtgttccgtttcctgccgccctcctccgtagccttgcctagtgtaggagccccgaggcctccgtcctcttcccagaggtgtcggggcttggccccagcctccatcttcgtctctcaggatggcgagtagcagcggctccaaggctgaattcattgtcggagggaaatataaactggtacggaagatcgggtctggctccttcggggacatctatttggcgatcaacatcaccaacggcgaggaagtggcagtgaagctagaatctcagaaggccaggcatccccagttgctgtacgagagcaagctctataagattcttcaaggtggggttggcatcccccacatacggtggtatggtcaggaaaaagactacaatgtactagtcatggatcttctgggacctagcctcgaagacctcttcaatttctgttcaagaaggttcacaatgaaaactgtacttatgttagctgaccagatgatcagtagaattgaatatgtgcatacaaagaattttatacacagagacattaaaccagataacttcctaatgggtattgggcgtcactgtaataagttattccttattgattttggtttggccaaaaagtacagagacaacaggacaaggcaacacataccatacagagaagataaaaacctcactggcactgcccgatatgctagcatcaatgcacatcttggtattgagcagagtcgccgagatgacatggaatcattaggatatgttttgatgtattttaatagaaccagcctgccatggcaagggctaaaggctgcaacaaagaaacaaaaatatgaaaagattagtgaaaagaagatgtccacgcctgttgaagttttatgtaaggggtttcctgcagaatttgcgatgtacttaaactattgtcgtgggctacgctttgaggaagccccagattacatgtatctgaggcagctattccgcattcttttcaggaccctgaaccatcaatatgactacacatttgattggacaatgttaaagcagaaagcagcacagcaggcagcctcttccagtgggcagggtcagcaggcccaaacccccacaggtttctaagcatgaattgaggaacagaagaagcagagcagatgatcggagcagcatttgtttctccccaaatctagaaattttagttcatatgtacactagccagtggttgtggacaaccatttacttggtgtaaagaacttaatttcagtataaactgactctgggcagcattggtgatgctgtatcctgagttgtagcctctgtaattgtgaatattaactgagatagtgaaacatggtgtccggttttctattgcattttttcaagtggaaaagttaactaaatggttgacacacaaaaattggtggagaaattgtgcatatgccaattttttgttaaaaccttttgttttgaactatactgctttgagatctcatttcagaagaacggcatgaacagtcttcagccacagttgtgatggttgttaaatgctcacaattgtgcattcttagggtttttccatccctggggtttgcaagttgttcacttaaaacattcttaaaatggttggcttcttgtctgcaagccagctgatatggtagcaaccaaagattccagtgtttgagcatatgaaagactctgcctgcttaattgtgctagaaataacagcatctaaagtgaagacttaagaaaaacttagtgactactagattatccttaggactctgcattaactctataatgttcttggtattaaaaaaaaagcatatttgtcacagaaatttagttaacatcttacaactgaacatgtatgtatgttgcttagataaatgtaatcactgtaaacatctatatgatctgggattttgtttttattttgaaatgggagcttttttgtttacaagttcattaaaaactaaaaactgtttctgtaaggaaatgagattttttttaaacaacaaaaaatgccttgctgactcactattaaataaaaatctccccaattttttgatagactacttcaagccatttgttacatggtattcctttgcaagtcaatttaggtttcgtgttataacttttcctctttttttaagaaaaatgaaaaaagtaattcttttgtctgaaggggaaaggcattctttcatttttttctttttttttttttttttttatgacttgcaggcacaatatctagtactgcaactgccagaacttggtattgtagctgctgcccgctgactagcagctggactgattttgaataaaaatgaaagcattaaagggtttccctacaaaacatttttctttaaaatacttttgaaatggctataagcagttgactttcacccttggagagcatcacactgtgtgaggttcagtgattgttgaccctccccagcccctcctgcttctttaagttatctgtgtgcgtgcgcttcctctcaatcttctttgcacgctcatttctttttctctgacccatgagaaaggaaaacttactgatgataatttttaaatagtgtaatttattcatttatagcatgtcaggataaattaaaagaacatttgtctggaaatgctgccgggagcctattgtgtaaatgtaggtattttgtaaaataaccttgaaattgtaaattgacacgtgtttggtcagattgtgtcaagtttaatttgttttgttttcttttttcttttttttatttgaaaactactttagcaataattaattccatgattatcacattctgccattaagggatattagtaccgtaatactgaagaaattttattaagtctgaacttctggggtaggcagcttctttgtttcttttctatccacccttgtcggttgaggtatttgtttcttgactaataaaccctttgatacttttagccagaaatcagtctcataaagctatttttgagtatagtttgtgtaaaataaaaatgtttagctttggtaataacttccaagctgaactccctctagcaagatatttttcagtgcttttatttactatgcacttagactatgcactttttctgaaatatttttgtaacacttttttgtatttttgccatttgaaaaggttgtggtgtagttggtctgtaattaagttgcagatttaaaactgctgttagctttgtaaatcaaaatataggtgttttttgtcctggtatatcgtcattccatctgcagctggagctggaatcccattgatcttctagctaccattcattttcttcactgttcacaaaagaagagtgtgaaattcagtgaatgctgttactaatcctgttacgagatgaatctcatttcaccaaaattaaattatgtttttccgctaaaatgatgatacaagttgaagacacatcactctgaaattggaagacctcaccacttaaggctccacagtggcttactcagctgaactctaggttactactctttactttgttcacccattggggggtgcagtttttttaaaatgttgggagatggccattctaactactgttgaatgtctctgttttgggaaggtataacaagaaataaaaaagaatatatatgaagggagagactggttatctcctccca

SEQ ID NO: 325429 - DNA, 4054 bp, Homo sapiens
tcggagcgagcgcccgagatccctttcccagagtgctctgcgccgtgaagaagcggctcccggggactgggggcattttgtgttggctggagctggagtaacaagatggcgtcgtccgcggagtgacaggggtccctctgggccggagccggcggcagtggtggcagcggtatcgccgccctagctcaccgcgccccttttccagcccgcgacgtcgccgcgcaagcgaggcagcggcggccgccgagaaacaagtggcccagcctggtaaccgccgagaagcccttcacaaactgcggcctggcaaaaagaaacctgactgagcggcggtgatcaggttcccctctgctgattctgggccccgaaccccggtaaaggcctccgtgttccgtttcctgccgccctcctccgtagccttgcctagtgtaggagccccgaggcctccgtcctcttcccagaggtgtcggggcttggccccagcctccatcttcgtctctcaggatggcgagtagcagcggctccaaggctgaattcattgtcggagggaaatataaactggtacggaagatcgggtctggctccttcggggacatctatttggcgatcaacatcaccaacggcgaggaagtggcagtgaagctagaatctcagaaggccaggcatccccagttgctgtacgagagcaagctctataagattcttcaaggtggggttggcatcccccacatacggtggtatggtcaggaaaaagactacaatgtactagtcatggatcttctgggacctagcctcgaagacctcttcaatttctgttcaagaaggttcacaatgaaaactgtacttatgttagctgaccagatgatcagtagaattgaatatgtgcatacaaagaattttatacacagagacattaaaccagataacttcctaatgggtattgggcgtcactgtaataagttattccttattgattttggtttggccaaaaagtacagagacaacaggacaaggcaacacataccatacagagaagataaaaacctcactggcactgcccgatatgctagcatcaatgcacatcttggtattgagcagagtcgccgagatgacatggaatcattaggatatgttttgatgtattttaatagaaccagcctgccatggcaagggctaaaggctgcaacaaagaaacaaaaatatgaaaagattagtgaaaagaagatgtccacgcctgttgaagttttatgtaaggggtttcctgcagaatttgcgatgtacttaaactattgtcgtgggctacgctttgaggaagccccagattacatgtatctgaggcagctattccgcattcttttcaggaccctgaaccatcaatatgactacacatttgattggacaatgttaaagcagaaagcagcacagcaggcagcctcttccagtgggcagggtcagcaggcccaaacccccacaggcaagcaaactgacaaaaccaagagtaacatgaaaggtttctaagcatgaattgaggaacagaagaagcagagcagatgatcggagcagcatttgtttctccccaaatctagaaattttagttcatatgtacactagccagtggttgtggacaaccatttacttggtgtaaagaacttaatttcagtataaactgactctgggcagcattggtgatgctgtatcctgagttgtagcctctgtaattgtgaatattaactgagatagtgaaacatggtgtccggttttctattgcattttttcaagtggaaaagttaactaaatggttgacacacaaaaattggtggagaaattgtgcatatgccaattttttgttaaaaccttttgttttgaactatactgctttgagatctcatttcagaagaacggcatgaacagtcttcagccacagttgtgatggttgttaaatgctcacaattgtgcattcttagggtttttccatccctggggtttgcaagttgttcacttaaaacattcttaaaatggttggcttcttgtctgcaagccagctgatatggtagcaaccaaagattccagtgtttgagcatatgaaagactctgcctgcttaattgtgctagaaataacagcatctaaagtgaagacttaagaaaaacttagtgactactagattatccttaggactctgcattaactctataatgttcttggtattaaaaaaaaagcatatttgtcacagaaatttagttaacatcttacaactgaacatgtatgtatgttgcttagataaatgtaatcactgtaaacatctatatgatctgggattttgtttttattttgaaatgggagcttttttgtttacaagttcattaaaaactaaaaactgtttctgtaaggaaatgagattttttttaaacaacaaaaaatgccttgctgactcactattaaataaaaatctccccaattttttgatagactacttcaagccatttgttacatggtattcctttgcaagtcaatttaggtttcgtgttataacttttcctctttttttaagaaaaatgaaaaaagtaattcttttgtctgaaggggaaaggcattctttcatttttttctttttttttttttttttttatgacttgcaggcacaatatctagtactgcaactgccagaacttggtattgtagctgctgcccgctgactagcagctggactgattttgaataaaaatgaaagcattaaagggtttccctacaaaacatttttctttaaaatacttttgaaatggctataagcagttgactttcacccttggagagcatcacactgtgtgaggttcagtgattgttgaccctccccagcccctcctgcttctttaagttatctgtgtgcgtgcgcttcctctcaatcttctttgcacgctcatttctttttctctgacccatgagaaaggaaaacttactgatgataatttttaaatagtgtaatttattcatttatagcatgtcaggataaattaaaagaacatttgtctggaaatgctgccgggagcctattgtgtaaatgtaggtattttgtaaaataaccttgaaattgtaaattgacacgtgtttggtcagattgtgtcaagtttaatttgttttgttttcttttttcttttttttatttgaaaactactttagcaataattaattccatgattatcacattctgccattaagggatattagtaccgtaatactgaagaaattttattaagtctgaacttctggggtaggcagcttctttgtttcttttctatccacccttgtcggttgaggtatttgtttcttgactaataaaccctttgatacttttagccagaaatcagtctcataaagctatttttgagtatagtttgtgtaaaataaaaatgtttagctttggtaataacttccaagctgaactccctctagcaagatatttttcagtgcttttatttactatgcacttagactatgcactttttctgaaatatttttgtaacacttttttgtatttttgccatttgaaaaggttgtggtgtagttggtctgtaattaagttgcagatttaaaactgctgttagctttgtaaatcaaaatataggtgttttttgtcctggtatatcgtcattccatctgcagctggagctggaatcccattgatcttctagctaccattcattttcttcactgttcacaaaagaagagtgtgaaattcagtgaatgctgttactaatcctgttacgagatgaatctcatttcaccaaaattaaattatgtttttccgctaaaatgatgatacaagttgaagacacatcactctgaaattggaagacctcaccacttaaggctccacagtggcttactcagctgaactctaggttactactctttactttgttcacccattggggggtgcagtttttttaaaatgttgggagatggccattctaactactgttgaatgtctctgttttgggaaggtataacaagaaataaaaaagaatatatatgaagggagagactggttatctcctccca

SEQ ID NO: 325430 - DNA, 5496 bp, Homo sapiens
tcggagcgagcgcccgagatccctttcccagagtgctctgcgccgtgaagaagcggctcccggggactgggggcattttgtgttggctggagctggagtaacaagatggcgtcgtccgcggagtgacaggggtccctctgggccggagccggcggcagtggtggcagcggtatcgccgccctagctcaccgcgccccttttccagcccgcgacgtcgccgcgcaagcgaggcagcggcggccgccgagaaacaagtggcccagcctggtaaccgccgagaagcccttcacaaactgcggcctggcaaaaagaaacctgactgagcggcggtgatcaggttcccctctgctgattctgggccccgaaccccggtaaaggcctccgtgttccgtttcctgccgccctcctccgtagccttgcctagtgtaggagccccgaggcctccgtcctcttcccagaggtgtcggggcttggccccagcctccatcttcgtctctcaggatggcgagtagcagcggctccaaggctgaattcattgtcggagggaaatataaactggtacggaagatcgggtctggctccttcggggacatctatttggcgatcaacatcaccaacggcgaggaagtggcagtgaagctagaatctcagaaggccaggcatccccagttgctgtacgagagcaagctctataagattcttcaaggtggggttggcatcccccacatacggtggtatggtcaggaaaaagactacaatgtactagtcatggatcttctgggacctagcctcgaagacctcttcaatttctgttcaagaaggttcacaatgaaaactgtacttatgttagctgaccagatgatcagtagaattgaatatgtgcatacaaagaattttatacacagagacattaaaccagataacttcctaatgggtattgggcgtcactgtaataagttattccttattgattttggtttggccaaaaagtacagagacaacaggacaaggcaacacataccatacagagaagataaaaacctcactggcactgcccgatatgctagcatcaatgcacatcttggtattgagcagagtcgccgagatgacatggaatcattaggatatgttttgatgtattttaatagaaccagcctgccatggcaagggctaaaggctgcaacaaagaaacaaaaatatgaaaagattagtgaaaagaagatgtccacgcctgttgaagttttatgtaaggggtttcctgcagaatttgcgatgtacttaaactattgtcgtgggctacgctttgaggaagccccagattacatgtatctgaggcagctattccgcattcttttcaggaccctgaaccatcaatatgactacacatttgattggacaatgttaaagcagaaagcagcacagcaggcagcctcttccagtgggcagggtcagcaggcccaaacccccacaggtttctaagcatgaattgaggaacagaagaagcagagcagatgatcggagcagcatttgtttctccccaaatctagaaattttagttcatatgtacactagccagtggttgtggacaaccatttacttggtgtaaagaacttaatttcagtataaactgactctgggcagcattggtgatgctgtatcctgagttgtagcctctgtaattgtgaatattaactgagatagtgaaacatggtgtccggttttctattgcattttttcaagtggaaaagttaactaaatggttgacacacaaaaattggtggagaaattgtgcatatgccaattttttgttaaaaccttttgttttgaactatactgctttgagatctcatttcagaagaacggcatgaacagtcttcagccacagttgtgatggttgttaaatgctcacaattgtgcattcttagggtttttccatccctggggtttgcaagttgttcacttaaaacattcttaaaatggttggcttcttgtctgcaagccagctgatatggtagcaaccaaagattccagtgtttgagcatatgaaagactctgcctgcttaattgtgctagaaataacagcatctaaagtgaagacttaagaaaaacttagtgactactagattatccttaggactctgcattaactctataatgttcttggtattaaaaaaaaagcatatttgtcacagaaatttagttaacatcttacaactgaacatgtatgtatgttgcttagataaatgtaatcactgtaaacatctatatgatctgggattttgtttttattttgaaatgggagcttttttgtttacaagttcattaaaaactaaaaactgtttctgtaaggaaatgagattttttttaaacaacaaaaaatgccttgctgactcactattaaataaaaatctccccaattttttgatagactacttcaagccatttgttacatggtattcctttgcaagtcaatttaggtttcgtgttataacttttcctctttttttaagaaaaatgaaaaaagtaattcttttgtctgaaggggaaaggcattctttcatttttttctttttttttttttttttttatgacttgcaggcacaatatctagtactgcaactgccagaacttggtattgtagctgctgcccgctgactagcagctggactgattttgaataaaaatgaaagcattaaagggtttccctacaaaacatttttctttaaaatacttttgaaatggctataagcagttgactttcacccttggagagcatcacactgtgtgaggttcagtgattgttgaccctccccagcccctcctgcttctttaagttatctgtgtgcgtgcgcttcctctcaatcttctttgcacgctcatttctttttctctgacccatgagaaaggaaaacttactgatgataatttttaaatagtgtaatttattcatttatagcatgtcaggataaattaaaagaacatttgtctggaaatgctgccgggagcctattgtgtaaatgtaggtattttgtaaaataaccttgaaattgtaaattgacacgtgtttggtcagattgtgtcaagtttaatttgttttgttttcttttttcttttttttatttgaaaactactttagcaataattaattccatgattatcacattctgccattaagggatattagtaccgtaatactgaagaaattttattaagtctgaacttctggggtaggcagcttctttgtttcttttctatccacccttgtcggttgaggtatttgtttcttgactaataaaccctttgatacttttagccagaaatcagtctcataaagctatttttgagtatagtttgtgtaaaataaaaatgtttagctttggtaataacttccaagctgaactccctctagcaagatatttttcagtgcttttatttactatgcacttagactatgcactttttctgaaatatttttgtaacacttttttgtatttttgccatttgaaaaggttgtggtgtagttggtctgtaattaagttgcagatttaaaactgctgttagctttgtaaatcaaaatataggtgttttttgtcctggtatatcgtcattccatctgcagctggagctggaatcccattgatcttctagctaccattcattttcttcactgttcacaaaagaagagtgtgaaattcagtgaatgctgttactaatcctgttacgagatgaatctcatttcaccaaaattaaattatgtttttccgctaaaatgatgatacaagttgaagacacatcactctgaaattggaagacctcaccacttaaggctccacagtggcttactcagctgaactctaggttactactctttactttgttcacccattggggggtgcagtttttttaaaatgttgggagatggccattctaactactgttgaatgtctctgttttgggaaggtataacaagaaataaaaaagaatatatatgaagggagagactggttatctcctcccatatggttgtgcttatcctcttatggcttacaaatgaatatttggaggtttgctttcacaatgatttcccatcaacaaatatttttagtaggatttttcctgtttctgttagtccttgcagtactcataaatgttttaagctgagcatactgtaatagtcataagtttaatttcattataataaaaataatcaaacaaaaggactttagaacccaagacaatgagctagttttccctaaagtttgctgaactattaaggaatatgttcttatagcttttgactagaatgagtcatgggaattctaagaagggatggcctagacatttttagctcagttaaattcagcatttaatgcaggtgagttcctgggtcgttttccaactagtctggaacagtctggttctgactcaaactggtataaagcattattttaggttttctctttgccagtttttaagcagttataaccatgtaaatcaagatgtgaggacatctatatgaagtatagtaaagaagtggtgtcagcagatcaatatgtgtgtcctgggtgtgctgctctcttaagtgagactttgtgagactatactttaaatgcattattaccattgcttacattttgggggattttcttcctcctcaaaacttccatttctattgtaatattcttaatgacaatcttttttttttttagcagtgtatgtttgaaacagccaaagatggcgatgaaccaagtgtaaattgatctaagcagcccatgcagtttgtgttgaatcaacaaacagtgtattgttgaagtgaaattattttctgaaatgacttgttagaccagttttgaggacatactcaaaagtagagtaataatggctcctgggatggagaaatatgagatgaacctggaacattctattatggtgccacaaaggaaatctaaaaaaaaaaaaaaaaaaaaagtggttggctaggagcagtggcacacgcctgtgattccagcactttgggaggccgaagtgggcaggagttcaagaccagcctggccaacatagtgaaaccctgtctctactaaaaatacaaaaattagccgggtgtggtggcgggcgcctgtaatcccagcttttcaagaggctgaggcagaagaatcgcttgaacccgggagatggaggttgcagtgagctgagatcgtgccactgcactccagcctgggcgttgcagtgagactccgtctcaacaacaacaaaaaggtggatacatgtcaaaagggcacaggagccacttgaaggattatacttgctaaatctgtgtcaattatcaaaataaactggtagcaacgttacaactcactgaataagataccatgattccatgttgacttaaaaatggagagaagagaaagctctaacttgaatgtcagctaatttaaggtgaaaggattttatgtgttagaaaaatcaccattttgcaaactagttttcagaatcctt

SEQ ID NO: 325431 - DNA, 4200 bp, Homo sapiens
tcggagcgagcgcccgagatccctttcccagagtgctctgcgccgtgaagaagcggctcccggggactgggggcattttgtgttggctggagctggagtaacaagatggcgtcgtccgcggagtgacaggggtccctctgggccggagccggcggcagtggtggcagcggtatcgccgccctagctcaccgcgccccttttccagcccgcgacgtcgccgcgcaagcgaggcagcggcggccgccgagaaacaagtggcccagcctggtaaccgccgagaagcccttcacaaactgcggcctggcaaaaagaaacctgactgagcggcggtgatcaggttcccctctgctgattctgggccccgaaccccggtaaaggcctccgtgttccgtttcctgccgccctcctccgtagccttgcctagtgtaggagccccgaggcctccgtcctcttcccagaggtgtcggggcttggccccagcctccatcttcgtctctcaggatggcgagtagcagcggctccaaggctgaattcattgtcggagggaaatataaactggtacggaagatcgggtctggctccttcggggacatctatttggcgatcaacatcaccaacggcgaggaagtggcagtgaagctagaatctcagaaggccaggcatccccagttgctgtacgagagcaagctctataagattcttcaaggtggggttggcatcccccacatacggtggtatggtcaggaaaaagactacaatgtactagtcatggatcttctgggacctagcctcgaagacctcttcaatttctgttcaagaaggttcacaatgaaaactgtacttatgttagctgaccagatgatcagtagaattgaatatgtgcatacaaagaattttatacacagagacattaaaccagataacttcctaatgggtattgggcgtcactgtaataagttattccttattgattttggtttggccaaaaagtacagagacaacaggacaaggcaacacataccatacagagaagataaaaacctcactggcactgcccgatatgctagcatcaatgcacatcttggtattgagcagagtcgccgagatgacatggaatcattaggatatgttttgatgtattttaatagaaccagcctgccatggcaagggctaaaggctgcaacaaagaaacaaaaatatgaaaagattagtgaaaagaagatgtccacgcctgttgaagttttatgtaaggggtttcctgcagaatttgcgatgtacttaaactattgtcgtgggctacgctttgaggaagccccagattacatgtatctgaggcagctattccgcattcttttcaggaccctgaaccatcaatatgactacacatttgattggacaatgttaaagcagaaagcagcacagcaggcagcctcttccagtgggcagggtcagcaggcccaaacccccacaggtttctaagcatgaattgaggaacagaagaagcagagcagatgatcggagcagcatttgtttctccccaaatctagaaattttagttcatatgtacactagccagtggttgtggacaaccatttacttggtgtaaagaacttaatttcagtataaactgactctgggcagcattggtgatgctgtatcctgagttgtagcctctgtaattgtgaatattaactgagatagtgaaacatggtgtccggttttctattgcattttttcaagtggaaaagttaactaaatggttgacacacaaaaattggtggagaaattgtgcatatgccaattttttgttaaaaccttttgttttgaactatactgctttgagatctcatttcagaagaacggcatgaacagtcttcagccacagttgtgatggttgttaaatgctcacaattgtgcattcttagggtttttccatccctggggtttgcaagttgttcacttaaaacattcttaaaatggttggcttcttgtctgcaagccagctgatatggtagcaaccaaagattccagtgtttgagcatatgaaagactctgcctgcttaattgtgctagaaataacagcatctaaagtgaagacttaagaaaaacttagtgactactagattatccttaggactctgcattaactctataatgttcttggtattaaaaaaaaagcatatttgtcacagaaatttagttaacatcttacaactgaacatgtatgtatgttgcttagataaatgtaatcactgtaaacatctatatgatctgggattttgtttttattttgaaatgggagcttttttgtttacaagttcattaaaaactaaaaactgtttctgtaaggaaatgagattttttttaaacaacaaaaaatgccttgctgactcactattaaataaaaatctccccaattttttgatagactacttcaagccatttgttacatggtattcctttgcaagtcaatttaggtttcgtgttataacttttcctctttttttaagaaaaatgaaaaaagtaattcttttgtctgaaggggaaaggcattctttcatttttttctttttttttttttttttttatgacttgcaggcacaatatctagtactgcaactgccagaacttggtattgtagctgctgcccgctgactagcagctggactgattttgaataaaaatgaaagcattaaagggtttccctacaaaacatttttctttaaaatacttttgaaatggctataagcagttgactttcacccttggagagcatcacactgtgtgaggttcagtgattgttgaccctccccagcccctcctgcttctttaagttatctgtgtgcgtgcgcttcctctcaatcttctttgcacgctcatttctttttctctgacccatgagaaaggaaaacttactgatgataatttttaaatagtgtaatttattcatttatagcatgtcaggataaattaaaagaacatttgtctggaaatgctgccgggagcctattgtgtaaatgtaggtattttgtaaaataaccttgaaattgtaaattgacacgtgtttggtcagattgtgtcaagtttaatttgttttgttttcttttttcttttttttatttgaaaactactttagcaataattaattccatgattatcacattctgccattaagggatattagtaccgtaatactgaagaaattttattaagtctgaacttctggggtaggcagcttctttgtttcttttctatccacccttgtcggttgaggtatttgtttcttgactaataaaccctttgatacttttagccagaaatcagtctcataaagctatttttgagtatagtttgtgtaaaataaaaatgtttagctttggtaataacttccaagctgaactccctctagcaagatatttttcagtgcttttatttactatgcacttagactatgcactttttctgaaatatttttgtaacacttttttgtatttttgccatttgaaaaggttgtggtgtagttggtctgtaattaagttgcagatttaaaactgctgttagctttgtaaatcaaaatataggtgttttttgtcctggtatatcgtcattccatctgcagctggagctggaatcccattgatcttctagctaccattcattttcttcactgttcacaaaagaagagtgtgaaattcagtgaatgctgttactaatcctgttacgagatgaatctcatttcaccaaaattaaattatgtttttccgctaaaatgatgatacaagttgaagacacatcactctgaaattggaagacctcaccacttaaggctccacagtggcttactcagctgaactctaggttactactctttactttgttcacccattggggggtgcagtttttttaaaatgttgggagatggccattctaactactgttgaatgtctctgttttgggaaggtataacaagaaataaaaaagaatatatatgaagggagagactggttatctcctcccaaaaaaaaaagggggcggtgaaaatttactaaggggcaagttacgcttacacagttttttaaagggtcttagggggattaagaagaaggagggttaaagtggaggaaagtgtggatttgaggcctttgggggatatggacactcaaaagcgggataatagttgaagttgcgggattggttaac

SEQ ID NO: 325432 - DNA, 2393 bp, Homo sapiens
tcggagcgagcgcccgagatccctttcccagagtgctctgcgccgtgaagaagcggctcccggggactgggggcattttgtgttggctggagctggagtaacaagatggcgtcgtccgcggagtgacaggggtccctctgggccggagccggcggcagtggtggcagcggtatcgccgccctagctcaccgcgccccttttccagcccgcgacgtcgccgcgcaagcgaggcagcggcggccgccgagaaacaagtggcccagcctggtaaccgccgagaagcccttcacaaactgcggcctggcaaaaagaaacctgactgagcggcggtgatcaggttcccctctgctgattctgggccccgaaccccggtaaaggcctccgtgttccgtttcctgccgccctcctccgtagccttgcctagtgtaggagccccgaggcctccgtcctcttcccagaggtgtcggggcttggccccagcctccatcttcgtctctcaggatggcgagtagcagcggctccaaggctgaattcattgtcggagggaaatataaactggtacggaagatcgggtctggctccttcggggacatctatttggcgatcaacatcaccaacggcgaggaagtggcagtgaagctagaatctcagaaggccaggcatccccagttgctgtacgagagcaagctctataagattcttcaaggtggggttggcatcccccacatacggtggtatggtcaggaaaaagactacaatgtactagtcatggatcttctgggacctagcctcgaagacctcttcaatttctgttcaagaaggttcacaatgaaaactgtacttatgttagctgaccagatgatcagtagaattgaatatgtgcatacaaagaattttatacacagagacattaaaccagataacttcctaatgggtattgggcgtcactgtaataagttattccttattgattttggtttggccaaaaagtacagagacaacaggacaaggcaacacataccatacagagaagataaaaacctcactggcactgcccgatatgctagcatcaatgcacatcttggtattgagcagagtcgccgagatgacatggaatcattaggatatgttttgatgtattttaatagaaccagcctgccatggcaagggctaaaggctgcaacaaagaaacaaaaatatgaaaagattagtgaaaagaagatgtccacgcctgttgaagttttatgtaaggggtttcctgcagaatttgcgatgtacttaaactattgtcgtgggctacgctttgaggaagccccagattacatgtatctgaggcagctattccgcattcttttcaggaccctgaaccatcaatatgactacacatttgattggacaatgttaaagcagaaagcagcacagcaggcagcctcttccagtgggcagggtcagcaggcccaaacccccacaggcaagcaaactgacaaaaccaagagtaacatgaaaggtttctaagcatgaattgaggaacagaagaagcagagcagatgatcggagcagcatttgtttctccccaaatctagaaattttagttcatatgtacactagccagtggttgtggacaaccatttacttggtgtaaagaacttaatttcagtataaactgactctgggcagcattggtgatgctgtatcctgagttgtagcctctgtaattgtgaatattaactgagatagtgaaacatggtgtccggttttctattgcattttttcaagtggaaaagttaactaaatggttgacacacaaaaattggtggagaaattgtgcatatgccaattttttgttaaaaccttttgttttgaactatactgctttgagatctcatttcagaagaacggcatgaacagtcttcagccacagttgtgatggttgttaaatgctcacaattgtgcattcttagggtttttccatccctggggtttgcaagttgttcacttaaaacattcttaaaatggttggcttcttgtctgcaagccagctgatatggtagcaaccaaagattccagtgtttgagcatatgaaagactctgcctgcttaattgtgctagaaataacagcatctaaagtgaagacttaagaaaaacttagtgactactagattatccttaggactctgcattaactctataatgttcttggtattaaaaaaaaagcatatttgtcacagaaatttagttaacatcttacaactgaacatgtatgtatgttgcttagataaatgtaatcactgtaaacatctatatgatctgggattttgtttttattttgaaatgggagcttttttgtttacaagttcattaaaaactaaaaactgtttctgtaaggaaatgag

SEQ ID NO: 325433 - DNA, 4102 bp, Homo sapiens
tcggagcgagcgcccgagatccctttcccagagtgctctgcgccgtgaagaagcggctcccggggactgggggcattttgtgttggctggagctggagtaacaagatggcgtcgtccgcggagtgacaggggtccctctgggccggagccggcggcagtggtggcagcggtatcgccgccctagctcaccgcgccccttttccagcccgcgacgtcgccgcgcaagcgaggcagcggcggccgccgagaaacaagtggcccagcctggtaaccgccgagaagcccttcacaaactgcggcctggcaaaaagaaacctgactgagcggcggtgatcaggttcccctctgctgattctgggccccgaaccccggtaaaggcctccgtgttccgtttcctgccgccctcctccgtagccttgcctagtgtaggagccccgaggcctccgtcctcttcccagaggtgtcggggcttggccccagcctccatcttcgtctctcaggatggcgagtagcagcggctccaaggctgaattcattgtcggagggaaatataaactggtacggaagatcgggtctggctccttcggggacatctatttggcgatcaacatcaccaacggcgaggaagtggcagtgaagctagaatctcagaaggccaggcatccccagttgctgtacgagagcaagctctataagattcttcaaggtggggttggcatcccccacatacggtggtatggtcaggaaaaagactacaatgtactagtcatggatcttctgggacctagcctcgaagacctcttcaatttctgttcaagaaggttcacaatgaaaactgtacttatgttagctgaccagatgatcagtagaattgaatatgtgcatacaaagaattttatacacagagacattaaaccagataacttcctaatgggtattgggcgtcactgtaataagtgtttagaatctccagtggggaagaggaaaagaagcatgactgttagtacttctcaggacccatctttctcaggattaaaccagttattccttattgattttggtttggccaaaaagtacagagacaacaggacaaggcaacacataccatacagagaagataaaaacctcactggcactgcccgatatgctagcatcaatgcacatcttggtattgagcagagtcgccgagatgacatggaatcattaggatatgttttgatgtattttaatagaaccagcctgccatggcaagggctaaaggctgcaacaaagaaacaaaaatatgaaaagattagtgaaaagaagatgtccacgcctgttgaagttttatgtaaggggtttcctgcagaatttgcgatgtacttaaactattgtcgtgggctacgctttgaggaagccccagattacatgtatctgaggcagctattccgcattcttttcaggaccctgaaccatcaatatgactacacatttgattggacaatgttaaagcagaaagcagcacagcaggcagcctcttccagtgggcagggtcagcaggcccaaacccccacaggtttctaagcatgaattgaggaacagaagaagcagagcagatgatcggagcagcatttgtttctccccaaatctagaaattttagttcatatgtacactagccagtggttgtggacaaccatttacttggtgtaaagaacttaatttcagtataaactgactctgggcagcattggtgatgctgtatcctgagttgtagcctctgtaattgtgaatattaactgagatagtgaaacatggtgtccggttttctattgcattttttcaagtggaaaagttaactaaatggttgacacacaaaaattggtggagaaattgtgcatatgccaattttttgttaaaaccttttgttttgaactatactgctttgagatctcatttcagaagaacggcatgaacagtcttcagccacagttgtgatggttgttaaatgctcacaattgtgcattcttagggtttttccatccctggggtttgcaagttgttcacttaaaacattcttaaaatggttggcttcttgtctgcaagccagctgatatggtagcaaccaaagattccagtgtttgagcatatgaaagactctgcctgcttaattgtgctagaaataacagcatctaaagtgaagacttaagaaaaacttagtgactactagattatccttaggactctgcattaactctataatgttcttggtattaaaaaaaaagcatatttgtcacagaaatttagttaacatcttacaactgaacatgtatgtatgttgcttagataaatgtaatcactgtaaacatctatatgatctgggattttgtttttattttgaaatgggagcttttttgtttacaagttcattaaaaactaaaaactgtttctgtaaggaaatgagattttttttaaacaacaaaaaatgccttgctgactcactattaaataaaaatctccccaattttttgatagactacttcaagccatttgttacatggtattcctttgcaagtcaatttaggtttcgtgttataacttttcctctttttttaagaaaaatgaaaaaagtaattcttttgtctgaaggggaaaggcattctttcatttttttctttttttttttttttttttatgacttgcaggcacaatatctagtactgcaactgccagaacttggtattgtagctgctgcccgctgactagcagctggactgattttgaataaaaatgaaagcattaaagggtttccctacaaaacatttttctttaaaatacttttgaaatggctataagcagttgactttcacccttggagagcatcacactgtgtgaggttcagtgattgttgaccctccccagcccctcctgcttctttaagttatctgtgtgcgtgcgcttcctctcaatcttctttgcacgctcatttctttttctctgacccatgagaaaggaaaacttactgatgataatttttaaatagtgtaatttattcatttatagcatgtcaggataaattaaaagaacatttgtctggaaatgctgccgggagcctattgtgtaaatgtaggtattttgtaaaataaccttgaaattgtaaattgacacgtgtttggtcagattgtgtcaagtttaatttgttttgttttcttttttcttttttttatttgaaaactactttagcaataattaattccatgattatcacattctgccattaagggatattagtaccgtaatactgaagaaattttattaagtctgaacttctggggtaggcagcttctttgtttcttttctatccacccttgtcggttgaggtatttgtttcttgactaataaaccctttgatacttttagccagaaatcagtctcataaagctatttttgagtatagtttgtgtaaaataaaaatgtttagctttggtaataacttccaagctgaactccctctagcaagatatttttcagtgcttttatttactatgcacttagactatgcactttttctgaaatatttttgtaacacttttttgtatttttgccatttgaaaaggttgtggtgtagttggtctgtaattaagttgcagatttaaaactgctgttagctttgtaaatcaaaatataggtgttttttgtcctggtatatcgtcattccatctgcagctggagctggaatcccattgatcttctagctaccattcattttcttcactgttcacaaaagaagagtgtgaaattcagtgaatgctgttactaatcctgttacgagatgaatctcatttcaccaaaattaaattatgtttttccgctaaaatgatgatacaagttgaagacacatcactctgaaattggaagacctcaccacttaaggctccacagtggcttactcagctgaactctaggttactactctttactttgttcacccattggggggtgcagtttttttaaaatgttgggagatggccattctaactactgttgaatgtctctgttttgggaaggtataacaagaaataaaaaagaatatatatgaagggagagactggttatctcctccca

SEQ ID NO: 325434 - DNA, 2313 bp, Homo sapiens
tcggagcgagcgcccgagatccctttcccagagtgctctgcgccgtgaagaagcggctcccggggactgggggcattttgtgttggctggagctggagtaacaagatggcgtcgtccgcggagtgacaggggtccctctgggccggagccggcggcagtggtggcagcggtatcgccgccctagctcaccgcgccccttttccagcccgcgacgtcgccgcgcaagcgaggcagcggcggccgccgagaaacaagtggcccagcctggtaaccgccgagaagcccttcacaaactgcggcctggcaaaaagaaacctgactgagcggcggtgatcaggttcccctctgctgattctgggccccgaaccccggtaaaggcctccgtgttccgtttcctgccgccctcctccgtagccttgcctagtgtaggagccccgaggcctccgtcctcttcccagaggtgtcggggcttggccccagcctccatcttcgtctctcaggatggcgagtagcagcggctccaaggctgaattcattgtcggagggaaatataaactggtacggaagatcgggtctggctccttcggggacatctatttggcgatcaacatcaccaacggcgaggaagtggcagtgaagctagaatctcagaaggccaggcatccccagttgctgtacgagagcaagctctataagattcttcaaggtggggttggcatcccccacatacggtggtatggtcaggaaaaagactacaatgtactagtcatggatcttctgggacctagcctcgaagacctcttcaatttctgttcaagaaggttcacaatgaaaactgtacttatgttagctgaccagatgatcagtagaattgaatatgtgcatacaaagaattttatacacagagacattaaaccagataacttcctaatgggtattgggcgtcactgtaataagttattccttattgattttggtttggccaaaaagtacagagacaacaggacaaggcaacacataccatacagagaagataaaaacctcactggcactgcccgatatgctagcatcaatgcacatcttggtattgagcagagtcgccgagatgacatggaatcattaggatatgttttgatgtattttaatagaaccagcctgccatggcaagggctaaaggctgcaacaaagaaacaaaaatatgaaaagattagtgaaaagaagatgtccacgcctgttgaagttttatgtaaggggtttcctgcagaatttgcgatgtacttaaactattgtcgtgggctacgctttgaggaagccccagattacatgtatctgaggcagctattccgcattcttttcaggaccctgaaccatcaatatgactacacatttgattggacaatgttaaagcagaaagcagcacagcaggcagcctcttccagtgggcagggtcagcaggcccaaacccccacaggcaagcaaactgacaaaaccaagagtaacatgaaaggtttctaagcatgaattgaggaacagaagaagcagagcagatgatcggagcagcatttgtttctccccaaatctagaaattttagttcatatgtacactagccagtggttgtggacaaccatttacttggtgtaaagaacttaatttcagtataaactgactctgggcagcattggtgatgctgtatcctgagttgtagcctctgtaattgtgaatattaactgagatagtgaaacatggtgtccggttttctattgcattttttcaagtggaaaagttaactaaatggttgacacacaaaaattggtggagaaattgtgcatatgccaattttttgttaaaaccttttgttttgaactatactgctttgagatctcatttcagaagaacggcatgaacagtcttcagccacagttgtgatggttgttaaatgctcacaattgtgcattcttagggtttttccatccctggggtttgcaagttgttcacttaaaacattcttaaaatggttggcttcttgtctgcaagccagctgatatggtagcaaccaaagattccagtgtttgagcatatgaaagactctgcctgcttaattgtgctagaaataacagcatctaaagtgaagacttaagaaaaacttagtgactactagattatccttaggactctgcattaactctataatgttcttggtattaaaaaaaaagcatatttgtcacagaaatttagttaacatcttacaactgaacatgtatgtatgttgcttagataaatgtaatcactgtaaacatctatatgatctggga

SEQ ID NO: 325435 - DNA, 3693 bp, Homo sapiens
tcggagcgagcgcccgagatccctttcccagagtgctctgcgccgtgaagaagcggctcccggggactgggggcattttgtgttggctggagctggagtaacaagatggcgtcgtccgcggagtgacaggggtccctctgggccggagccggcggcagtggtggcagcggtatcgccgccctagctcaccgcgccccttttccagcccgcgacgtcgccgcgcaagcgaggcagcggcggccgccgagaaacaagtggcccagcctggtaaccgccgagaagcccttcacaaactgcggcctggcaaaaagaaacctgactgagcggcggtgatcaggttcccctctgctgattctgggccccgaaccccggtaaaggcctccgtgttccgtttcctgccgccctcctccgtagccttgcctagtgtaggagccccgaggcctccgtcctcttcccagaggtgtcggggcttggccccagcctccatcttcgtctctcaggatggcgagtagcagcggctccaaggctgaattcattgtcggagggaaatataaactggtacggaagatcgggtctggctccttcggggacatctatttggcgatcaacatcaccaacggcgaggaagtggcagtgaagctagaatctcagaaggccaggcatccccagttgctgtacgagagcaagctctataagattcttcaaggtggggttggcatcccccacatacggtggtatggtcaggaaaaagactacaatgtactagtcatggatcttctgggacctagcctcgaagacctcttcaatttctgttcaagaaggttcacaatgaaaactgtacttatgttagctgaccagatgatcagtagaattgaatatgtgcatacaaagaattttatacacagagacattaaaccagataacttcctaatgggtattgggcgtcactgtaataagttattccttattgattttggtttggccaaaaagtacagagacaacaggacaaggcaacacataccatacagagaagataaaaacctcactggcactgcccgatatgctagcatcaatgcacatcttggtattgagcagagtcgccgagatgacatggaatcattaggatatgttttgatgtattttaatagaaccagcctgccatggcaagggctaaaggctgcaacaaagaaacaaaaatatgaaaagattagtgaaaagaagatgtccacgcctgttgaagttttatgtaaggggtttcctgcagaatttgcgatgtacttaaactattgtcgtgggctacgctttgaggaagccccagattacatgtatctgaggcagctattccgcattcttttcaggaccctgaaccatcaatatgactacacatttgattggacaatgttaaagcagaaagcagcacagcaggcagcctcttccagtgggcagggtcagcaggcccaaacccccacaggcaagcaaactgacaaaaccaagagtaacatgaaaggtttctaagcatgaattgaggaacagaagaagcagagcagatgatcggagcagcatttgtttctccccaaatctagaaattttagttcatatgtacactagccagtggttgtggacaaccatttacttggtgtaaagaacttaatttcagtataaactgactctgggcagcattggtgatgctgtatcctgagttgtagcctctgtaattgtgaatattaactgagatagtgaaacatggtgtccggttttctattgcattttttcaagtggaaaagttaactaaatggttgacacacaaaaattggtggagaaattgtgcatatgccaattttttgttaaaaccttttgttttgaactatactgctttgagatctcatttcagaagaacggcatgaacagtcttcagccacagttgtgatggttgttaaatgctcacaattgtgcattcttagggtttttccatccctggggtttgcaagttgttcacttaaaacattcttaaaatggttggcttcttgtctgcaagccagctgatatggtagcaaccaaagattccagtgtttgagcatatgaaagactctgcctgcttaattgtgctagaaataacagcatctaaagtgaagacttaagaaaaacttagtgactactagattatccttaggactctgcattaactctataatgttcttggtattaaaaaaaaagcatatttgtcacagaaatttagttaacatcttacaactgaacatgtatgtatgttgcttagataaatgtaatcactgtaaacatctatatgatctgggattttgtttttattttgaaatgggagcttttttgtttacaagttcattaaaaactaaaaactgtttctgtaaggaaatgagattttttttaaacaacaaaaaatgccttgctgactcactattaaataaaaatctccccaattttttgatagactacttcaagccatttgttacatggtattcctttgcaagtcaatttaggtttcgtgttataacttttcctctttttttaagaaaaatgaaaaaagtaattcttttgtctgaaggggaaaggcattctttcatttttttctttttttttttttttttttatgacttgcaggcacaatatctagtactgcaactgccagaacttggtattgtagctgctgcccgctgactagcagctggactgattttgaataaaaatgaaagcattaaagggtttccctacaaaacatttttctttaaaatacttttgaaatggctataagcagttgactttcacccttggagagcatcacactgtgtgaggttcagtgattgttgaccctccccagcccctcctgcttctttaagttatctgtgtgcgtgcgcttcctctcaatcttctttgcacgctcatttctttttctctgacccatgagaaaggaaaacttactgatgataatttttaaatagtgtaatttattcatttatagcatgtcaggataaattaaaagaacatttgtctggaaatgctgccgggagcctattgtgtaaatcagtgtatgtttgaaacagccaaagatggcgatgaaccaagtgtaaattgatctaagcagcccatgcagtttgtgttgaatcaacaaacagtgtattgttgaagtgaaattattttctgaaatgacttgttagaccagttttgaggacatactcaaaagtagagtaataatggctcctgggatggagaaatatgagatgaacctggaacattctattatggtgccacaaaggaaatctaaaaaaaaaaaaaaaaaaaaagtggttggctaggagcagtggcacacgcctgtgattccagcactttgggaggccgaagtgggcaggagttcaagaccagcctggccaacatagtgaaaccctgtctctactaaaaatacaaaaattagccgggtgtggtggcgggcgcctgtaatcccagcttttcaagaggctgaggcagaagaatcgcttgaacccgggagatggaggttgcagtgagctgagatcgtgccactgcactccagcctgggcgttgcagtgagactccgtctcaacaacaacaaaaaggtggatacatgtcaaaagggcacaggagccacttgaaggattatacttgctaaatctgtgtcaattatcaaaataaactggtagcaacgtt

SEQ ID NO: 325436 - DNA, 2466 bp, Homo sapiens
tcggagcgagcgcccgagatccctttcccagagtgctctgcgccgtgaagaagcggctcccggggactgggggcattttgtgttggctggagctggagtaacaagatggcgtcgtccgcggagtgacaggggtccctctgggccggagccggcggcagtggtggcagcggtatcgccgccctagctcaccgcgccccttttccagcccgcgacgtcgccgcgcaagcgaggcagcggcggccgccgagaaacaagtggcccagcctggtaaccgccgagaagcccttcacaaactgcggcctggcaaaaagaaacctgactgagcggcggtgatcaggttcccctctgctgattctgggccccgaaccccggtaaaggcctccgtgttccgtttcctgccgccctcctccgtagccttgcctagtgtaggagccccgaggcctccgtcctcttcccagaggtgtcggggcttggccccagcctccatcttcgtctctcaggatggcgagtagcagcggctccaaggctgaattcattgtcggagggaaatataaactggtacggaagatcgggtctggctccttcggggacatctatttggcgatcaacatcaccaacggcgaggaagtggcagtgaagctagaatctcagaaggccaggcatccccagttgctgtacgagagcaagctctataagattcttcaaggtggggttggcatcccccacatacggtggtatggtcaggaaaaagactacaatgtactagtcatggatcttctgggacctagcctcgaagacctcttcaatttctgttcaagaaggttcacaatgaaaactgtacttatgttagctgaccagatgatcagtagaattgaatatgtgcatacaaagaattttatacacagagacattaaaccagataacttcctaatgggtattgggcgtcactgtaataagttattccttattgattttggtttggccaaaaagtacagagacaacaggacaaggcaacacataccatacagagaagataaaaacctcactggcactgcccgatatgctagcatcaatgcacatcttggtattgagcagagtcgccgagatgacatggaatcattaggatatgttttgatgtattttaatagaaccagcctgccatggcaagggctaaaggctgcaacaaagaaacaaaaatatgaaaagattagtgaaaagaagatgtccacgcctgttgaagttttatgtaaggggtttcctgcagaatttgcgatgtacttaaactattgtcgtgggctacgctttgaggaagccccagattacatgtatctgaggcagctattccgcattcttttcaggaccctgaaccatcaatatgactacacatttgattggacaatgttaaagcagaaagcagcacagcaggcagcctcttccagtgggcagggtcagcaggcccaaacccccacaggcaagcaaactgacaaaaccaagagtaacatgaaaggtttctaagcatgaattgaggaacagaagaagcagagcagatgatcggagcagcatttgtttctccccaaatctagaaattttagttcatatgtacactagccagtggttgtggacaaccatttacttggtgtaaagaacttaatttcagtataaactgactctgggcagcattggtgatgctgtatcctgagttgtagcctctgtaattgtgaatattaactgagatagtgaaacatggtgtccggttttctattgcattttttcaagtggaaaagttaactaaatggttgacacacaaaaattggtggagaaattgtgcatatgccaattttttgttaaaaccttttgttttgaactatactgctttgagatctcatttcagaagaacggcatgaacagtcttcagccacagttgtgatggttgttaaatgctcacaattgtgcattcttagggtttttccatccctggggtttgcaagttgttcacttaaaacattcttaaaatggttggcttcttgtctgcaagccagctgatatggtagcaaccaaagattccagtgtttgagcatatgaaagactctgcctgcttaattgtgctagaaataacagcatctaaagtgaagacttaagaaaaacttagtgactactagattatccttaggactctgcattaactctataatgttcttggtattaaaaaaaaagcatatttgtcacagaaatttagttaacatcttacaactgaacatgtatgtatgttgcttagataaatgtaatcactgtaaacatctatatgatctgggattttgtttttattttgaaatgggagcttttttgtttacaagttcattaaaaactaaaaactgtttctgtaaggaaatgagattttttttaaacaacaaaacgcgatgcgcccgtatccctctttcccggtggttgacgtttagggtgcactat

SEQ ID NO: 325437 - DNA, 2364 bp, Homo sapiens
  misc_feature (2363)..(2363): n is a, c, g, or t
tcggagcgagcgcccgagatccctttcccagagtgctctgcgccgtgaagaagcggctcccggggactgggggcattttgtgttggctggagctggagtaacaagatggcgtcgtccgcggagtgacaggggtccctctgggccggagccggcggcagtggtggcagcggtatcgccgccctagctcaccgcgccccttttccagcccgcgacgtcgccgcgcaagcgaggcagcggcggccgccgagaaacaagtggcccagcctggtaaccgccgagaagcccttcacaaactgcggcctggcaaaaagaaacctgactgagcggcggtgatcaggttcccctctgctgattctgggccccgaaccccggtaaaggcctccgtgttccgtttcctgccgccctcctccgtagccttgcctagtgtaggagccccgaggcctccgtcctcttcccagaggtgtcggggcttggccccagcctccatcttcgtctctcaggatggcgagtagcagcggctccaaggctgaattcattgtcggagggaaatataaactggtacggaagatcgggtctggctccttcggggacatctatttggcgatcaacatcaccaacggcgaggaagtggcagtgaagctagaatctcagaaggccaggcatccccagttgctgtacgagagcaagctctataagattcttcaaggtggggttggcatcccccacatacggtggtatggtcaggaaaaagactacaatgtactagtcatggatcttctgggacctagcctcgaagacctcttcaatttctgttcaagaaggttcacaatgaaaactgtacttatgttagctgaccagatgatcagtagaattgaatatgtgcatacaaagaattttatacacagagacattaaaccagataacttcctaatgggtattgggcgtcactgtaataagttattccttattgattttggtttggccaaaaagtacagagacaacaggacaaggcaacacataccatacagagaagataaaaacctcactggcactgcccgatatgctagcatcaatgcacatcttggtattgagcagagtcgccgagatgacatggaatcattaggatatgttttgatgtattttaatagaaccagcctgccatggcaagggctaaaggctgcaacaaagaaacaaaaatatgaaaagattagtgaaaagaagatgtccacgcctgttgaagttttatgtaaggggtttcctgcagaatttgcgatgtacttaaactattgtcgtgggctacgctttgaggaagccccagattacatgtatctgaggcagctattccgcattcttttcaggaccctgaaccatcaatatgactacacatttgattggacaatgttaaagcagaaagcagcacagcaggcagcctcttccagtgggcagggtcagcaggcccaaacccccacaggcaagcaaactgacaaaaccaagagtaacatgaaaggtttctaagcatgaattgaggaacagaagaagcagagcagatgatcggagcagcatttgtttctccccaaatctagaaattttagttcatatgtacactagccagtggttgtggacaaccatttacttggtgtaaagaacttaatttcagtataaactgactctgggcagcattggtgatgctgtatcctgagttgtagcctctgtaattgtgaatattaactgagatagtgaaacatggtgtccggttttctattgcattttttcaagtggaaaagttaactaaatggttgacacacaaaaattggtggagaaattgtgcatatgccaattttttgttaaaaccttttgttttgaactatactgctttgagatctcatttcagaagaacggcatgaacagtcttcagccacagttgtgatggttgttaaatgctcacaattgtgcattcttagggtttttccatccctggggtttgcaagttgttcacttaaaacattcttaaaatggttggcttcttgtctgcaagccagctgatatggtagcaaccaaagattccagtgtttgagcatatgaaagactctgcctgcttaattgtgctagaaataacagcatctaaagtgaagacttaagaaaaacttagtgactactagattatccttaggactctgcattaactctataatgttcttggtattaaaaaaaaagcatatttgtcacagaaatttagttaacatcttacaactgaacatgtatgtatgttgcttagataaatgtaatcactgtaaacatctatatgatctgggaaggagggggatcctcaagagtcagctatcaccatgactgcgctatcaggna

SEQ ID NO: 325438 - DNA, 3953 bp, Homo sapiens
tcggagcgagcgcccgagatccctttcccagagtgctctgcgccgtgaagaagcggctcccggggactgggggcattttgtgttggctggagctggagtaacaagatggcgtcgtccgcggagtgacaggggtccctctgggccggagccggcggcagtggtggcagcggtatcgccgccctagctcaccgcgccccttttccagcccgcgacgtcgccgcgcaagcgaggcagcggcggccgccgagaaacaagtggcccagcctggtaaccgccgagaagcccttcacaaactgcggcctggcaaaaagaaacctgactgagcggcggtgatcaggttcccctctgctgattctgggccccgaaccccggtaaaggcctccgtgttccgtttcctgccgccctcctccgtagccttgcctagtgtaggagccccgaggcctccgtcctcttcccagaggtgtcggggcttggccccagcctccatcttcgtctctcaggatggcgagtagcagcggctccaaggctgaattcattgtcggagggaaatataaactggtacggaagatcgggtctggctccttcggggacatctatttggcgatcaacatcaccaacggcgaggaagtggcagtgaagctagaatctcagaaggccaggcatccccagttgctgtacgagagcaagctctataagattcttcaaggtggggttggcatcccccacatacgacctcttcaatttctgttcaagaaggttcacaatgaaaactgtacttatgttagctgaccagatgatcagtagaattgaatatgtgcatacaaagaattttatacacagagacattaaaccagataacttcctaatgggtattgggcgtcactgtaataagttattccttattgattttggtttggccaaaaagtacagagacaacaggacaaggcaacacataccatacagagaagataaaaacctcactggcactgcccgatatgctagcatcaatgcacatcttggtattgagcagagtcgccgagatgacatggaatcattaggatatgttttgatgtattttaatagaaccagcctgccatggcaagggctaaaggctgcaacaaagaaacaaaaatatgaaaagattagtgaaaagaagatgtccacgcctgttgaagttttatgtaaggggtttcctgcagaatttgcgatgtacttaaactattgtcgtgggctacgctttgaggaagccccagattacatgtatctgaggcagctattccgcattcttttcaggaccctgaaccatcaatatgactacacatttgattggacaatgttaaagcagaaagcagcacagcaggcagcctcttccagtgggcagggtcagcaggcccaaacccccacaggtttctaagcatgaattgaggaacagaagaagcagagcagatgatcggagcagcatttgtttctccccaaatctagaaattttagttcatatgtacactagccagtggttgtggacaaccatttacttggtgtaaagaacttaatttcagtataaactgactctgggcagcattggtgatgctgtatcctgagttgtagcctctgtaattgtgaatattaactgagatagtgaaacatggtgtccggttttctattgcattttttcaagtggaaaagttaactaaatggttgacacacaaaaattggtggagaaattgtgcatatgccaattttttgttaaaaccttttgttttgaactatactgctttgagatctcatttcagaagaacggcatgaacagtcttcagccacagttgtgatggttgttaaatgctcacaattgtgcattcttagggtttttccatccctggggtttgcaagttgttcacttaaaacattcttaaaatggttggcttcttgtctgcaagccagctgatatggtagcaaccaaagattccagtgtttgagcatatgaaagactctgcctgcttaattgtgctagaaataacagcatctaaagtgaagacttaagaaaaacttagtgactactagattatccttaggactctgcattaactctataatgttcttggtattaaaaaaaaagcatatttgtcacagaaatttagttaacatcttacaactgaacatgtatgtatgttgcttagataaatgtaatcactgtaaacatctatatgatctgggattttgtttttattttgaaatgggagcttttttgtttacaagttcattaaaaactaaaaactgtttctgtaaggaaatgagattttttttaaacaacaaaaaatgccttgctgactcactattaaataaaaatctccccaattttttgatagactacttcaagccatttgttacatggtattcctttgcaagtcaatttaggtttcgtgttataacttttcctctttttttaagaaaaatgaaaaaagtaattcttttgtctgaaggggaaaggcattctttcatttttttctttttttttttttttttttatgacttgcaggcacaatatctagtactgcaactgccagaacttggtattgtagctgctgcccgctgactagcagctggactgattttgaataaaaatgaaagcattaaagggtttccctacaaaacatttttctttaaaatacttttgaaatggctataagcagttgactttcacccttggagagcatcacactgtgtgaggttcagtgattgttgaccctccccagcccctcctgcttctttaagttatctgtgtgcgtgcgcttcctctcaatcttctttgcacgctcatttctttttctctgacccatgagaaaggaaaacttactgatgataatttttaaatagtgtaatttattcatttatagcatgtcaggataaattaaaagaacatttgtctggaaatgctgccgggagcctattgtgtaaatgtaggtattttgtaaaataaccttgaaattgtaaattgacacgtgtttggtcagattgtgtcaagtttaatttgttttgttttcttttttcttttttttatttgaaaactactttagcaataattaattccatgattatcacattctgccattaagggatattagtaccgtaatactgaagaaattttattaagtctgaacttctggggtaggcagcttctttgtttcttttctatccacccttgtcggttgaggtatttgtttcttgactaataaaccctttgatacttttagccagaaatcagtctcataaagctatttttgagtatagtttgtgtaaaataaaaatgtttagctttggtaataacttccaagctgaactccctctagcaagatatttttcagtgcttttatttactatgcacttagactatgcactttttctgaaatatttttgtaacacttttttgtatttttgccatttgaaaaggttgtggtgtagttggtctgtaattaagttgcagatttaaaactgctgttagctttgtaaatcaaaatataggtgttttttgtcctggtatatcgtcattccatctgcagctggagctggaatcccattgatcttctagctaccattcattttcttcactgttcacaaaagaagagtgtgaaattcagtgaatgctgttactaatcctgttacgagatgaatctcatttcaccaaaattaaattatgtttttccgctaaaatgatgatacaagttgaagacacatcactctgaaattggaagacctcaccacttaaggctccacagtggcttactcagctgaactctaggttactactctttactttgttcacccattggggggtgcagtttttttaaaatgttgggagatggccattctaactactgttgaatgtctctgttttgggaaggtataacaagaaataaaaaagaatatatatgaagggagagactggttatctcctccca

SEQ ID NO: 325439 - DNA, 3964 bp, Homo sapiens
tcggagcgagcgcccgagatccctttcccagagtgctctgcgccgtgaagaagcggctcccggggactgggggcattttgtgttggctggagctggagtaacaagatggcgtcgtccgcggagtgacaggggtccctctgggccggagccggcggcagtggtggcagcggtatcgccgccctagctcaccgcgccccttttccagcccgcgacgtcgccgcgcaagcgaggcagcggcggccgccgagaaacaagtggcccagcctggtaaccgccgagaagcccttcacaaactgcggcctggcacccgaaccccggtaaaggcctccgtgttccgtttcctgccgccctcctccgtagccttgcctagtgtaggagccccgaggcctccgtcctcttcccagaggtgtcggggcttggccccagcctccatcttcgtctctcaggatggcgagtagcagcggctccaaggctgaattcattgtcggagggaaatataaactggtacggaagatcgggtctggctccttcggggacatctatttggcgatcaacatcaccaacggcgaggaagtggcagtgaagctagaatctcagaaggccaggcatccccagttgctgtacgagagcaagctctataagattcttcaaggtggggttggcatcccccacatacggtggtatggtcaggaaaaagactacaatgtactagtcatggatcttctgggacctagcctcgaagacctcttcaatttctgttcaagaaggttcacaatgaaaactgtacttatgttagctgaccagatgatcagtagaattgaatatgtgcatacaaagaattttatacacagagacattaaaccagataacttcctaatgggtattgggcgtcactgtaataagttattccttattgattttggtttggccaaaaagtacagagacaacaggacaaggcaacacataccatacagagaagataaaaacctcactggcactgcccgatatgctagcatcaatgcacatcttggtattgagcagagtcgccgagatgacatggaatcattaggatatgttttgatgtattttaatagaaccagcctgccatggcaagggctaaaggctgcaacaaagaaacaaaaatatgaaaagattagtgaaaagaagatgtccacgcctgttgaagttttatgtaaggggtttcctgcagaatttgcgatgtacttaaactattgtcgtgggctacgctttgaggaagccccagattacatgtatctgaggcagctattccgcattcttttcaggaccctgaaccatcaatatgactacacatttgattggacaatgttaaagcagaaagcagcacagcaggcagcctcttccagtgggcagggtcagcaggcccaaacccccacaggtttctaagcatgaattgaggaacagaagaagcagagcagatgatcggagcagcatttgtttctccccaaatctagaaattttagttcatatgtacactagccagtggttgtggacaaccatttacttggtgtaaagaacttaatttcagtataaactgactctgggcagcattggtgatgctgtatcctgagttgtagcctctgtaattgtgaatattaactgagatagtgaaacatggtgtccggttttctattgcattttttcaagtggaaaagttaactaaatggttgacacacaaaaattggtggagaaattgtgcatatgccaattttttgttaaaaccttttgttttgaactatactgctttgagatctcatttcagaagaacggcatgaacagtcttcagccacagttgtgatggttgttaaatgctcacaattgtgcattcttagggtttttccatccctggggtttgcaagttgttcacttaaaacattcttaaaatggttggcttcttgtctgcaagccagctgatatggtagcaaccaaagattccagtgtttgagcatatgaaagactctgcctgcttaattgtgctagaaataacagcatctaaagtgaagacttaagaaaaacttagtgactactagattatccttaggactctgcattaactctataatgttcttggtattaaaaaaaaagcatatttgtcacagaaatttagttaacatcttacaactgaacatgtatgtatgttgcttagataaatgtaatcactgtaaacatctatatgatctgggattttgtttttattttgaaatgggagcttttttgtttacaagttcattaaaaactaaaaactgtttctgtaaggaaatgagattttttttaaacaacaaaaaatgccttgctgactcactattaaataaaaatctccccaattttttgatagactacttcaagccatttgttacatggtattcctttgcaagtcaatttaggtttcgtgttataacttttcctctttttttaagaaaaatgaaaaaagtaattcttttgtctgaaggggaaaggcattctttcatttttttctttttttttttttttttttatgacttgcaggcacaatatctagtactgcaactgccagaacttggtattgtagctgctgcccgctgactagcagctggactgattttgaataaaaatgaaagcattaaagggtttccctacaaaacatttttctttaaaatacttttgaaatggctataagcagttgactttcacccttggagagcatcacactgtgtgaggttcagtgattgttgaccctccccagcccctcctgcttctttaagttatctgtgtgcgtgcgcttcctctcaatcttctttgcacgctcatttctttttctctgacccatgagaaaggaaaacttactgatgataatttttaaatagtgtaatttattcatttatagcatgtcaggataaattaaaagaacatttgtctggaaatgctgccgggagcctattgtgtaaatgtaggtattttgtaaaataaccttgaaattgtaaattgacacgtgtttggtcagattgtgtcaagtttaatttgttttgttttcttttttcttttttttatttgaaaactactttagcaataattaattccatgattatcacattctgccattaagggatattagtaccgtaatactgaagaaattttattaagtctgaacttctggggtaggcagcttctttgtttcttttctatccacccttgtcggttgaggtatttgtttcttgactaataaaccctttgatacttttagccagaaatcagtctcataaagctatttttgagtatagtttgtgtaaaataaaaatgtttagctttggtaataacttccaagctgaactccctctagcaagatatttttcagtgcttttatttactatgcacttagactatgcactttttctgaaatatttttgtaacacttttttgtatttttgccatttgaaaaggttgtggtgtagttggtctgtaattaagttgcagatttaaaactgctgttagctttgtaaatcaaaatataggtgttttttgtcctggtatatcgtcattccatctgcagctggagctggaatcccattgatcttctagctaccattcattttcttcactgttcacaaaagaagagtgtgaaattcagtgaatgctgttactaatcctgttacgagatgaatctcatttcaccaaaattaaattatgtttttccgctaaaatgatgatacaagttgaagacacatcactctgaaattggaagacctcaccacttaaggctccacagtggcttactcagctgaactctaggttactactctttactttgttcacccattggggggtgcagtttttttaaaatgttgggagatggccattctaactactgttgaatgtctctgttttgggaaggtataacaagaaataaaaaagaatatatatgaagggagagactggttatctcctccca

SEQ ID NO: 325440 - DNA, 3790 bp, Homo sapiens
aaccgtcttttaaggtggaaacggcaaaatcctctttcagtgattcccatgtttttttttttttaattcttaattctactgggcctcttgttccaattagaacagtttccgatcgcctagttccttaaaaacctctcactacgttcagaggttgcctcttttttctggatgaatcattttcctgcactttagaggacgtacggatttcgtcactaccccctgaagaggcctttgaggctggttgcctcgttttataattaccgagagctttctctttccagcttttcacttcttcttgtagtcgcgacttggagttttgctaatgtctccctcctttcctaagtgacattgaatccgtagggatgttgatgccatcatcccctctttcccctgcaggaagtggcagtgaagctagaatctcagaaggccaggcatccccagttgctgtacgagagcaagctctataagattcttcaaggtggggttggcatcccccacatacggtggtatggtcaggaaaaagactacaatgtactagtcatggatcttctgggacctagcctcgaagacctcttcaatttctgttcaagaaggttcacaatgaaaactgtacttatgttagctgaccagatgatcagtagaattgaatatgtgcatacaaagaattttatacacagagacattaaaccagataacttcctaatgggtattgggcgtcactgtaataagttattccttattgattttggtttggccaaaaagtacagagacaacaggacaaggcaacacataccatacagagaagataaaaacctcactggcactgcccgatatgctagcatcaatgcacatcttggtattgagcagagtcgccgagatgacatggaatcattaggatatgttttgatgtattttaatagaaccagcctgccatggcaagggctaaaggctgcaacaaagaaacaaaaatatgaaaagattagtgaaaagaagatgtccacgcctgttgaagttttatgtaaggggtttcctgcagaatttgcgatgtacttaaactattgtcgtgggctacgctttgaggaagccccagattacatgtatctgaggcagctattccgcattcttttcaggaccctgaaccatcaatatgactacacatttgattggacaatgttaaagcagaaagcagcacagcaggcagcctcttccagtgggcagggtcagcaggcccaaacccccacaggtttctaagcatgaattgaggaacagaagaagcagagcagatgatcggagcagcatttgtttctccccaaatctagaaattttagttcatatgtacactagccagtggttgtggacaaccatttacttggtgtaaagaacttaatttcagtataaactgactctgggcagcattggtgatgctgtatcctgagttgtagcctctgtaattgtgaatattaactgagatagtgaaacatggtgtccggttttctattgcattttttcaagtggaaaagttaactaaatggttgacacacaaaaattggtggagaaattgtgcatatgccaattttttgttaaaaccttttgttttgaactatactgctttgagatctcatttcagaagaacggcatgaacagtcttcagccacagttgtgatggttgttaaatgctcacaattgtgcattcttagggtttttccatccctggggtttgcaagttgttcacttaaaacattcttaaaatggttggcttcttgtctgcaagccagctgatatggtagcaaccaaagattccagtgtttgagcatatgaaagactctgcctgcttaattgtgctagaaataacagcatctaaagtgaagacttaagaaaaacttagtgactactagattatccttaggactctgcattaactctataatgttcttggtattaaaaaaaaagcatatttgtcacagaaatttagttaacatcttacaactgaacatgtatgtatgttgcttagataaatgtaatcactgtaaacatctatatgatctgggattttgtttttattttgaaatgggagcttttttgtttacaagttcattaaaaactaaaaactgtttctgtaaggaaatgagattttttttaaacaacaaaaaatgccttgctgactcactattaaataaaaatctccccaattttttgatagactacttcaagccatttgttacatggtattcctttgcaagtcaatttaggtttcgtgttataacttttcctctttttttaagaaaaatgaaaaaagtaattcttttgtctgaaggggaaaggcattctttcatttttttctttttttttttttttttttatgacttgcaggcacaatatctagtactgcaactgccagaacttggtattgtagctgctgcccgctgactagcagctggactgattttgaataaaaatgaaagcattaaagggtttccctacaaaacatttttctttaaaatacttttgaaatggctataagcagttgactttcacccttggagagcatcacactgtgtgaggttcagtgattgttgaccctccccagcccctcctgcttctttaagttatctgtgtgcgtgcgcttcctctcaatcttctttgcacgctcatttctttttctctgacccatgagaaaggaaaacttactgatgataatttttaaatagtgtaatttattcatttatagcatgtcaggataaattaaaagaacatttgtctggaaatgctgccgggagcctattgtgtaaatgtaggtattttgtaaaataaccttgaaattgtaaattgacacgtgtttggtcagattgtgtcaagtttaatttgttttgttttcttttttcttttttttatttgaaaactactttagcaataattaattccatgattatcacattctgccattaagggatattagtaccgtaatactgaagaaattttattaagtctgaacttctggggtaggcagcttctttgtttcttttctatccacccttgtcggttgaggtatttgtttcttgactaataaaccctttgatacttttagccagaaatcagtctcataaagctatttttgagtatagtttgtgtaaaataaaaatgtttagctttggtaataacttccaagctgaactccctctagcaagatatttttcagtgcttttatttactatgcacttagactatgcactttttctgaaatatttttgtaacacttttttgtatttttgccatttgaaaaggttgtggtgtagttggtctgtaattaagttgcagatttaaaactgctgttagctttgtaaatcaaaatataggtgttttttgtcctggtatatcgtcattccatctgcagctggagctggaatcccattgatcttctagctaccattcattttcttcactgttcacaaaagaagagtgtgaaattcagtgaatgctgttactaatcctgttacgagatgaatctcatttcaccaaaattaaattatgtttttccgctaaaatgatgatacaagttgaagacacatcactctgaaattggaagacctcaccacttaaggctccacagtggcttactcagctgaactctaggttactactctttactttgttcacccattggggggtgcagtttttttaaaatgttgggagatggccattctaactactgttgaatgtctctgttttgggaaggtataacaagaaataaaaaagaatatatatgaagggagagactggttatctcctccca

SEQ ID NO: 325441 - DNA, 3765 bp, Homo sapiens
tcggagcgagcgcccgagatccctttcccagagtgctctgcgccgtgaagaagcggctcccggggactgggggcattttgtgttggctggagctggagtaacaagatggcgtcgtccgcggagtgacaggggtccctctgggccggagccggcggcagtggtggcagcggtatcgccgccctagctcaccgcgccccttttccagcccgcgacgtcgccgcgcaagcgaggcagcggcggccgccgagaaacaagtggcccagcctggtaaccgccgagaagcccttcacaaactgcggcctggcaaaaagaaacctgactgagcggcggtgatcaggttcccctctgctgattctgggccccgaaccccggtaaaggcctccgtgttccgtttcctgccgccctcctccgtagccttgcctagtgtaggagccccgaggcctccgtcctcttcccagaggtgtcggggcttggccccagcctccatcttcgtctctcaggatggcgagtagcagcggctccaaggctgaattcattgtcggagggaaatataaactggtacggaagatcgggtctggctccttcggggacatctatttggcgatcaacatcaccaacggcgaggaagtggcagtgaagctagaatctcagaaggccaggcatccccagttgctgtacgagagcaagctctataagattcttcaagagacaacaggacaaggcaacacataccatacagagaagataaaaacctcactggcactgcccgatatgctagcatcaatgcacatcttggtattgagcagagtcgccgagatgacatggaatcattaggatatgttttgatgtattttaatagaaccagcctgccatggcaagggctaaaggctgcaacaaagaaacaaaaatatgaaaagattagtgaaaagaagatgtccacgcctgttgaagttttatgtaaggggtttcctgcagaatttgcgatgtacttaaactattgtcgtgggctacgctttgaggaagccccagattacatgtatctgaggcagctattccgcattcttttcaggaccctgaaccatcaatatgactacacatttgattggacaatgttaaagcagaaagcagcacagcaggcagcctcttccagtgggcagggtcagcaggcccaaacccccacaggcaagcaaactgacaaaaccaagagtaacatgaaaggtttctaagcatgaattgaggaacagaagaagcagagcagatgatcggagcagcatttgtttctccccaaatctagaaattttagttcatatgtacactagccagtggttgtggacaaccatttacttggtgtaaagaacttaatttcagtataaactgactctgggcagcattggtgatgctgtatcctgagttgtagcctctgtaattgtgaatattaactgagatagtgaaacatggtgtccggttttctattgcattttttcaagtggaaaagttaactaaatggttgacacacaaaaattggtggagaaattgtgcatatgccaattttttgttaaaaccttttgttttgaactatactgctttgagatctcatttcagaagaacggcatgaacagtcttcagccacagttgtgatggttgttaaatgctcacaattgtgcattcttagggtttttccatccctggggtttgcaagttgttcacttaaaacattcttaaaatggttggcttcttgtctgcaagccagctgatatggtagcaaccaaagattccagtgtttgagcatatgaaagactctgcctgcttaattgtgctagaaataacagcatctaaagtgaagacttaagaaaaacttagtgactactagattatccttaggactctgcattaactctataatgttcttggtattaaaaaaaaagcatatttgtcacagaaatttagttaacatcttacaactgaacatgtatgtatgttgcttagataaatgtaatcactgtaaacatctatatgatctgggattttgtttttattttgaaatgggagcttttttgtttacaagttcattaaaaactaaaaactgtttctgtaaggaaatgagattttttttaaacaacaaaaaatgccttgctgactcactattaaataaaaatctccccaattttttgatagactacttcaagccatttgttacatggtattcctttgcaagtcaatttaggtttcgtgttataacttttcctctttttttaagaaaaatgaaaaaagtaattcttttgtctgaaggggaaaggcattctttcatttttttctttttttttttttttttttatgacttgcaggcacaatatctagtactgcaactgccagaacttggtattgtagctgctgcccgctgactagcagctggactgattttgaataaaaatgaaagcattaaagggtttccctacaaaacatttttctttaaaatacttttgaaatggctataagcagttgactttcacccttggagagcatcacactgtgtgaggttcagtgattgttgaccctccccagcccctcctgcttctttaagttatctgtgtgcgtgcgcttcctctcaatcttctttgcacgctcatttctttttctctgacccatgagaaaggaaaacttactgatgataatttttaaatagtgtaatttattcatttatagcatgtcaggataaattaaaagaacatttgtctggaaatgctgccgggagcctattgtgtaaatgtaggtattttgtaaaataaccttgaaattgtaaattgacacgtgtttggtcagattgtgtcaagtttaatttgttttgttttcttttttcttttttttatttgaaaactactttagcaataattaattccatgattatcacattctgccattaagggatattagtaccgtaatactgaagaaattttattaagtctgaacttctggggtaggcagcttctttgtttcttttctatccacccttgtcggttgaggtatttgtttcttgactaataaaccctttgatacttttagccagaaatcagtctcataaagctatttttgagtatagtttgtgtaaaataaaaatgtttagctttggtaataacttccaagctgaactccctctagcaagatatttttcagtgcttttatttactatgcacttagactatgcactttttctgaaatatttttgtaacacttttttgtatttttgccatttgaaaaggttgtggtgtagttggtctgtaattaagttgcagatttaaaactgctgttagctttgtaaatcaaaatataggtgttttttgtcctggtatatcgtcattccatctgcagctggagctggaatcccattgatcttctagctaccattcattttcttcactgttcacaaaagaagagtgtgaaattcagtgaatgctgttactaatcctgttacgagatgaatctcatttcaccaaaattaaattatgtttttccgctaaaatgatgatacaagttgaagacacatcactctgaaattggaagacctcaccacttaaggctccacagtggcttactcagctgaactctaggttactactctttactttgttcacccattggggggtgcagtttttttaaaatgttgggagatggccattctaactactgttgaatgtctctgttttgggaaggtataacaagaaataaaaaagaatatatatgaagggagagactggttatctcctccca

SEQ ID NO: 325442 - DNA, 2113 bp, Homo sapiens
tcggagcgagcgcccgagatccctttcccagagtgctctgcgccgtgaagaagcggctcccggggactgggggcattttgtgttggctggagctggagtaacaagatggcgtcgtccgcggagtgacaggggtccctctgggccggagccggcggcagtggtggcagcggtatcgccgccctagctcaccgcgccccttttccagcccgcgacgtcgccgcgcaagcgaggcagcggcggccgccgagaaacaagtggcccagcctggtaaccgccgagaagcccttcacaaactgcggcctggcaaaaagaaacctgactgagcggcggtgatcaggttcccctctgctgattctgggccccgaaccccggtaaaggcctccgtgttccgtttcctgccgccctcctccgtagccttgcctagtgtaggagccccgaggcctccgtcctcttcccagaggtgtcggggcttggccccagcctccatcttcgtctctcaggatggcgagtagcagcggctccaaggctgaattcattgtcggagggaaatataaactggtacggaagatcgggtctggctccttcggggacatctatttggcgatcaacatcaccaacggcgaggaagtggcagtgaagctagaatctcagaaggccaggcatccccagttgctgtacgagagcaagctctataagattcttcaaggtggggttggcatcccccacatacggtggtatggtcaggaaaaagactacaatgtactagtcatggatcttctgggacctagcctcgaagacctcttcaatttctgttcaagaaggttcacaatgaaaactgtacttatgttagctgaccagatgatcagtagaattgaatatgtgcatacaaagaattttatacacagagacattaaaccagataacttcctaatgggtattgggcgtcactgtaataagttattccttattgattttggtttggccaaaaagtacagagacaacaggacaaggcaacacataccatacagagaagataaaaacctcactggcactgcccgatatgctagcatcaatgcacatcttggtattgagcagagtcgccgagatgacatggaatcattaggatatgttttgatgtattttaatagaaccagcctgccatggcaagggctaaaggctgcaacaaagaaacaaaaatatgaaaagattagtgaaaagaagatgtccacgcctgttgaagttttatgtaaggggtttcctgcagaatttgcgatgtacttaaactattgtcgtgggctacgctttgaggaagccccagattacatgtatctgaggcagctattccgcattcttttcaggaccctgaaccatcaatatgactacacatttgattggacaatgttaaagcagaaagcagcacagcaggcagcctcttccagtgggcagggtcagcaggcccaaacccccacaggcaagcaaactgacaaaaccaagagtaacatgaaaggttagtagccaagaaccaagtgacgttacagggaaaaaattgaatacaaaattgggtaattcatttctaacagtgttagatcaaggaggtggttttaaaatacataaaaatttggctctgcgttaaaaaaaaaaagacgtccttggaaaatttgactactaactttaaacccaaatgtccttgttcatatatatgtatatgtatttgtatatacatatatgtgtgtatatttatatcatttctcttgggattttgggtcatttttttaacaactgcatcttttttactcattcattaaccccctttccaaaaatttggtgttgggaatataatataatcaatcaatccaaaatcctagacctaacacttgttgatttctaataatgaatttggttagccatattttgactttatttcagactaacaatgttaagattttttattttgcatgttaatgctttagcatttaaaatggaaaattgtgaacatgttgtaatttcaagaggtgagtttggcattacccccaaagtgtctatcttctcagttgcagagcatctcattttctctcttaaatgctcaaataaatgcaaagctcagcacatcttt

SEQ ID NO: 325443 - DNA, 3502 bp, Homo sapiens
gcctccaggttaaagaacctcataccaagaatttcaggcttaagaaatatccatgaatatctgaatgatctaggttaaactgtaatgtcactttttctgtacgccaaggcattacctatccttaaatatatatatatctaaatatatatttgtatgtatgtgtatatagatatgtatgcatgaatacattcatatagatgttcaattagttttaagttgtaactccttttcagtacttctgaagtttttttttaatgagtttctgcaaaacatagaaatgtcatcctgcttggttcattaagctcatttagagggttgtttagccaaatcgtttctgttcttttaaaattaaattgtaagacagttgtttgtcagattttggattccatggaaaaagttttgtttagaggtaggtaacacatgaactttttaaaatcaccttaaataagtagcttcttgcgtaagacaccaaatagtgttccctcctcatttgggaacatttcttctgggtacttgactttctttcatatgttttttcataataatagttccagtttataaaattacgttctcttttctagtcgccgagatgacatggaatcattaggatatgttttgatgtattttaatagaaccagcctgccatggcaagggctaaaggctgcaacaaagaaacaaaaatatgaaaagattagtgaaaagaagatgtccacgcctgttgaagttttatgtaaggggtttcctgcagaatttgcgatgtacttaaactattgtcgtgggctacgctttgaggaagccccagattacatgtatctgaggcagctattccgcattcttttcaggaccctgaaccatcaatatgactacacatttgattggacaatgttaaagcagaaagcagcacagcaggcagcctcttccagtgggcagggtcagcaggcccaaacccccacaggtttctaagcatgaattgaggaacagaagaagcagagcagatgatcggagcagcatttgtttctccccaaatctagaaattttagttcatatgtacactagccagtggttgtggacaaccatttacttggtgtaaagaacttaatttcagtataaactgactctgggcagcattggtgatgctgtatcctgagttgtagcctctgtaattgtgaatattaactgagatagtgaaacatggtgtccggttttctattgcattttttcaagtggaaaagttaactaaatggttgacacacaaaaattggtggagaaattgtgcatatgccaattttttgttaaaaccttttgttttgaactatactgctttgagatctcatttcagaagaacggcatgaacagtcttcagccacagttgtgatggttgttaaatgctcacaattgtgcattcttagggtttttccatccctggggtttgcaagttgttcacttaaaacattcttaaaatggttggcttcttgtctgcaagccagctgatatggtagcaaccaaagattccagtgtttgagcatatgaaagactctgcctgcttaattgtgctagaaataacagcatctaaagtgaagacttaagaaaaacttagtgactactagattatccttaggactctgcattaactctataatgttcttggtattaaaaaaaaagcatatttgtcacagaaatttagttaacatcttacaactgaacatgtatgtatgttgcttagataaatgtaatcactgtaaacatctatatgatctgggattttgtttttattttgaaatgggagcttttttgtttacaagttcattaaaaactaaaaactgtttctgtaaggaaatgagattttttttaaacaacaaaaaatgccttgctgactcactattaaataaaaatctccccaattttttgatagactacttcaagccatttgttacatggtattcctttgcaagtcaatttaggtttcgtgttataacttttcctctttttttaagaaaaatgaaaaaagtaattcttttgtctgaaggggaaaggcattctttcatttttttctttttttttttttttttttatgacttgcaggcacaatatctagtactgcaactgccagaacttggtattgtagctgctgcccgctgactagcagctggactgattttgaataaaaatgaaagcattaaagggtttccctacaaaacatttttctttaaaatacttttgaaatggctataagcagttgactttcacccttggagagcatcacactgtgtgaggttcagtgattgttgaccctccccagcccctcctgcttctttaagttatctgtgtgcgtgcgcttcctctcaatcttctttgcacgctcatttctttttctctgacccatgagaaaggaaaacttactgatgataatttttaaatagtgtaatttattcatttatagcatgtcaggataaattaaaagaacatttgtctggaaatgctgccgggagcctattgtgtaaatgtaggtattttgtaaaataaccttgaaattgtaaattgacacgtgtttggtcagattgtgtcaagtttaatttgttttgttttcttttttcttttttttatttgaaaactactttagcaataattaattccatgattatcacattctgccattaagggatattagtaccgtaatactgaagaaattttattaagtctgaacttctggggtaggcagcttctttgtttcttttctatccacccttgtcggttgaggtatttgtttcttgactaataaaccctttgatacttttagccagaaatcagtctcataaagctatttttgagtatagtttgtgtaaaataaaaatgtttagctttggtaataacttccaagctgaactccctctagcaagatatttttcagtgcttttatttactatgcacttagactatgcactttttctgaaatatttttgtaacacttttttgtatttttgccatttgaaaaggttgtggtgtagttggtctgtaattaagttgcagatttaaaactgctgttagctttgtaaatcaaaatataggtgttttttgtcctggtatatcgtcattccatctgcagctggagctggaatcccattgatcttctagctaccattcattttcttcactgttcacaaaagaagagtgtgaaattcagtgaatgctgttactaatcctgttacgagatgaatctcatttcaccaaaattaaattatgtttttccgctaaaatgatgatacaagttgaagacacatcactctgaaattggaagacctcaccacttaaggctccacagtggcttactcagctgaactctaggttactactctttactttgttcacccattggggggtgcagtttttttaaaatgttgggagatggccattctaactactgttgaatgtctctgttttgggaaggtataacaagaaataaaaaagaatatatatgaagggagagactggttatctcctccca

SEQ ID NO: 325444 - DNA, 1585 bp, Homo sapiens
tcggagcgagcgcccgagatccctttcccagagtgctctgcgccgtgaagaagcggctcccggggactgggggcattttgtgttggctggagctggagtaacaagatggcgtcgtccgcggagtgacaggggtccctctgggccggagccggcggcagtggtggcagcggtatcgccgccctagctcaccgcgccccttttccagcccgcgacgtcgccgcgcaagcgaggcagcggcggccgccgagaaacaagtggcccagcctggtaaccgccgagaagcccttcacaaactgcggcctggcaaaaagaaacctgactgagcggcggtgatcaggttcccctctgctgattctgggccccgaaccccggtaaaggcctccgtgttccgtttcctgccgccctcctccgtagccttgcctagtgtaggagccccgaggcctccgtcctcttcccagaggtgtcggggcttggccccagcctccatcttcgtctctcaggatggcgagtagcagcggctccaaggctgaattcattgtcggagggaaatataaactggtacggaagatcgggtctggctccttcggggacatctatttggcgatcaacatcaccaacggcgaggaagtggcagtgaagctagaatctcagaaggccaggcatccccagttgctgtacgagagcaagctctataagattcttcaaggtggggttggcatcccccacatacggtggtatggtcaggaaaaagactacaatgtactagtcatggatcttctgggacctagcctcgaagacctcttcaatttctgttcaagaaggttcacaatgaaaactgtacttatgttagctgaccagatgatcagtagaattgaatatgtgcatacaaagaattttatacacagagacattaaaccagataacttcctaatgggtattgggcgtcactgtaataagttattccttattgattttggtttggccaaaaagtacagagacaacaggacaaggcaacacataccatacagagaagataaaaacctcactggcactgcccgatatgctagcatcaatgcacatcttggtattgagcagagtcgccgagatgacatggaatcattaggatatgttttgatgtattttaatagaaccagcctgccatggcaagggctaaaggctgcaacaaagaaacaaaaatatgaaaagattagtgaaaagaagatgtccacgcctgttgaagttttatgtaaggggtttcctgcagaatttgcgatgtacttaaactattgtcgtgggctacgctttgaggaagccccagattacatgtatctgaggcagctattccgcattcttttcaggaccctgaaccatcaatatgactacacatttgattggacaatgttaaagcagaaagcagcacagcaggcagccttcagataaaatgctgaaggctgctgcaggagagttcgcagataatccctgctcttctgtgaagcgaggcaacatggttcgggcagctcgagctttgctctctgctgttacccggttgctgattttggctgacatggcagatgtctacaaatta

SEQ ID NO: 325445 - DNA, 1307 bp, Homo sapiens
  misc_feature (1260)..(1260): n is a, c, g, or t
  misc_feature (1272)..(1272): n is a, c, g, or t
  misc_feature (1280)..(1280): n is a, c, g, or t
  misc_feature (1292)..(1292): n is a, c, g, or t
tcggagcgagcgcccgagatccctttcccagagtgctctgcgccgtgaagaagcggctcccggggactgggggcattttgtgttggctggagctggagtaacaagatggcgtcgtccgcggagtgacaggggtccctctgggccggagccggcggcagtggtggcagcggtatcgccgccctagctcaccgcgccccttttccagcccgcgacgtcgccgcgcaagcgaggcagcggcggccgccgagaaacaagtggcccagcctggtaaccgccgagaagcccttcacaaactgcggcctggcaaaaagaaacctgactgagcggcggtgatcaggttcccctctgctgattctgggccccgaaccccggtaaaggcctccgtgttccgtttcctgccgccctcctccgtagccttgcctagtgtaggagccccgaggcctccgtcctcttcccagaggtgtcggggcttggccccagcctccatcttcgtctctcaggatggcgagtagcagcggctccaaggctgaattcattgtcggagggaaatataaactggtacggaagatcgggtctggctccttcggggacatctatttggcgatcaacatcaccaacggcgaggaagtggcagtgaagctagaatctcagaaggccaggcatccccagttgctgtacgagagcaagctctataagattcttcaaggtggggttggcatcccccacatacggtggtatggtcaggaaaaagactacaatgtactagtcatggatcttctgggacctagcctcgaagacctcttcaatttctgttcaagaaggttcacaatgaaaactgtacttatgttagctgaccagatgatcagtagaattgaatatgtgcatacaaagaattttatacacagagacattaaaccagataacttcctaatgggtattgggcgtcactgtaataagttattccttattgattttggtttggccaaaaagtacagagacaacaggacaaggcaacacataccatacagagaagataaaaacctcactggcactgcccgatatgctagcatcaatgcacatcttggtattgagcagagtcgccgagatgacatggaatcattaggatatgttttgatgtattttaatagaaccagcctgccatggcaagggctaaaggctgcaacaaagaaacaaaaatatgaaaagattagtgaaaagaagatgtccacgcctgttgaagttttatgtaaggggtttccngcagaatttgcnatgtactnaaactattgtcnggggtagaagtggta

SEQ ID NO: 325446 - DNA, 6436 bp, Homo sapiens
gggaggctgaggtgggagtatcacctgagccctggaggttgaggctgcaatgagagctgtgatcatgccactgcactccagcctgggcaacagatgagaccctgtgtcacaacaaggaatttttagaaggtgctttttatattactcttcacagagttaaattttcagaggatttagtattattgaactaagtttcataagtgtattttaagcaagtaaatctctaatgtaggaaaatccccaaaatggtagcatttactaatgttttatatggtaatttttgaaaaatatatctgatatttcttcagtaaaaatggtgttgttttaataacttaataagaatgtttaaagattctttaagtctggcttatctagctaatgtgggcctattaaataataggcagacttctgccttccttatattctttagatcttttcaaatactccattccaatatccatcaaaagacttctctttatgccacttattatctatactagtttttaatgttcaattactacaagattataattactgtttttattcatgttcccaagaaaaatacataagattcacacccaacacacttcgaaatttatttcactccctttgactatatgtgattatcaaaaaagtatttttcaagatattaaaaataagtaaaggaaaatgaaatatttttaggacattcaaaatctaatgaagttcagtgtttctttaattgagggcaggcagaggtgggggagaatttcagaaggtagtgaacccaaaggtggattcttggataattctactattctgtactctcatcatcttaacccatctgtttactaccctaaccatagttactaagcagagttttatcataataatatagacagctctcaaagtattgacattcagaggggattacaaatattatttttctatcatattgacctaccatgtccacagtcttccttgaattaccttccagttttactgggctgcatctaccgtttatgtctagtttgactttttctgagttcaccaattgctgctaggaatgtgctggtcactcagcagcacacccacatcacaggggaagattttgaaatacctggacagtctgaacacactgctctgaatacactcaattctaagaagtaccagggaaccgcatcttcttgctgaaatcttgaatttttgtcagctttttttttttactgtggacagtaaagctggaaagatctaaataacccaacaggaaatgcggatgaaagtgcaagagttggtttgtggtcatctggagtccatgtctccaagactgctggaccttcaaattctgcaacttgttagatcatctggatgatagcacaactgttagaagacctagaagaatacagcgttgctatgactcagtggtgttgaatgcagaccatctaccagctggggaaagaatcaattataaacaggtgaataaagggattcattcctcattttaactgatgttacagtgaagatgggttcttgaactcttggaagcctggatgagccacctaatctgcaagataaaaaccaaagaccaatgcgtattggggaaaagaatgcttagtactgcaagactgttgaatacctgttgaatattcctattgaggttttttcctaaacatacttcagtaacatcttaggacaattcactggagaaatgttgatccctggctggaatgtcataccattgacccatttgaagagttaaagctggatttgactgctctattctaccaggaatattgttagggtagccttttaccagtttctaaacaattgtaatcatttattgactcagcaattcctcagataacaggtcaaaagatgtacagatacattctgaagttttcttgctattaaaggcacaagagtttccttgtattttgactgacaatgtagcatgtttccattttagtttgttagtgatggtggttttccctttgaaagccatttggtatattcaccataacaattagtttaatatgattacataagaaaactatgataaaacccagcaattttagtagttgtgaaaatacgttttttaaatcatgtttaagaagaattgcaagacttgaaaccaaatcctgatgggggaattctgtttaatcctgtttaatctgtttaatttctgtttaatccttagtttcttaacctgcatagcttatcctgtattgtactttttttcttttttaaactcccaaacaagaagcttgaaacttttcctgtattttaaaattgaaatttggtcacagggtatagtcagatttttattaaggtttggtttgacaacctttaaaagaaaggtttacctcgctaatacttcttaataacatgcatcaaatgatattccctatggtgaagtatattctcaaagttatgttatctttcatttttggcatttggtgcttatggacttagtacccaggcaacaaagatctattatgcacctactctcttgtatgttcgctattatttcccaaaaaaaaaaaggggcatatatgcataagaaataaatattagaattattttgtttctcccacaaagcccatgggagatggcccaacaaatgtttaaaaagtaaaagaagctgggcacggtggctcccacctgtaacccccacactttgggaggccatggcgggtggatcacgaggtcaggagtttgagaccagcctggccaacacagtgaaactgtgtctctactataaatacaaaaattagccaggcatggtggcaggcacctatagtcccagctactcaggaggctgaggcaggagaatcgcttgaacccaggaggcagaggttgcggtgagccaagatcatgccactgccctccagcctgggtgacagagcgagactgtctccaaaaaaaaagaaaaaagaactaaaagaaaaggagcagtttatgattgaagaaaacatgacctgggctgaagaagtgaggattgattggagtgggctagaatgagctatagtttctagctcatttgtaaggaggtagacaaaggagcattggtgcctcagagtgggtgtctggtgagaggaaaaacggtgcttaagagattttcaggctattgctgtgggacaggcatattttctccctttgcctttagctgtagataaagtgtggttatgacctgaggcttcttgtattcaaacttggcctagggcctatgtagaggccctagggtctacttgtggtggaggagggaagtatttgtagaatgtgtaggcttgagaagtaaataaagccaaaaaagcatcacttgcttacatttttaaatgagtcacaaaacaatctttctaatgcggccggtaaagaagttttaaaggtctaaggtttctctacagaaattacatgcttctcaggtctttgtttagtaaaataatacagataattatgctttgaatgcatttattattaaagctaaccgttttaatttgtgtcagaaataatttgtgcctatggtaggattaaaattgtattctttagttaaagcaaagcaatctgtttttcattgatttgataaatatgtgaatgcctaatatgttctgcatatgtaaaaatgcagaaacatgctcatttgaattactaataattattttagtatgctgagaggctttgaattcactgtaccactccttcctagagtcattcaaaacagaaaaaattagttttaagtatagattcatgtttttctgttttaaaaagttgagctaatacttttcacaagagacgaaataacatgagccactataattattggctcagttccacccaatttccatattttgggtgtaatttaaaatttttgacttggaattttaactttttttttgttttgattttttaccaggtttctaagcatgaattgaggaacagaagaagcagagcagatgatcggagcagcatttgtttctccccaaatctagaaattttagttcatatgtacactagccagtggttgtggacaaccatttacttggtgtaaagaacttaatttcagtataaactgactctgggcagcattggtgatgctgtatcctgagttgtagcctctgtaattgtgaatattaactgagatagtgaaacatggtgtccggttttctattgcattttttcaagtggaaaagttaactaaatggttgacacacaaaaattggtggagaaattgtgcatatgccaattttttgttaaaaccttttgttttgaactatactgctttgagatctcatttcagaagaacggcatgaacagtcttcagccacagttgtgatggttgttaaatgctcacaattgtgcattcttagggtttttccatccctggggtttgcaagttgttcacttaaaacattcttaaaatggttggcttcttgtctgcaagccagctgatatggtagcaaccaaagattccagtgtttgagcatatgaaagactctgcctgcttaattgtgctagaaataacagcatctaaagtgaagacttaagaaaaacttagtgactactagattatccttaggactctgcattaactctataatgttcttggtattaaaaaaaaagcatatttgtcacagaaatttagttaacatcttacaactgaacatgtatgtatgttgcttagataaatgtaatcactgtaaacatctatatgatctgggattttgtttttattttgaaatgggagcttttttgtttacaagttcattaaaaactaaaaactgtttctgtaaggaaatgagattttttttaaacaacaaaaaatgccttgctgactcactattaaataaaaatctccccaattttttgatagactacttcaagccatttgttacatggtattcctttgcaagtcaatttaggtttcgtgttataacttttcctctttttttaagaaaaatgaaaaaagtaattcttttgtctgaaggggaaaggcattctttcatttttttctttttttttttttttttttatgacttgcaggcacaatatctagtactgcaactgccagaacttggtattgtagctgctgcccgctgactagcagctggactgattttgaataaaaatgaaagcattaaagggtttccctacaaaacatttttctttaaaatacttttgaaatggctataagcagttgactttcacccttggagagcatcacactgtgtgaggttcagtgattgttgaccctccccagcccctcctgcttctttaagttatctgtgtgcgtgcgcttcctctcaatcttctttgcacgctcatttctttttctctgacccatgagaaaggaaaacttactgatgataatttttaaatagtgtaatttattcatttatagcatgtcaggataaattaaaagaacatttgtctggaaatgctgccgggagcctattgtgtaaatgtaggtattttgtaaaataaccttgaaattgtaaattgacacgtgtttggtcagattgtgtcaagtttaatttgttttgttttcttttttcttttttttatttgaaaactactttagcaataattaattccatgattatcacattctgccattaagggatattagtaccgtaatactgaagaaattttattaagtctgaacttctggggtaggcagcttctttgtttcttttctatccacccttgtcggttgaggtatttgtttcttgactaataaaccctttgatacttttagccagaaatcagtctcataaagctatttttgagtatagtttgtgtaaaataaaaatgtttagctttggtaataacttccaagctgaactccctctagcaagatatttttcagtgcttttatttactatgcacttagactatgcactttttctgaaatatttttgtaacacttttttgtatttttgccatttgaaaaggttgtggtgtagttggtctgtaattaagttgcagatttaaaactgctgttagctttgtaaatcaaaatataggtgttttttgtcctggtatatcgtcattccatctgcagctggagctggaatcccattgatcttctagctaccattcattttcttcactgttcacaaaagaagagtgtgaaattcagtgaatgctgttactaatcctgttacgagatgaatctcatttcaccaaaattaaattatgtttttccgctaaaatgatgatacaagttgaagacacatcactctgaaattggaagacctcaccacttaaggctccacagtggcttactcagctgaactctaggttactactctttactttgttcacccattggggggtgcagtttttttaaaatgttgggagatggccattctaactactgttgaatgtctctgttttgggaaggtataacaagaaataaaaaagaatatatatgaagggagagactggttatctcctccca

SEQ ID NO: 325447 - DNA, 5653 bp, Homo sapiens
aaaaaaaaaaaaaaaaccccacaaccatgttataggaaaagttagtataaatgacatagcataattaatatattcaaaataacttttaaaaagttgtcttgtagcttgaagggatcctaaatatcaaaagcccatcacaaacttacaagccttactgctacgtaaatatccctttgaactagtttctggttctatttaaaaagtcgaaaacagttgaaattaatttacgaataagaacagatacacactttgtggggaggctgaggtggtaggatctcctgagcccaggagttttaagtccagcctgggcaacataacagcaagaccccatctcaaaaaaaaaaaagcatatcttttgtttatttttttaatagacaaagtctcactatgttgcccaggtttatttggaactcctggctttaagtgatcttcctgcctcagcctcccaaagtgttagcattatagatgtgagccacctcgtctgggccagagcatacattttagatttcagattgggtggcgggcagggatagaatatccttgttagttatataaaaataaacttttttttgctttttgcagatttgaaatttaattaagctattaacttcttaatcatcacatcctccaactctgttttaactcccccctccccctcccctttttttttaaggaataaagggattcattcctcattttaactgatgttacagtgaagatgggttcttgaactcttggaagcctggatgagccacctaatctgcaagataaaaaccaaagaccaatgcgtattggggaaaagaatgcttagtactgcaagactgttgaatacctgttgaatattcctattgaggttttttcctaaacatacttcagtaacatcttaggacaattcactggagaaatgttgatccctggctggaatgtcataccattgacccatttgaagagttaaagctggatttgactgctctattctaccaggaatattgttagggtagccttttaccagtttctaaacaattgtaatcatttattgactcagcaattcctcagataacaggtcaaaagatgtacagatacattctgaagttttcttgctattaaaggcacaagagtttccttgtattttgactgacaatgtagcatgtttccattttagtttgttagtgatggtggttttccctttgaaagccatttggtatattcaccataacaattagtttaatatgattacataagaaaactatgataaaacccagcaattttagtagttgtgaaaatacgttttttaaatcatgtttaagaagaattgcaagacttgaaaccaaatcctgatgggggaattctgtttaatcctgtttaatctgtttaatttctgtttaatccttagtttcttaacctgcatagcttatcctgtattgtactttttttcttttttaaactcccaaacaagaagcttgaaacttttcctgtattttaaaattgaaatttggtcacagggtatagtcagatttttattaaggtttggtttgacaacctttaaaagaaaggtttacctcgctaatacttcttaataacatgcatcaaatgatattccctatggtgaagtatattctcaaagttatgttatctttcatttttggcatttggtgcttatggacttagtacccaggcaacaaagatctattatgcacctactctcttgtatgttcgctattatttcccaaaaaaaaaaaggggcatatatgcataagaaataaatattagaattattttgtttctcccacaaagcccatgggagatggcccaacaaatgtttaaaaagtaaaagaagctgggcacggtggctcccacctgtaacccccacactttgggaggccatggcgggtggatcacgaggtcaggagtttgagaccagcctggccaacacagtgaaactgtgtctctactataaatacaaaaattagccaggcatggtggcaggcacctatagtcccagctactcaggaggctgaggcaggagaatcgcttgaacccaggaggcagaggttgcggtgagccaagatcatgccactgccctccagcctgggtgacagagcgagactgtctccaaaaaaaaagaaaaaagaactaaaagaaaaggagcagtttatgattgaagaaaacatgacctgggctgaagaagtgaggattgattggagtgggctagaatgagctatagtttctagctcatttgtaaggaggtagacaaaggagcattggtgcctcagagtgggtgtctggtgagaggaaaaacggtgcttaagagattttcaggctattgctgtgggacaggcatattttctccctttgcctttagctgtagataaagtgtggttatgacctgaggcttcttgtattcaaacttggcctagggcctatgtagaggccctagggtctacttgtggtggaggagggaagtatttgtagaatgtgtaggcttgagaagtaaataaagccaaaaaagcatcacttgcttacatttttaaatgagtcacaaaacaatctttctaatgcggccggtaaagaagttttaaaggtctaaggtttctctacagaaattacatgcttctcaggtctttgtttagtaaaataatacagataattatgctttgaatgcatttattattaaagctaaccgttttaatttgtgtcagaaataatttgtgcctatggtaggattaaaattgtattctttagttaaagcaaagcaatctgtttttcattgatttgataaatatgtgaatgcctaatatgttctgcatatgtaaaaatgcagaaacatgctcatttgaattactaataattattttagtatgctgagaggctttgaattcactgtaccactccttcctagagtcattcaaaacagaaaaaattagttttaagtatagattcatgtttttctgttttaaaaagttgagctaatacttttcacaagagacgaaataacatgagccactataattattggctcagttccacccaatttccatattttgggtgtaatttaaaatttttgacttggaattttaactttttttttgttttgattttttaccaggtttctaagcatgaattgaggaacagaagaagcagagcagatgatcggagcagcatttgtttctccccaaatctagaaattttagttcatatgtacactagccagtggttgtggacaaccatttacttggtgtaaagaacttaatttcagtataaactgactctgggcagcattggtgatgctgtatcctgagttgtagcctctgtaattgtgaatattaactgagatagtgaaacatggtgtccggttttctattgcattttttcaagtggaaaagttaactaaatggttgacacacaaaaattggtggagaaattgtgcatatgccaattttttgttaaaaccttttgttttgaactatactgctttgagatctcatttcagaagaacggcatgaacagtcttcagccacagttgtgatggttgttaaatgctcacaattgtgcattcttagggtttttccatccctggggtttgcaagttgttcacttaaaacattcttaaaatggttggcttcttgtctgcaagccagctgatatggtagcaaccaaagattccagtgtttgagcatatgaaagactctgcctgcttaattgtgctagaaataacagcatctaaagtgaagacttaagaaaaacttagtgactactagattatccttaggactctgcattaactctataatgttcttggtattaaaaaaaaagcatatttgtcacagaaatttagttaacatcttacaactgaacatgtatgtatgttgcttagataaatgtaatcactgtaaacatctatatgatctgggattttgtttttattttgaaatgggagcttttttgtttacaagttcattaaaaactaaaaactgtttctgtaaggaaatgagattttttttaaacaacaaaaaatgccttgctgactcactattaaataaaaatctccccaattttttgatagactacttcaagccatttgttacatggtattcctttgcaagtcaatttaggtttcgtgttataacttttcctctttttttaagaaaaatgaaaaaagtaattcttttgtctgaaggggaaaggcattctttcatttttttctttttttttttttttttttatgacttgcaggcacaatatctagtactgcaactgccagaacttggtattgtagctgctgcccgctgactagcagctggactgattttgaataaaaatgaaagcattaaagggtttccctacaaaacatttttctttaaaatacttttgaaatggctataagcagttgactttcacccttggagagcatcacactgtgtgaggttcagtgattgttgaccctccccagcccctcctgcttctttaagttatctgtgtgcgtgcgcttcctctcaatcttctttgcacgctcatttctttttctctgacccatgagaaaggaaaacttactgatgataatttttaaatagtgtaatttattcatttatagcatgtcaggataaattaaaagaacatttgtctggaaatgctgccgggagcctattgtgtaaatgtaggtattttgtaaaataaccttgaaattgtaaattgacacgtgtttggtcagattgtgtcaagtttaatttgttttgttttcttttttcttttttttatttgaaaactactttagcaataattaattccatgattatcacattctgccattaagggatattagtaccgtaatactgaagaaattttattaagtctgaacttctggggtaggcagcttctttgtttcttttctatccacccttgtcggttgaggtatttgtttcttgactaataaaccctttgatacttttagccagaaatcagtctcataaagctatttttgagtatagtttgtgtaaaataaaaatgtttagctttggtaataacttccaagctgaactccctctagcaagatatttttcagtgcttttatttactatgcacttagactatgcactttttctgaaatatttttgtaacacttttttgtatttttgccatttgaaaaggttgtggtgtagttggtctgtaattaagttgcagatttaaaactgctgttagctttgtaaatcaaaatataggtgttttttgtcctggtatatcgtcattccatctgcagctggagctggaatcccattgatcttctagctaccattcattttcttcactgttcacaaaagaagagtgtgaaattcagtgaatgctgttactaatcctgttacgagatgaatctcatttcaccaaaattaaattatgtttttccgctaaaatgatgatacaagttgaagacacatcactctgaaattggaagacctcaccacttaaggctccacagtggcttactcagctgaactctaggttactactctttactttgttcacccattggggggtgcagtttttttaaaatgttgggagatggccattctaactactgttgaatgtctctgttttgggaaggtataacaagaaataaaaaagaatatatatgaagggagagactggttatctcctccca

SEQ ID NO: 325448 - DNA, 6409 bp, Homo sapiens
gggaggctgaggtgggagtatcacctgagccctggaggttgaggctgcaatgagagctgtgatcatgccactgcactccagcctgggcaacagatgagaccctgtgtcacaacaaggaatttttagaaggtgctttttatattactcttcacagagttaaattttcagaggatttagtattattgaactaagtttcataagtgtattttaagcaagtaaatctctaatgtaggaaaatccccaaaatggtagcatttactaatgttttatatggtaatttttgaaaaatatatctgatatttcttcagtaaaaatggtgttgttttaataacttaataagaatgtttaaagattctttaagtctggcttatctagctaatgtgggcctattaaataataggcagacttctgccttccttatattctttagatcttttcaaatactccattccaatatccatcaaaagacttctctttatgccacttattatctatactagtttttaatgttcaattactacaagattataattactgtttttattcatgttcccaagaaaaatacataagattcacacccaacacacttcgaaatttatttcactccctttgactatatgtgattatcaaaaaagtatttttcaagatattaaaaataagtaaaggaaaatgaaatatttttaggacattcaaaatctaatgaagttcagtgtttctttaattgagggcaggcagaggtgggggagaatttcagaaggtagtgaacccaaaggtggattcttggataattctactattctgtactctcatcatcttaacccatctgtttactaccctaaccatagttactaagcagagttttatcataataatatagacagctctcaaagtattgacattcagaggggattacaaatattatttttctatcatattgacctaccatgtccacagtcttccttgaattaccttccagttttactgggctgcatctaccgtttatgtctagtttgactttttctgagttcaccaattgctgctaggaatgtgctggtcactcagcagcacacccacatcacaggggaagattttgaaatacctggacagtctgaacacactgctctgaatacactcaattctaagaagtaccagggaaccgcatcttcttgctgaaatcttgaatttttgtcagctttttttttttactgtggacagtaaagctggaaagatctaaataacccaacaggaaatgcggatgaaagtgcaagagttggtttgtggtcatctggagtccatgtctccaagactgctggaccttcaaattctgcaactttgttagaagacctagaagaatacagcgttgctatgactcagtggtgttgaatgcagaccatctaccagctggggaaagaatcaattataaacaggtgaataaagggattcattcctcattttaactgatgttacagtgaagatgggttcttgaactcttggaagcctggatgagccacctaatctgcaagataaaaaccaaagaccaatgcgtattggggaaaagaatgcttagtactgcaagactgttgaatacctgttgaatattcctattgaggttttttcctaaacatacttcagtaacatcttaggacaattcactggagaaatgttgatccctggctggaatgtcataccattgacccatttgaagagttaaagctggatttgactgctctattctaccaggaatattgttagggtagccttttaccagtttctaaacaattgtaatcatttattgactcagcaattcctcagataacaggtcaaaagatgtacagatacattctgaagttttcttgctattaaaggcacaagagtttccttgtattttgactgacaatgtagcatgtttccattttagtttgttagtgatggtggttttccctttgaaagccatttggtatattcaccataacaattagtttaatatgattacataagaaaactatgataaaacccagcaattttagtagttgtgaaaatacgttttttaaatcatgtttaagaagaattgcaagacttgaaaccaaatcctgatgggggaattctgtttaatcctgtttaatctgtttaatttctgtttaatccttagtttcttaacctgcatagcttatcctgtattgtactttttttcttttttaaactcccaaacaagaagcttgaaacttttcctgtattttaaaattgaaatttggtcacagggtatagtcagatttttattaaggtttggtttgacaacctttaaaagaaaggtttacctcgctaatacttcttaataacatgcatcaaatgatattccctatggtgaagtatattctcaaagttatgttatctttcatttttggcatttggtgcttatggacttagtacccaggcaacaaagatctattatgcacctactctcttgtatgttcgctattatttcccaaaaaaaaaaaggggcatatatgcataagaaataaatattagaattattttgtttctcccacaaagcccatgggagatggcccaacaaatgtttaaaaagtaaaagaagctgggcacggtggctcccacctgtaacccccacactttgggaggccatggcgggtggatcacgaggtcaggagtttgagaccagcctggccaacacagtgaaactgtgtctctactataaatacaaaaattagccaggcatggtggcaggcacctatagtcccagctactcaggaggctgaggcaggagaatcgcttgaacccaggaggcagaggttgcggtgagccaagatcatgccactgccctccagcctgggtgacagagcgagactgtctccaaaaaaaaagaaaaaagaactaaaagaaaaggagcagtttatgattgaagaaaacatgacctgggctgaagaagtgaggattgattggagtgggctagaatgagctatagtttctagctcatttgtaaggaggtagacaaaggagcattggtgcctcagagtgggtgtctggtgagaggaaaaacggtgcttaagagattttcaggctattgctgtgggacaggcatattttctccctttgcctttagctgtagataaagtgtggttatgacctgaggcttcttgtattcaaacttggcctagggcctatgtagaggccctagggtctacttgtggtggaggagggaagtatttgtagaatgtgtaggcttgagaagtaaataaagccaaaaaagcatcacttgcttacatttttaaatgagtcacaaaacaatctttctaatgcggccggtaaagaagttttaaaggtctaaggtttctctacagaaattacatgcttctcaggtctttgtttagtaaaataatacagataattatgctttgaatgcatttattattaaagctaaccgttttaatttgtgtcagaaataatttgtgcctatggtaggattaaaattgtattctttagttaaagcaaagcaatctgtttttcattgatttgataaatatgtgaatgcctaatatgttctgcatatgtaaaaatgcagaaacatgctcatttgaattactaataattattttagtatgctgagaggctttgaattcactgtaccactccttcctagagtcattcaaaacagaaaaaattagttttaagtatagattcatgtttttctgttttaaaaagttgagctaatacttttcacaagagacgaaataacatgagccactataattattggctcagttccacccaatttccatattttgggtgtaatttaaaatttttgacttggaattttaactttttttttgttttgattttttaccaggtttctaagcatgaattgaggaacagaagaagcagagcagatgatcggagcagcatttgtttctccccaaatctagaaattttagttcatatgtacactagccagtggttgtggacaaccatttacttggtgtaaagaacttaatttcagtataaactgactctgggcagcattggtgatgctgtatcctgagttgtagcctctgtaattgtgaatattaactgagatagtgaaacatggtgtccggttttctattgcattttttcaagtggaaaagttaactaaatggttgacacacaaaaattggtggagaaattgtgcatatgccaattttttgttaaaaccttttgttttgaactatactgctttgagatctcatttcagaagaacggcatgaacagtcttcagccacagttgtgatggttgttaaatgctcacaattgtgcattcttagggtttttccatccctggggtttgcaagttgttcacttaaaacattcttaaaatggttggcttcttgtctgcaagccagctgatatggtagcaaccaaagattccagtgtttgagcatatgaaagactctgcctgcttaattgtgctagaaataacagcatctaaagtgaagacttaagaaaaacttagtgactactagattatccttaggactctgcattaactctataatgttcttggtattaaaaaaaaagcatatttgtcacagaaatttagttaacatcttacaactgaacatgtatgtatgttgcttagataaatgtaatcactgtaaacatctatatgatctgggattttgtttttattttgaaatgggagcttttttgtttacaagttcattaaaaactaaaaactgtttctgtaaggaaatgagattttttttaaacaacaaaaaatgccttgctgactcactattaaataaaaatctccccaattttttgatagactacttcaagccatttgttacatggtattcctttgcaagtcaatttaggtttcgtgttataacttttcctctttttttaagaaaaatgaaaaaagtaattcttttgtctgaaggggaaaggcattctttcatttttttctttttttttttttttttttatgacttgcaggcacaatatctagtactgcaactgccagaacttggtattgtagctgctgcccgctgactagcagctggactgattttgaataaaaatgaaagcattaaagggtttccctacaaaacatttttctttaaaatacttttgaaatggctataagcagttgactttcacccttggagagcatcacactgtgtgaggttcagtgattgttgaccctccccagcccctcctgcttctttaagttatctgtgtgcgtgcgcttcctctcaatcttctttgcacgctcatttctttttctctgacccatgagaaaggaaaacttactgatgataatttttaaatagtgtaatttattcatttatagcatgtcaggataaattaaaagaacatttgtctggaaatgctgccgggagcctattgtgtaaatgtaggtattttgtaaaataaccttgaaattgtaaattgacacgtgtttggtcagattgtgtcaagtttaatttgttttgttttcttttttcttttttttatttgaaaactactttagcaataattaattccatgattatcacattctgccattaagggatattagtaccgtaatactgaagaaattttattaagtctgaacttctggggtaggcagcttctttgtttcttttctatccacccttgtcggttgaggtatttgtttcttgactaataaaccctttgatacttttagccagaaatcagtctcataaagctatttttgagtatagtttgtgtaaaataaaaatgtttagctttggtaataacttccaagctgaactccctctagcaagatatttttcagtgcttttatttactatgcacttagactatgcactttttctgaaatatttttgtaacacttttttgtatttttgccatttgaaaaggttgtggtgtagttggtctgtaattaagttgcagatttaaaactgctgttagctttgtaaatcaaaatataggtgttttttgtcctggtatatcgtcattccatctgcagctggagctggaatcccattgatcttctagctaccattcattttcttcactgttcacaaaagaagagtgtgaaattcagtgaatgctgttactaatcctgttacgagatgaatctcatttcaccaaaattaaattatgtttttccgctaaaatgatgatacaagttgaagacacatcactctgaaattggaagacctcaccacttaaggctccacagtggcttactcagctgaactctaggttactactctttactttgttcacccattggggggtgcagtttttttaaaatgttgggagatggccattctaactactgttgaatgtctctgttttgggaaggtataacaagaaataaaaaagaatatatatgaagggagagactggttatctcctccca

SEQ ID NO: 325449 - DNA, 6382 bp, Homo sapiens
gggaggctgaggtgggagtatcacctgagccctggaggttgaggctgcaatgagagctgtgatcatgccactgcactccagcctgggcaacagatgagaccctgtgtcacaacaaggaatttttagaaggtgctttttatattactcttcacagagttaaattttcagaggatttagtattattgaactaagtttcataagtgtattttaagcaagtaaatctctaatgtaggaaaatccccaaaatggtagcatttactaatgttttatatggtaatttttgaaaaatatatctgatatttcttcagtaaaaatggtgttgttttaataacttaataagaatgtttaaagattctttaagtctggcttatctagctaatgtgggcctattaaataataggcagacttctgccttccttatattctttagatcttttcaaatactccattccaatatccatcaaaagacttctctttatgccacttattatctatactagtttttaatgttcaattactacaagattataattactgtttttattcatgttcccaagaaaaatacataagattcacacccaacacacttcgaaatttatttcactccctttgactatatgtgattatcaaaaaagtatttttcaagatattaaaaataagtaaaggaaaatgaaatatttttaggacattcaaaatctaatgaagttcagtgtttctttaattgagggcaggcagaggtgggggagaatttcagaaggtagtgaacccaaaggtggattcttggataattctactattctgtactctcatcatcttaacccatctgtttactaccctaaccatagttactaagcagagttttatcataataatatagacagctctcaaagtattgacattcagaggggattacaaatattatttttctatcatattgacctaccatgtccacagtcttccttgaattaccttccagttttactgggctgcatctaccgtttatgtctagtttgactttttctgagttcaccaattgctgctaggaatgtgctggtcactcagcagcacacccacatcacaggggaagattttgaaatacctggacagtctgaacacactgctctgaatacactcaattctaagaagtaccagggaaccgcatcttcttgctgaaatcttgaatttttgtcagctttttttttttactgtggacagtaaagctggaaagatctaaataacccaacaggaaatgcggatgaaagtgcaagagttggtttgtggtcatctggagtccatgtctccaagactgctggaccttcaaattctgcaacttgttagatcatctggatgatagcacaactgttagaagacctagaagaatacagcgttgctatgactcagtggtgttgaatgcagaccatctaccagctggggaaagaatcaattataaacaggtgaataaagggattcattcctcattttaactgatgttacagtgaagatgggttcttgaactcttggaagcctggatgagccacctaatctgcaagataaaaaccaaagaccaatgcgtattggggaaaagaatgcttagtactgcaagactgttgaatacctgttgaatattcctattgaggttttttcctaaacatacttcagtaacatcttaggacaattcactggagaaatgttgatccctggctggaatgtcataccattgacccatttgaagagttaaagctggatttgactgctctattctaccaggaatattgttagggtagccttttaccagtttctaaacaattgtaatcatttattgactcagcaattcctcagataacaggtcaaaagatgtacagatacattctgaagttttcttgctattaaaggcacaagagtttccttgtattttgactgacaatgtagcatgtttccattttagtttgttagtgatggtggttttccctttgaaagccatttggtatattcaccataacaattagtttaatatgattacataagaaaactatgataaaacccagcaattttagtagttgtgaaaatacgttttttaaatcatgtttaagaagaattgcaagacttgaaaccaaatcctgatgggggaattctgtttaatcctgtttaatctgtttaatttctgtttaatccttagtttcttaacctgcatagcttatcctgtattgtactttttttcttttttaaactcccaaacaagaagcttgaaacttttcctgtattttaaaattgaaatttggtcacagggtatagtcagatttttattaaggtttggtttgacaacctttaaaagaaaggtttacctcgctaatacttcttaataacatgcatcaaatgatattccctatggtgaagtatattctcaaagttatgttatctttcatttttggcatttggtgcttatggacttagtacccaggcaacaaagatctattatgcacctactctcttgtatgttcgctattatttcccaaaaaaaaaaaggggcatatatgcataagaaataaatattagaattattttgtttctcccacaaagcccatgggagatggcccaacaaatgtttaaaaagtaaaagaagctgggcacggtggctcccacctgtaacccccacactttgggaggccatggcgggtggatcacgaggtcaggagtttgagaccagcctggccaacacagtgaaactgtgtctctactataaatacaaaaattagccaggcatggtggcaggcacctatagtcccagctactcaggaggctgaggcaggagaatcgcttgaacccaggaggcagaggttgcggtgagccaagatcatgccactgccctccagcctgggtgacagagcgagactgtctccaaaaaaaaagaaaaaagaactaaaagaaaaggagcagtttatgattgaagaaaacatgacctgggctgaagaagtgaggattgattggagtgggctagaatgagctatagtttctagctcatttgtaaggaggtagacaaaggagcattggtgcctcagagtgggtgtctggtgagaggaccctttgcctttagctgtagataaagtgtggttatgacctgaggcttcttgtattcaaacttggcctagggcctatgtagaggccctagggtctacttgtggtggaggagggaagtatttgtagaatgtgtaggcttgagaagtaaataaagccaaaaaagcatcacttgcttacatttttaaatgagtcacaaaacaatctttctaatgcggccggtaaagaagttttaaaggtctaaggtttctctacagaaattacatgcttctcaggtctttgtttagtaaaataatacagataattatgctttgaatgcatttattattaaagctaaccgttttaatttgtgtcagaaataatttgtgcctatggtaggattaaaattgtattctttagttaaagcaaagcaatctgtttttcattgatttgataaatatgtgaatgcctaatatgttctgcatatgtaaaaatgcagaaacatgctcatttgaattactaataattattttagtatgctgagaggctttgaattcactgtaccactccttcctagagtcattcaaaacagaaaaaattagttttaagtatagattcatgtttttctgttttaaaaagttgagctaatacttttcacaagagacgaaataacatgagccactataattattggctcagttccacccaatttccatattttgggtgtaatttaaaatttttgacttggaattttaactttttttttgttttgattttttaccaggtttctaagcatgaattgaggaacagaagaagcagagcagatgatcggagcagcatttgtttctccccaaatctagaaattttagttcatatgtacactagccagtggttgtggacaaccatttacttggtgtaaagaacttaatttcagtataaactgactctgggcagcattggtgatgctgtatcctgagttgtagcctctgtaattgtgaatattaactgagatagtgaaacatggtgtccggttttctattgcattttttcaagtggaaaagttaactaaatggttgacacacaaaaattggtggagaaattgtgcatatgccaattttttgttaaaaccttttgttttgaactatactgctttgagatctcatttcagaagaacggcatgaacagtcttcagccacagttgtgatggttgttaaatgctcacaattgtgcattcttagggtttttccatccctggggtttgcaagttgttcacttaaaacattcttaaaatggttggcttcttgtctgcaagccagctgatatggtagcaaccaaagattccagtgtttgagcatatgaaagactctgcctgcttaattgtgctagaaataacagcatctaaagtgaagacttaagaaaaacttagtgactactagattatccttaggactctgcattaactctataatgttcttggtattaaaaaaaaagcatatttgtcacagaaatttagttaacatcttacaactgaacatgtatgtatgttgcttagataaatgtaatcactgtaaacatctatatgatctgggattttgtttttattttgaaatgggagcttttttgtttacaagttcattaaaaactaaaaactgtttctgtaaggaaatgagattttttttaaacaacaaaaaatgccttgctgactcactattaaataaaaatctccccaattttttgatagactacttcaagccatttgttacatggtattcctttgcaagtcaatttaggtttcgtgttataacttttcctctttttttaagaaaaatgaaaaaagtaattcttttgtctgaaggggaaaggcattctttcatttttttctttttttttttttttttttatgacttgcaggcacaatatctagtactgcaactgccagaacttggtattgtagctgctgcccgctgactagcagctggactgattttgaataaaaatgaaagcattaaagggtttccctacaaaacatttttctttaaaatacttttgaaatggctataagcagttgactttcacccttggagagcatcacactgtgtgaggttcagtgattgttgaccctccccagcccctcctgcttctttaagttatctgtgtgcgtgcgcttcctctcaatcttctttgcacgctcatttctttttctctgacccatgagaaaggaaaacttactgatgataatttttaaatagtgtaatttattcatttatagcatgtcaggataaattaaaagaacatttgtctggaaatgctgccgggagcctattgtgtaaatgtaggtattttgtaaaataaccttgaaattgtaaattgacacgtgtttggtcagattgtgtcaagtttaatttgttttgttttcttttttcttttttttatttgaaaactactttagcaataattaattccatgattatcacattctgccattaagggatattagtaccgtaatactgaagaaattttattaagtctgaacttctggggtaggcagcttctttgtttcttttctatccacccttgtcggttgaggtatttgtttcttgactaataaaccctttgatacttttagccagaaatcagtctcataaagctatttttgagtatagtttgtgtaaaataaaaatgtttagctttggtaataacttccaagctgaactccctctagcaagatatttttcagtgcttttatttactatgcacttagactatgcactttttctgaaatatttttgtaacacttttttgtatttttgccatttgaaaaggttgtggtgtagttggtctgtaattaagttgcagatttaaaactgctgttagctttgtaaatcaaaatataggtgttttttgtcctggtatatcgtcattccatctgcagctggagctggaatcccattgatcttctagctaccattcattttcttcactgttcacaaaagaagagtgtgaaattcagtgaatgctgttactaatcctgttacgagatgaatctcatttcaccaaaattaaattatgtttttccgctaaaatgatgatacaagttgaagacacatcactctgaaattggaagacctcaccacttaaggctccacagtggcttactcagctgaactctaggttactactctttactttgttcacccattggggggtgcagtttttttaaaatgttgggagatggccattctaactactgttgaatgtctctgttttgggaaggtataacaagaaataaaaaagaatatatatgaagggagagactggttatctcctccca

SEQ ID NO: 325450 - DNA, 5496 bp, Homo sapiens
ttaaggaagtgtaagttatctagtggtgaaaacctttttaggaggtttaggtctccttttctccttgagatattaaaaataattttgtggagctgcttgctgcttaacactgttttagagaggccatggggaagaagcaaagtgttttactcaactaagattcaaatgctaaatgttgctcttgaacattttagattagtgttttgtttatgtagttgatttttagtgttttctgtattgtagtttgaaaaatgccagttgtatgagactggattctttggtcacctcccaaagtgttagcattatagatgtgagccacctcgtctgggccagagcatacattttagatttcagattgggtggcgggcagggatagaatatccttgttagttatataaaaataaacttttttttgctttttgcagatttgaaatttaattaagctattaacttcttaatcatcacatcctccaactctgttttaactcccccctccccctcccctttttttttaaggaataaagggattcattcctcattttaactgatgttacagtgaagatgggttcttgaactcttggaagcctggatgagccacctaatctgcaagataaaaaccaaagaccaatgcgtattggggaaaagaatgcttagtactgcaagactgttgaatacctgttgaatattcctattgaggttttttcctaaacatacttcagtaacatcttaggacaattcactggagaaatgttgatccctggctggaatgtcataccattgacccatttgaagagttaaagctggatttgactgctctattctaccaggaatattgttagggtagccttttaccagtttctaaacaattgtaatcatttattgactcagcaattcctcagataacaggtcaaaagatgtacagatacattctgaagttttcttgctattaaaggcacaagagtttccttgtattttgactgacaatgtagcatgtttccattttagtttgttagtgatggtggttttccctttgaaagccatttggtatattcaccataacaattagtttaatatgattacataagaaaactatgataaaacccagcaattttagtagttgtgaaaatacgttttttaaatcatgtttaagaagaattgcaagacttgaaaccaaatcctgatgggggaattctgtttaatcctgtttaatctgtttaatttctgtttaatccttagtttcttaacctgcatagcttatcctgtattgtactttttttcttttttaaactcccaaacaagaagcttgaaacttttcctgtattttaaaattgaaatttggtcacagggtatagtcagatttttattaaggtttggtttgacaacctttaaaagaaaggtttacctcgctaatacttcttaataacatgcatcaaatgatattccctatggtgaagtatattctcaaagttatgttatctttcatttttggcatttggtgcttatggacttagtacccaggcaacaaagatctattatgcacctactctcttgtatgttcgctattatttcccaaaaaaaaaaaggggcatatatgcataagaaataaatattagaattattttgtttctcccacaaagcccatgggagatggcccaacaaatgtttaaaaagtaaaagaagctgggcacggtggctcccacctgtaacccccacactttgggaggccatggcgggtggatcacgaggtcaggagtttgagaccagcctggccaacacagtgaaactgtgtctctactataaatacaaaaattagccaggcatggtggcaggcacctatagtcccagctactcaggaggctgaggcaggagaatcgcttgaacccaggaggcagaggttgcggtgagccaagatcatgccactgccctccagcctgggtgacagagcgagactgtctccaaaaaaaaagaaaaaagaactaaaagaaaaggagcagtttatgattgaagaaaacatgacctgggctgaagaagtgaggattgattggagtgggctagaatgagctatagtttctagctcatttgtaaggaggtagacaaaggagcattggtgcctcagagtgggtgtctggtgagaggaaaaacggtgcttaagagattttcaggctattgctgtgggacaggcatattttctccctttgcctttagctgtagataaagtgtggttatgacctgaggcttcttgtattcaaacttggcctagggcctatgtagaggccctagggtctacttgtggtggaggagggaagtatttgtagaatgtgtaggcttgagaagtaaataaagccaaaaaagcatcacttgcttacatttttaaatgagtcacaaaacaatctttctaatgcggccggtaaagaagttttaaaggtctaaggtttctctacagaaattacatgcttctcaggtctttgtttagtaaaataatacagataattatgctttgaatgcatttattattaaagctaaccgttttaatttgtgtcagaaataatttgtgcctatggtaggattaaaattgtattctttagttaaagcaaagcaatctgtttttcattgatttgataaatatgtgaatgcctaatatgttctgcatatgtaaaaatgcagaaacatgctcatttgaattactaataattattttagtatgctgagaggctttgaattcactgtaccactccttcctagagtcattcaaaacagaaaaaattagttttaagtatagattcatgtttttctgttttaaaaagttgagctaatacttttcacaagagacgaaataacatgagccactataattattggctcagttccacccaatttccatattttgggtgtaatttaaaatttttgacttggaattttaactttttttttgttttgattttttaccaggtttctaagcatgaattgaggaacagaagaagcagagcagatgatcggagcagcatttgtttctccccaaatctagaaattttagttcatatgtacactagccagtggttgtggacaaccatttacttggtgtaaagaacttaatttcagtataaactgactctgggcagcattggtgatgctgtatcctgagttgtagcctctgtaattgtgaatattaactgagatagtgaaacatggtgtccggttttctattgcattttttcaagtggaaaagttaactaaatggttgacacacaaaaattggtggagaaattgtgcatatgccaattttttgttaaaaccttttgttttgaactatactgctttgagatctcatttcagaagaacggcatgaacagtcttcagccacagttgtgatggttgttaaatgctcacaattgtgcattcttagggtttttccatccctggggtttgcaagttgttcacttaaaacattcttaaaatggttggcttcttgtctgcaagccagctgatatggtagcaaccaaagattccagtgtttgagcatatgaaagactctgcctgcttaattgtgctagaaataacagcatctaaagtgaagacttaagaaaaacttagtgactactagattatccttaggactctgcattaactctataatgttcttggtattaaaaaaaaagcatatttgtcacagaaatttagttaacatcttacaactgaacatgtatgtatgttgcttagataaatgtaatcactgtaaacatctatatgatctgggattttgtttttattttgaaatgggagcttttttgtttacaagttcattaaaaactaaaaactgtttctgtaaggaaatgagattttttttaaacaacaaaaaatgccttgctgactcactattaaataaaaatctccccaattttttgatagactacttcaagccatttgttacatggtattcctttgcaagtcaatttaggtttcgtgttataacttttcctctttttttaagaaaaatgaaaaaagtaattcttttgtctgaaggggaaaggcattctttcatttttttctttttttttttttttttttatgacttgcaggcacaatatctagtactgcaactgccagaacttggtattgtagctgctgcccgctgactagcagctggactgattttgaataaaaatgaaagcattaaagggtttccctacaaaacatttttctttaaaatacttttgaaatggctataagcagttgactttcacccttggagagcatcacactgtgtgaggttcagtgattgttgaccctccccagcccctcctgcttctttaagttatctgtgtgcgtgcgcttcctctcaatcttctttgcacgctcatttctttttctctgacccatgagaaaggaaaacttactgatgataatttttaaatagtgtaatttattcatttatagcatgtcaggataaattaaaagaacatttgtctggaaatgctgccgggagcctattgtgtaaatgtaggtattttgtaaaataaccttgaaattgtaaattgacacgtgtttggtcagattgtgtcaagtttaatttgttttgttttcttttttcttttttttatttgaaaactactttagcaataattaattccatgattatcacattctgccattaagggatattagtaccgtaatactgaagaaattttattaagtctgaacttctggggtaggcagcttctttgtttcttttctatccacccttgtcggttgaggtatttgtttcttgactaataaaccctttgatacttttagccagaaatcagtctcataaagctatttttgagtatagtttgtgtaaaataaaaatgtttagctttggtaataacttccaagctgaactccctctagcaagatatttttcagtgcttttatttactatgcacttagactatgcactttttctgaaatatttttgtaacacttttttgtatttttgccatttgaaaaggttgtggtgtagttggtctgtaattaagttgcagatttaaaactgctgttagctttgtaaatcaaaatataggtgttttttgtcctggtatatcgtcattccatctgcagctggagctggaatcccattgatcttctagctaccattcattttcttcactgttcacaaaagaagagtgtgaaattcagtgaatgctgttactaatcctgttacgagatgaatctcatttcaccaaaattaaattatgtttttccgctaaaatgatgatacaagttgaagacacatcactctgaaattggaagacctcaccacttaaggctccacagtggcttactcagctgaactctaggttactactctttactttgttcacccattggggggtgcagtttttttaaaatgttgggagatggccattctaactactgttgaatgtctctgttttgggaaggtataacaagaaataaaaaagaatatatatgaagggagagactggttatctcctccca

SEQ ID NO: 325451 - DNA, 1230 bp, Homo sapiens
tcggagcgagcgcccgagatccctttcccagagtgctctgcgccgtgaagaagcggctcccggggactgggggcattttgtgttggctggagctggagtaacaagatggcgtcgtccgcggagtgacaggggtccctctgggccggagccggcggcagtggtggcagcggtatcgccgccctagctcaccgcgccccttttccagcccgcgacgtcgccgcgcaagcgaggcagcggcggccgccgagaaacaagtggcccagcctggtaaccgccgagaagcccttcacaaactgcggcctggcaaaaagaaacctgactgagcggcggtgatcaggttcccctctgctgattctgggccccgaaccccggtaaaggcctccgtgttccgtttcctgccgccctcctccgtagccttgcctagtgtaggagccccgaggcctccgtcctcttcccagaggtgtcggggcttggccccagcctccatcttcgtctctcaggatggcgagtagcagcggctccaaggctgaattcattgtcggagggaaatataaactggtacggaagatcgggtctggctccttcggggacatctatttggcgatcaacatcaccaacggcgaggaagtggcagtgaagctagaatctcagaaggccaggcatccccagttgctgtacgagagcaagctctataagattcttcaaggtggggttggcatcccccacatacggtggtatggtcaggaaaaagactacaatgtactagtcatggatcttctgggacctagcctcgaagacctcttcaatttctgttcaagaaggttcacaatgaaaactgtacttatgttagctgaccagatgatcagtagaattgaatatgtgcatacaaagaattttatacacagagacattaaaccagataacttcctaatgggtattgggcgtcactgtaataagttattccttattgattttggtttggccaaaaagtacagagacaacaggacaaggcaacacataccatacagagaagataaaaacctcactggcactgcccgatatgctagcatcaatgcacatcttggtattgagcagagtcgccgagatgacatggaatcattaggatatgttttgatgtattttaatagaaccagcctgccatggcaagggctaaagctgcaccaagggaccaaatatgtaaggttgtgtaaggagtgtcccgctcttgag

SEQ ID NO: 325452 - DNA, 3861 bp, Homo sapiens
ttcaacaagtggttaaaaaaattagccctcctcaaagataaggacacagaatataagtgaatcattcattctacacactggcatcactcatttggcagaggagatgtgtcctcaagagaagaggtattcccccaaggttacatcttaccaaagcagtttcaagaagtaaccatctatattagccggatgtggtggtgcacacctgtatccctactcaggaggctgaggcaggagaatcgcttgaacccaggaggcagaggttgcggtgagccaagatcatgccactgccctccagcctgggtgacagagcgagactgtctccaaaaaaaaagaaaaaagaactaaaagaaaaggagcagtttatgattgaagaaaacatgacctgggctgaagaagtgaggattgattggagtgggctagaatgagctatagtttctagctcatttgtaaggaggtagacaaaggagcattggtgcctcagagtgggtgtctggtgagaggaaaaacggtgcttaagagattttcaggctattgctgtgggacaggcatattttctccctttgcctttagctgtagataaagtgtggttatgacctgaggcttcttgtattcaaacttggcctagggcctatgtagaggccctagggtctacttgtggtggaggagggaagtatttgtagaatgtgtaggcttgagaagtaaataaagccaaaaaagcatcacttgcttacatttttaaatgagtcacaaaacaatctttctaatgcggccggtaaagaagttttaaaggtctaaggtttctctacagaaattacatgcttctcaggtctttgtttagtaaaataatacagataattatgctttgaatgcatttattattaaagctaaccgttttaatttgtgtcagaaataatttgtgcctatggtaggattaaaattgtattctttagttaaagcaaagcaatctgtttttcattgatttgataaatatgtgaatgcctaatatgttctgcatatgtaaaaatgcagaaacatgctcatttgaattactaataattattttagtatgctgagaggctttgaattcactgtaccactccttcctagagtcattcaaaacagaaaaaattagttttaagtatagattcatgtttttctgttttaaaaagttgagctaatacttttcacaagagacgaaataacatgagccactataattattggctcagttccacccaatttccatattttgggtgtaatttaaaatttttgacttggaattttaactttttttttgttttgattttttaccaggtttctaagcatgaattgaggaacagaagaagcagagcagatgatcggagcagcatttgtttctccccaaatctagaaattttagttcatatgtacactagccagtggttgtggacaaccatttacttggtgtaaagaacttaatttcagtataaactgactctgggcagcattggtgatgctgtatcctgagttgtagcctctgtaattgtgaatattaactgagatagtgaaacatggtgtccggttttctattgcattttttcaagtggaaaagttaactaaatggttgacacacaaaaattggtggagaaattgtgcatatgccaattttttgttaaaaccttttgttttgaactatactgctttgagatctcatttcagaagaacggcatgaacagtcttcagccacagttgtgatggttgttaaatgctcacaattgtgcattcttagggtttttccatccctggggtttgcaagttgttcacttaaaacattcttaaaatggttggcttcttgtctgcaagccagctgatatggtagcaaccaaagattccagtgtttgagcatatgaaagactctgcctgcttaattgtgctagaaataacagcatctaaagtgaagacttaagaaaaacttagtgactactagattatccttaggactctgcattaactctataatgttcttggtattaaaaaaaaagcatatttgtcacagaaatttagttaacatcttacaactgaacatgtatgtatgttgcttagataaatgtaatcactgtaaacatctatatgatctgggattttgtttttattttgaaatgggagcttttttgtttacaagttcattaaaaactaaaaactgtttctgtaaggaaatgagattttttttaaacaacaaaaaatgccttgctgactcactattaaataaaaatctccccaattttttgatagactacttcaagccatttgttacatggtattcctttgcaagtcaatttaggtttcgtgttataacttttcctctttttttaagaaaaatgaaaaaagtaattcttttgtctgaaggggaaaggcattctttcatttttttctttttttttttttttttttatgacttgcaggcacaatatctagtactgcaactgccagaacttggtattgtagctgctgcccgctgactagcagctggactgattttgaataaaaatgaaagcattaaagggtttccctacaaaacatttttctttaaaatacttttgaaatggctataagcagttgactttcacccttggagagcatcacactgtgtgaggttcagtgattgttgaccctccccagcccctcctgcttctttaagttatctgtgtgcgtgcgcttcctctcaatcttctttgcacgctcatttctttttctctgacccatgagaaaggaaaacttactgatgataatttttaaatagtgtaatttattcatttatagcatgtcaggataaattaaaagaacatttgtctggaaatgctgccgggagcctattgtgtaaatgtaggtattttgtaaaataaccttgaaattgtaaattgacacgtgtttggtcagattgtgtcaagtttaatttgttttgttttcttttttcttttttttatttgaaaactactttagcaataattaattccatgattatcacattctgccattaagggatattagtaccgtaatactgaagaaattttattaagtctgaacttctggggtaggcagcttctttgtttcttttctatccacccttgtcggttgaggtatttgtttcttgactaataaaccctttgatacttttagccagaaatcagtctcataaagctatttttgagtatagtttgtgtaaaataaaaatgtttagctttggtaataacttccaagctgaactccctctagcaagatatttttcagtgcttttatttactatgcacttagactatgcactttttctgaaatatttttgtaacacttttttgtatttttgccatttgaaaaggttgtggtgtagttggtctgtaattaagttgcagatttaaaactgctgttagctttgtaaatcaaaatataggtgttttttgtcctggtatatcgtcattccatctgcagctggagctggaatcccattgatcttctagctaccattcattttcttcactgttcacaaaagaagagtgtgaaattcagtgaatgctgttactaatcctgttacgagatgaatctcatttcaccaaaattaaattatgtttttccgctaaaatgatgatacaagttgaagacacatcactctgaaattggaagacctcaccacttaaggctccacagtggcttactcagctgaactctaggttactactctttactttgttcacccattggggggtgcagtttttttaaaatgttgggagatggccattctaactactgttgaatgtctctgttttgggaaggtataacaagaaataaaaaagaatatatatgaagggagagactggttatctcctccca

SEQ ID NO: 325453 - DNA, 3548 bp, Homo sapiens
aaaaatcaacgaatccaggagctgtttttttttcaaagattaacaaaacagactgcgagtcagactaataaagaagaaaagaaagaagattgattggagtgggctagaatgagctatagtttctagctcatttgtaaggaggtagacaaaggagcattggtgcctcagagtgggtgtctggtgagaggaaaaacggtgcttaagagattttcaggctattgctgtgggacaggcatattttctccctttgcctttagctgtagataaagtgtggttatgacctgaggcttcttgtattcaaacttggcctagggcctatgtagaggccctagggtctacttgtggtggaggagggaagtatttgtagaatgtgtaggcttgagaagtaaataaagccaaaaaagcatcacttgcttacatttttaaatgagtcacaaaacaatctttctaatgcggccggtaaagaagttttaaaggtctaaggtttctctacagaaattacatgcttctcaggtctttgtttagtaaaataatacagataattatgctttgaatgcatttattattaaagctaaccgttttaatttgtgtcagaaataatttgtgcctatggtaggattaaaattgtattctttagttaaagcaaagcaatctgtttttcattgatttgataaatatgtgaatgcctaatatgttctgcatatgtaaaaatgcagaaacatgctcatttgaattactaataattattttagtatgctgagaggctttgaattcactgtaccactccttcctagagtcattcaaaacagaaaaaattagttttaagtatagattcatgtttttctgttttaaaaagttgagctaatacttttcacaagagacgaaataacatgagccactataattattggctcagttccacccaatttccatattttgggtgtaatttaaaatttttgacttggaattttaactttttttttgttttgattttttaccaggtttctaagcatgaattgaggaacagaagaagcagagcagatgatcggagcagcatttgtttctccccaaatctagaaattttagttcatatgtacactagccagtggttgtggacaaccatttacttggtgtaaagaacttaatttcagtataaactgactctgggcagcattggtgatgctgtatcctgagttgtagcctctgtaattgtgaatattaactgagatagtgaaacatggtgtccggttttctattgcattttttcaagtggaaaagttaactaaatggttgacacacaaaaattggtggagaaattgtgcatatgccaattttttgttaaaaccttttgttttgaactatactgctttgagatctcatttcagaagaacggcatgaacagtcttcagccacagttgtgatggttgttaaatgctcacaattgtgcattcttagggtttttccatccctggggtttgcaagttgttcacttaaaacattcttaaaatggttggcttcttgtctgcaagccagctgatatggtagcaaccaaagattccagtgtttgagcatatgaaagactctgcctgcttaattgtgctagaaataacagcatctaaagtgaagacttaagaaaaacttagtgactactagattatccttaggactctgcattaactctataatgttcttggtattaaaaaaaaagcatatttgtcacagaaatttagttaacatcttacaactgaacatgtatgtatgttgcttagataaatgtaatcactgtaaacatctatatgatctgggattttgtttttattttgaaatgggagcttttttgtttacaagttcattaaaaactaaaaactgtttctgtaaggaaatgagattttttttaaacaacaaaaaatgccttgctgactcactattaaataaaaatctccccaattttttgatagactacttcaagccatttgttacatggtattcctttgcaagtcaatttaggtttcgtgttataacttttcctctttttttaagaaaaatgaaaaaagtaattcttttgtctgaaggggaaaggcattctttcatttttttctttttttttttttttttttatgacttgcaggcacaatatctagtactgcaactgccagaacttggtattgtagctgctgcccgctgactagcagctggactgattttgaataaaaatgaaagcattaaagggtttccctacaaaacatttttctttaaaatacttttgaaatggctataagcagttgactttcacccttggagagcatcacactgtgtgaggttcagtgattgttgaccctccccagcccctcctgcttctttaagttatctgtgtgcgtgcgcttcctctcaatcttctttgcacgctcatttctttttctctgacccatgagaaaggaaaacttactgatgataatttttaaatagtgtaatttattcatttatagcatgtcaggataaattaaaagaacatttgtctggaaatgctgccgggagcctattgtgtaaatgtaggtattttgtaaaataaccttgaaattgtaaattgacacgtgtttggtcagattgtgtcaagtttaatttgttttgttttcttttttcttttttttatttgaaaactactttagcaataattaattccatgattatcacattctgccattaagggatattagtaccgtaatactgaagaaattttattaagtctgaacttctggggtaggcagcttctttgtttcttttctatccacccttgtcggttgaggtatttgtttcttgactaataaaccctttgatacttttagccagaaatcagtctcataaagctatttttgagtatagtttgtgtaaaataaaaatgtttagctttggtaataacttccaagctgaactccctctagcaagatatttttcagtgcttttatttactatgcacttagactatgcactttttctgaaatatttttgtaacacttttttgtatttttgccatttgaaaaggttgtggtgtagttggtctgtaattaagttgcagatttaaaactgctgttagctttgtaaatcaaaatataggtgttttttgtcctggtatatcgtcattccatctgcagctggagctggaatcccattgatcttctagctaccattcattttcttcactgttcacaaaagaagagtgtgaaattcagtgaatgctgttactaatcctgttacgagatgaatctcatttcaccaaaattaaattatgtttttccgctaaaatgatgatacaagttgaagacacatcactctgaaattggaagacctcaccacttaaggctccacagtggcttactcagctgaactctaggttactactctttactttgttcacccattggggggtgcagtttttttaaaatgttgggagatggccattctaactactgttgaatgtctctgttttgggaaggtataacaagaaataaaaaagaatatatatgaagggagagactggttatctcctccca

SEQ ID NO: 325454 - DNA, 1335 bp, Homo sapiens
tcggagcgagcgcccgagatccctttcccagagtgctctgcgccgtgaagaagcggctcccggggactgggggcattttgtgttggctggagctggagtaacaagatggcgtcgtccgcggagtgacaggggtccctctgggccggagccggcggcagtggtggcagcggtatcgccgccctagctcaccgcgccccttttccagcccgcgacgtcgccgcgcaagcgaggcagcggcggccgccgagaaacaagtggcccagcctggtaaccgccgagaagcccttcacaaactgcggcctggcaaaaagaaacctgactgagcggcggtgatcaggttcccctctgctgattctgggccccgaaccccggtaaaggcctccgtgttccgtttcctgccgccctcctccgtagccttgcctagtgtaggagccccgaggcctccgtcctcttcccagaggtgtcggggcttggccccagcctccatcttcgtctctcaggatggcgagtagcagcggctccaaggctgaattcattgtcggagggaaatataaactggtacggaagatcgggtctggctccttcggggacatctatttggcgatcaacatcaccaacggcgaggaagtggcagtgaagctagaatctcagaaggccaggcatccccagttgctgtacgagagcaagctctataagattcttcaaggtggggttggcatcccccacatacggtggtatggtcaggaaaaagactacaatgtactagtcatggatcttctgggacctagcctcgaagacctcttcaatttctgttcaagaaggttcacaatgaaaactgtacttatgttagctgaccaggtatgtgaaattttgattagaatataaactgagactagtactgttgactggaatttcattattcataaatcagagtattaaaatcctgtgcatcactatttaaccttagcataggcagaaaaaaaataataatgtgacttgtagatattttcctatgggaataagacaaaacctggaattatcttggtttcttactcatctgtagactagtagttttcaatctgctccttcagatgaagttttagtgtcatatgtagcaggttattgtaagattttgtttggagagtttagagtgtatgtatgcatataattgttgataaatgtttattgacattttggttaaattaagcaaaattgaatattatgtattatgtgtgggactcttagaaaagctatatttttgaggataaaaaggtcctgaagtaatataaggaagaattttttgaccaagtagatgctgcttggagtaatggattc

SEQ ID NO: 325455 - DNA, 1720 bp, Homo sapiens
  misc_feature (15)..(15): n is a, c, g, or t
gtaggggcgggggangggggagaatgtattcattacacggatgatttacacgcgtccggattttttttaaacaacaaaaaatgccttgctgactcactattaaataaaaatctccccaattttttgatagactacttcaagccatttgttacatggtattcctttgcaagtcaatttaggtttcgtgttataacttttcctctttttttaagaaaaatgaaaaaagtaattcttttgtctgaaggggaaaggcattctttcatttttttctttttttttttttttttttatgacttgcaggcacaatatctagtactgcaactgccagaacttggtattgtagctgctgcccgctgactagcagctggactgattttgaataaaaatgaaagcattaaagggtttccctacaaaacatttttctttaaaatacttttgaaatggctataagcagttgactttcacccttggagagcatcacactgtgtgaggttcagtgattgttgaccctccccagcccctcctgcttctttaagttatctgtgtgcgtgcgcttcctctcaatcttctttgcacgctcatttctttttctctgacccatgagaaaggaaaacttactgatgataatttttaaatagtgtaatttattcatttatagcatgtcaggataaattaaaagaacatttgtctggaaatgctgccgggagcctattgtgtaaatgtaggtattttgtaaaataaccttgaaattgtaaattgacacgtgtttggtcagattgtgtcaagtttaatttgttttgttttcttttttcttttttttatttgaaaactactttagcaataattaattccatgattatcacattctgccattaagggatattagtaccgtaatactgaagaaattttattaagtctgaacttctggggtaggcagcttctttgtttcttttctatccacccttgtcggttgaggtatttgtttcttgactaataaaccctttgatacttttagccagaaatcagtctcataaagctatttttgagtatagtttgtgtaaaataaaaatgtttagctttggtaataacttccaagctgaactccctctagcaagatatttttcagtgcttttatttactatgcacttagactatgcactttttctgaaatatttttgtaacacttttttgtatttttgccatttgaaaaggttgtggtgtagttggtctgtaattaagttgcagatttaaaactgctgttagctttgtaaatcaaaatataggtgttttttgtcctggtatatcgtcattccatctgcagctggagctggaatcccattgatcttctagctaccattcattttcttcactgttcacaaaagaagagtgtgaaattcagtgaatgctgttactaatcctgttacgagatgaatctcatttcaccaaaattaaattatgtttttccgctaaaatgatgatacaagttgaagacacatcactctgaaattggaagacctcaccacttaaggctccacagtggcttactcagctgaactctaggttactactctttactttgttcacccattggggggtgcagtttttttaaaatgttgggagatggccattctaactactgttgaatgtctctgttttgggaaggtataacaagaaataaaaaagaatatatatgaagggagagactggttatctcctccca

SEQ ID NO: 325456 - DNA, 1002 bp, Homo sapiens
tcggagcgagcgcccgagatccctttcccagagtgctctgcgccgtgaagaagcggctcccggggactgggggcattttgtgttggctggagctggagtaacaagatggcgtcgtccgcggagtgacaggggtccctctgggccggagccggcggcagtggtggcagcggtatcgccgccctagctcaccgcgccccttttccagcccgcgacgtcgccgcgcaagcgaggcagcggcggccgccgagaaacaagtggcccagcctggtaaccgccgagaagcccttcacaaactgcggcctggcaaaaagaaacctgactgagcggcggtgatcaggttcccctctgctgattctgggccccgaaccccggtaaaggcctccgtgttccgtttcctgccgccctcctccgtagccttgcctagtgtaggagccccgaggcctccgtcctcttcccagaggtgtcggggcttggccccagcctccatcttcgtctctcaggatggcgagtagcagcggctccaaggctgaattcattgtcggagggaaatataaactggtacggaagatcgggtctggctccttcggggacatctatttggcgatcaacatcaccaacggcgaggaagtggcagtgaagctagaatctcagaaggccaggcatccccagttgctgtacgagagcaagctctataagattcttcaaggtggggttggcatcccccacatacgtaagaacccggtgcatataggcgatccgctgagggaagcacggaatggggaagtgggtagaggcaggtaatgagaccagctgaatccgggtcttggtgttttagttacctgggttccctatagctggtggtttcctgtaagtcagtcatctcaattactgagtaaatttcagtttgccaacttatttcattgtattacactgctccatttcgcttccgtcattctcactcttcccgaggctttcatttgcagttatgcgtgcaggtcatct

SEQ ID NO: 325457 - DNA, 1910 bp, Homo sapiens
gggaggctgaggtgggagtatcacctgagccctggaggttgaggctgcaatgagagctgtgatcatgccactgcactccagcctgggcaacagatgagaccctgtgtcacaacaaggaatttttagaaggtgctttttatattactcttcacagagttaaattttcagaggatttagtattattgaactaagtttcataagtgtattttaagcaagtaaatctctaatgtaggaaaatccccaaaatggtagcatttactaatgttttatatggtaatttttgaaaaatatatctgatatttcttcagtaaaaatggtgttgttttaataacttaataagaatgtttaaagattctttaagtctggcttatctagctaatgtgggcctattaaataataggcagacttctgccttccttatattctttagatcttttcaaatactccattccaatatccatcaaaagacttctctttatgccacttattatctatactagtttttaatgttcaattactacaagattataattactgtttttattcatgttcccaagaaaaatacataagattcacacccaacacacttcgaaatttatttcactccctttgactatatgtgattatcaaaaaagtatttttcaagatattaaaaataagtaaaggaaaatgaaatatttttaggacattcaaaatctaatgaagttcagtgtttctttaattgagggcaggcagaggtgggggagaatttcagaaggtagtgaacccaaaggtggattcttggataattctactattctgtactctcatcatcttaacccatctgtttactaccctaaccatagttactaagcagagttttatcataataatatagacagctctcaaagtattgacattcagaggggattacaaatattatttttctatcatattgacctaccatgtccacagtcttccttgaattaccttccagttttactgggctgcatctaccgtttatgtctagtttgactttttctgagttcaccaattgctgctaggaatgtgctggtcactcagcagcacacccacatcacaggggaagattttgaaatacctggacagtctgaacacactgctctgaatacactcaattctaagaagtaccagggaaccgcatcttcttgctgaaatcttgaatttttgtcagctttttttttttactgtggacagtaaagctggaaagatctaaataacccaacaggaaatgcggatgaaagtgcaagagttggtttgtggtcatctggagtccatgtctccaagactgctggaccttcaaattctgcaacttgttagatcatctggatgatagcacaactgttagaagacctagaagaatacagcgttgctatgactcagtggtgttgaatgcagaccatctaccagctggggaaagaatcaattataaacaggtgaataaagggattcattcctcattttaactgatgttacagtgaagatgggttcttgaactcttggaagcctggatgagccacctaatctgcaagataaaaaccaaagaccaatgcgtattggggaaaagaatgcttagtactgcaagactgttgaatacctgttgaatattcctattgaggttttttcctaaacatacttcagtaacatcttaggacaattcactggagaaatgttgatccctggctggaatgtcataccattgacccatttgaagagttaaagctggatttgactgctctattctaccaggaatattgttagggtagccttttaccagtttctaaacaattgtaatcatttattgactcagcaattcctcagataacaggtcaaaagatgtacagatacattctgaagttttcttgctattaaaggcacaagagtttccttgt

SEQ ID NO: 325458 - DNA, 811 bp, Homo sapiens
tcggagcgagcgcccgagatccctttcccagagtgctctgcgccgtgaagaagcggctcccggggactgggggcattttgtgttggctggagctggagtaacaagatggcgtcgtccgcggagtgacaggggtccctctgggccggagccggcggcagtggtggcagcggtatcgccgccctagctcaccgcgccccttttccagcccgcgacgtcgccgcgcaagcgaggcagcggcggccgccgagaaacaagtggcccagcctggtaaccgccgagaagcccttcacaaactgcggcctggcaaaaagaaacctgactgagcggcggtgatcaggttcccctctgctgattctgggccccgaaccccggtaaaggcctccgtgttccgtttcctgccgccctcctccgtagccttgcctagtgtaggagccccgaggcctccgtcctcttcccagaggtgtcggggcttggccccagcctccatcttcgtctctcaggatggcgagtagcagcggctccaaggctgaattcattgtcggagggaaatataaactggtacggaagatcgggtctggctccttcggggacatctatttggcgatcaacatcaccaacggcgaggtaatcatctggggtggggttcacgataacgctgcgcttttactcattccccccaccaccaccgtgcacccccaaagtgctcgggcctctcctcatcgcacgcactcgccagggagtccagggagctagttttcctggcttacgaacctcgtccgctgtctccctaaaagggtcaagaacccgatag

SEQ ID NO: 325459 - DNA, 1814 bp, Homo sapiens
gggaggctgaggtgggagtatcacctgagccctggaggttgaggctgcaatgagagctgtgatcatgccactgcactccagcctgggcaacagatgagaccctgtgtcacaacaaggaatttttagaaggtgctttttatattactcttcacagagttaaattttcagaggatttagtattattgaactaagtttcataagtgtattttaagcaagtaaatctctaatgtaggaaaatccccaaaatggtagcatttactaatgttttatatggtaatttttgaaaaatatatctgatatttcttcagtaaaaatggtgttgttttaataacttaataagaatgtttaaagattctttaagtctggcttatctagctaatgtgggcctattaaataataggcagacttctgccttccttatattctttagatcttttcaaatactccattccaatatccatcaaaagacttctctttatgccacttattatctatactagtttttaatgttcaattactacaagattataattactgtttttattcatgttcccaagaaaaatacataagattcacacccaacacacttcgaaatttatttcactccctttgactatatgtgattatcaaaaaagtatttttcaagatattaaaaataagtaaaggaaaatgaaatatttttaggacattcaaaatctaatgaagttcagtgtttctttaattgagggcaggcagaggtgggggagaatttcagaaggtagtgaacccaaaggtggattcttggataattctactattctgtactctcatcatcttaacccatctgtttactaccctaaccatagttactaagcagagttttatcataataatatagacagctctcaaagtattgacattcagaggggattacaaatattatttttctatcatattgacctaccatgtccacagtcttccttgaattaccttccagttttactgggctgcatctaccgtttatgtctagtttgactttttctgagttcaccaattgctgctaggaatgtgctggtcactcagcagcacacccacatcacaggggaagattttgaaatacctggacagtctgaacacactgctctgaatacactcaattctaagaagtaccagggaaccgcatcttcttgctgaaatcttgaatttttgtcagctttttttttttactgtggacagtaaagctggaaagatctaaataacccaacaggaaatgcggatgaaagtgcaagagttggtttgtggtcatctggagtccatgtctccaagactgctggaccttcaaattctgcaacttgttagatcatctggatgatagcacaactgttagaagacctagaagaatacagcgttgctatgactcagtggtgttgaatgcagaccatctaccagctggggaaagaatcaattataaacaggtacaaaacaattcagtctgttttttaatgcagtttaggaatagtgtatacctcctatacttaaaattgtcatttatctttcccaactttaaatactcttttagtttctatagggaaggaagagttattacaggtttttttttttaattattctttaactttagatactgccaatctgatttaaaattctccaagcttaattctgtgcaacaaacagaaccacacaagcagccaggcactgtggctcactcctataatcccagcatttttgaggctagatgggaagatcacttgatctcaggattttgagaaccatccggacaacatagggagacctcatcgctattttaaataatttta

SEQ ID NO: 325460 - DNA, 1872 bp, Homo sapiens
gggaggctgaggtgggagtatcacctgagccctggaggttgaggctgcaatgagagctgtgatcatgccactgcactccagcctgggcaacagatgagaccctgtgtcacaacaaggaatttttagaaggtgctttttatattactcttcacagagttaaattttcagaggatttagtattattgaactaagtttcataagtgtattttaagcaagtaaatctctaatgtaggaaaatccccaaaatggtagcatttactaatgttttatatggtaatttttgaaaaatatatctgatatttcttcagtaaaaatggtgttgttttaataacttaataagaatgtttaaagattctttaagtctggcttatctagctaatgtgggcctattaaataataggcagacttctgccttccttatattctttagatcttttcaaatactccattccaatatccatcaaaagacttctctttatgccacttattatctatactagtttttaatgttcaattactacaagattataattactgtttttattcatgttcccaagaaaaatacataagattcacacccaacacacttcgaaatttatttcactccctttgactatatgtgattatcaaaaaagtatttttcaagatattaaaaataagtaaaggaaaatgaaatatttttaggacattcaaaatctaatgaagttcagtgtttctttaattgagggcaggcagaggtgggggagaatttcagaaggtagtgaacccaaaggtggattcttggataattctactattctgtactctcatcatcttaacccatctgtttactaccctaaccatagttactaagcagagttttatcataataatatagacagctctcaaagtattgacattcagaggggattacaaatattatttttctatcatattgacctaccatgtccacagtcttccttgaattaccttccagttttactgggctgcatctaccgtttatgtctagtttgactttttctgagttcaccaattgctgctaggaatgtgctggtcactcagcagcacacccacatcacaggggaagattttgaaatacctggacagtctgaacacactgctctgaatacactcaattctaagaagtaccagggaaccgcatcttcttgctgaaatcttgaatttttgtcagctttttttttttactgtggacagtaaagctggaaagatctaaataacccaacaggaaatgcggatgaaagtgcaagagttggtttgtggtcatctggagtccatgtctccaagactgctggaccttcaaattctgcaacttgttagatcatctggatgatagcacaactgttagaagacctagaagaatacagcgttgctatgactcagtggtgttgaatgcagaccatctaccagctggggaaagaatcaattataaacaggtattttaaaactccagaacgtcagaaatgtgtagcagaatgaattctgttataaggaagacaaaacaattcagtctgttttttaatgcagtttaggaatagtgtatacctcctatacttaaaattgtcatttatctttcccaactttaaatactcttttagtttctatagggaaggaagagttattacaggtttttttttttaattattctttaactttagatactgccaatctgatttaaaattctccaagcttaattctgtgcaacaaacagaaccacacaagcagccaggcactgtggctcactcctataatcccagcatttttgaggctagatgggaagatcacttgatctcaggattttgagaaccatccggacaacatagggagacctcatcgctattttaaataatttta

SEQ ID NO: 325461 - DNA, 1063 bp, Homo sapiens
  misc_feature (1048)..(1048): n is a, c, g, or t
aaaaaaaaaaaaaaaaccccacaaccatgttataggaaaagttagtataaatgacatagcataattaatatattcaaaataacttttaaaaagttgtcttgtagcttgaagggatcctaaatatcaaaagcccatcacaaacttacaagccttactgctacgtaaatatccctttgaactagtttctggttctatttaaaaagtcgaaaacagttgaaattaatttacgaataagaacagatacacactttgtggggaggctgaggtggtaggatctcctgagcccaggagttttaagtccagcctgggcaacataacagcaagaccccatctcaaaaaaaaaaaagcatatcttttgtttatttttttaatagacaaagtctcactatgttgcccaggtttatttggaactcctggctttaagtgatcttcctgcctcagcctcccaaagtgttagcattatagatgtgagccacctcgtctgggccagagcatacattttagatttcagattgggtggcgggcagggatagaatatccttgttagttatataaaaataaacttttttttgctttttgcagatttgaaatttaattaagctattaacttcttaatcatcacatcctccaactctgttttaactcccccctccccctcccctttttttttaaggaataaagggattcattcctcattttaactgatgttacagtgaagatgggttcttgaactcttggaagcctggatgagccacctaatctgcaagataaaaaccaaagaccaatgcgtattggggaaaagaatgcttagtactgcaagactgttgaatacctgttgaatattcctattgaggttttttcctaaacatacttcagtaacatcttaggacaattcactggagaaatgttgatccctggctggaatgtcataccattgacccatttgaagagttaaagctggatttgactgctctattctaccaggaatattgttagggtagccttttaccagtttctaaacaatcccaatcaaaaaaacacccccccnccccccaaaatacag

SEQ ID NO: 325462 - DNA, 669 bp, Homo sapiens
tcggagcgagcgcccgagatccctttcccagagtgctctgcgccgtgaagaagcggctcccggggactgggggcattttgtgttggctggagctggagtaacaagatggcgtcgtccgcggagtgacaggggtccctctgggccggagccggcggcagtggtggcagcggtatcgccgccctagctcaccgcgccccttttccagcccgcgacgtcgccgcgcaagcgaggcagcggcggccgccgagaaacaagtggcccagcctggtaaccgccgagaagcccttcacaaactgcggcctggcaaaaagaaacctgactgagcggcggtgatcaggttcccctctgctgattctgggccccgaaccccggtaaaggcctccgtgttccgtttcctgccgccctcctccgtagccttgcctagtgtaggagccccgaggcctccgtcctcttcccagaggtgtcggggcttggccccagcctccatcttcgtctctcaggatggcgagtagcagcggctccaaggctgaattcattgtcggagggaaatataaactgatggggagcatagactgcgcctatcttctcccatctagtatgagtgatgaaacaccgtaacagggcaaaccttttaggacttgctcatttccctcatctatatataacgcg

SEQ ID NO: 325463 - DNA, 516 bp, Homo sapiens
atctagctaacatgaataaaaggtttcagaaactgatttatttgggactaatttggcatttttctatttgtagtgtaaataggtgattttagtttggagtggatagagagttgaatcatactcaaagtagaatgtaacttttccagaatagttataattcatattagatataagtggctgtcagtgccttctggaactctccaactttgtacagtaccaaataaaaagcaattaaaatatcacatagtcatggagtctgatcaagtggtagcagtcctaaactagggtagggttccttaggcacaacccagaactggtcttgaaaaaggggggggaatagattacatgtggctcaaactcttagttggaagagagtaagaattgaggtaatccgcccaggtacggtggctcacgcctgtaatcccagcactttgggaggccgaggcgggcagatcgcttgaggtcaggagttagagaccagcctgcccgacatggtgaagccccatctttactaaa

SEQ ID NO: 325464 - DNA, 740 bp, Homo sapiens
ggctactgcactccagcctgggcaacatagtgagaccccatctccttaaaaaaatatatagaaagaaagaaaatgcttttcaattttggccccagccatttttacttaaatctaatatccatatattcctattagactcaccctttccctatagctaaaattaaattcttagagaagaaacttacatcagaagttaacagtttgggaaaaattttttttagatgtattatactttgattttttaaattctgggttaaaatttctcttgaatctcacaggtatatgtttatatgtctagtgcgttaaactaccatggttcttctcagtagcactgagtatatcttttttattttattcttttccacaggctgcaacaaagaaacaaaaatatgaaaagattagtgaaaagaagatgtccacgcctgttgaagttttatgtaaggtaagtatgcatgatgaatattaaaaaaatataaatgaagccaggcacaatggctcacacctgtaatcccagcactttgggaggccaaggcagtaggtcacatgagcccaggagttcaagaccagcctgggcaacatagggaaaccccatttctaccttaatagataaatgatccggctgggcacagtggctcaagcctgcaatcccagcactttagaaggccgaggtgggcggatcacttgagcccagaagttccacaagaccagcctgggcaacatggtgaaataccttatctacc

SEQ ID NO: 325465 - DNA, 903 bp, Homo sapiens
  misc_feature (864)..(865): n is a, c, g, or t
  misc_feature (900)..(900): n is a, c, g, or t
tcggagcgagcgcccgagatccctttcccagagtgctctgcgccgtgaagaagcggctcccggggactgggggcattttgtgttggctggagctggagtaacaagatggcgtcgtccgcggagtgacaggggtccctctgggccggagccggcggcagtggtggcagcggtatcgccgccctagctcaccgcgccccttttccagcccgcgacgtcgccgcgcaagcgaggcagcggcggccgccgagaaacaagtggcccagcctggtaaccgccgagaagcccttcacaaactgcggcctggcaaaaagaaacctgactgagcggcggtgatcaggttcccctctgctgattctgggccccgaaccccggtaaaggcctccgtgttccgtttcctgccgccctcctccgtagccttgcctagtgtaggagccccgaggcctccgtcctcttcccagaggtgtcggggcttggccccagcctccatcttcgtctctcaggatggcgagtagcagcggctccaaggctgaattcattgtcggagggaaatataaactggtacggaagatcgggtctggctccttcggggacatctatttggcgatcaacatcaccaacggcgaggaagtggcagtgaagctagaatctcagaaggccaggcatccccagttgctgtacgagagcaagctctataagattcttcaaggtggggttggcatcccccacatacggtggtatggtcaggaaaaagactacaatgtactagtcatggatcttctgggacctagcctcgaagacctcttcaatttctgttcaagaaggttcacaatgaaaaaactggaccttaatgtttaactggaccannatgattaagttagaaatttgaataatgttccatancaa

SEQ ID NO: 325466 - DNA, 5347 bp, Homo sapiens
tcggagcgagcgcccgagatccctttcccagagtgctctgcgccgtgaagaagcggctcccggggactgggggcattttgtgttggctggagctggagtaacaagatggcgtcgtccgcggagtgacaggggtccctctgggccggagccggcggcagtggtggcagcggtatcgccgccctagctcaccgcgccccttttccagcccgcgacgtcgccgcgcaagcgaggcagcggcggccgccgagaaacaagtggcccagcctggtaaccgccgagaagcccttcacaaactgcggcctggcaaaaagaaacctgactgagcggcggtgatcaggttcccctctgctgattctgggccccgaaccccggtaaaggcctccgtgttccgtttcctgccgccctcctccgtagccttgcctagtgtaggagccccgaggcctccgtcctcttcccagaggtgtcggggcttggccccagcctccatcttcgtctctcaggatggcgagtagcagcggctccaaggctgaattcattgtcggagggaaatataaactggtacggaagatcgggtctggctccttcggggacatctatttggcgatcaacatcaccaacggcgaggaagtggcagtgaagctagaatctcagaaggccaggcatccccagttgctgtacgagagcaagctctataagattcttcaaggtggggttggcatcccccacatacggtggtatggtcaggaaaaagactacaatgtactagtcatggatcttctgggacctagcctcgaagacctcttcaatttctgttcaagaaggttcacaatgaaaactgtacttatgttagctgaccagatgatcagtagaattgaatatgtgcatacaaagaattttatacacagagacattaaaccagataacttcctaatgggtattgggcgtcactgtaataagttattccttattgattttggtttggccaaaaagtacagagacaacaggacaaggcaacacataccatacagagaagataaaaacctcactggcactgcccgatatgctagcatcaatgcacatcttggtattgagcagagtcgccgagatgacatggaatcattaggatatgttttgatgtattttaatagaaccagcctgccatggcaagggctaaaggctgcaacaaagaaacaaaaatatgaaaagattagtgaaaagaagatgtccacgcctgttgaagttttatgtaaggggtttcctgcagaatttgcgatgtacttaaactattgtcgtgggctacgctttgaggaagccccagattacatgtatctgaggcagctattccgcattcttttcaggaccctgaaccatcaatatgactacacatttgattggacaatgttaaagcagaaagcagcacagcaggcagcctcttccagtgggcagggtcagcaggcccaaacccccacaggtttctaagcatgaattgaggaacagaagaagcagagcagatgatcggagcagcatttgtttctccccaaatctagaaattttagttcatatgtacactagccagtggttgtggacaaccatttacttggtgtaaagaacttaatttcagtataaactgactctgggcagcattggtgatgctgtatcctgagttgtagcctctgtaattgtgaatattaactgagatagtgaaacatggtgtccggttttctattgcattttttcaagtggaaaagttaactaaatggttgacacacaaaaattggtggagaaattgtgcatatgccaattttttgttaaaaccttttgttttgaactatactgctttgagatctcatttcagaagaacggcatgaacagtcttcagccacagttgtgatggttgttaaatgctcacaattgtgcattcttagggtttttccatccctggggtttgcaagttgttcacttaaaacattcttaaaatggttggcttcttgtctgcaagccagctgatatggtagcaaccaaagattccagtgtttgagcatatgaaagactctgcctgcttaattgtgctagaaataacagcatctaaagtgaagacttaagaaaaacttagtgactactagattatccttaggactctgcattaactctataatgttcttggtattaaaaaaaaagcatatttgtcacagaaatttagttaacatcttacaactgaacatgtatgtatgttgcttagataaatgtaatcactgtaaacatctatatgatctgggattttgtttttattttgaaatgggagcttttttgtttacaagttcattaaaaactaaaaactgtttctgtaaggaaatgagattttttttaaacaacaaaaaatgccttgctgactcactattaaataaaaatctccccaattttttgatagactacttcaagccatttgttacatggtattcctttgcaagtcaatttaggtttcgtgttataacttttcctctttttttaagaaaaatgaaaaaagtaattcttttgtctgaaggggaaaggcattctttcatttttttctttttttttttttttttttatgacttgcaggcacaatatctagtactgcaactgccagaacttggtattgtagctgctgcccgctgactagcagctggactgattttgaataaaaatgaaagcattaaagggtttccctacaaaacatttttctttaaaatacttttgaaatggctataagcagttgactttcacccttggagagcatcacactgtgtgaggttcagtgattgttgaccctccccagcccctcctgcttctttaagttatctgtgtgcgtgcgcttcctctcaatcttctttgcacgctcatttctttttctctgacccatgagaaaggaaaacttactgatgataatttttaaatagtgtaatttattcatttatagcatgtcaggataaattaaaagaacatttgtctggaaatgctgccgggagcctattgtgtaaatgtaggtattttgtaaaataaccttgaaattgtaaattgacacgtgtttggtcagattgtgtcaagtttaatttgttttgttttcttttttcttttttttatttgaaaactactttagcaataattaattccatgattatcacattctgccattaagggatattagtaccgtaatactgaagaaattttattaagtctgaacttctggggtaggcagcttctttgtttcttttctatccacccttgtcggttgaggtatttgtttcttgactaataaaccctttgatacttttagccagaaatcagtctcataaagctatttttgagtatagtttgtgtaaaataaaaatgtttagctttggtaataacttccaagctgaactccctctagcaagatatttttcagtgcttttatttactatgcacttagactatgcactttttctgaaatatttttgtaacacttttttgtatttttgccatttgaaaaggttgtggtgtagttggtctgtaattaagttgcagatttaaaactgctgttagctttgtaaatcaaaatataggtgttttttgtcctggtatatcgtcattccatctgcagctggagctggaatcccattgatcttctagctaccattcattttcttcactgttcacaaaagaagagtgtgaaattcagtgaatgctgttactaatcctgttacgagatgaatctcatttcaccaaaattaaattatgtttttccgctaaaatgatgatacaagttgaagacacatcactctgaaattggaagacctcaccacttaaggctccacagtggcttactcagctgaactctaggttactactctttactttgttcacccattggggggtgcagtttttttaaaatgttgggagatggccattctaactactgttgaatgtctctgttttgggaaggtataacaagaaataaaaaagaatatatatgaagggagagactggttatctcctcccatatggttgtgcttatcctcttatggcttacaaatgaatatttggaggtttgctttcacaatgatttcccatcaacaaatatttttagtaggatttttcctgtttctgttagtccttgcagtactcataaatgttttaagctgagcatactgtaatagtcataagtttaatttcattataataaaaataatcaaacaaaaggactttagaacccaagacaatgagctagttttccctaaagtttgctgaactattaaggaatatgttcttatagcttttgactagaatgagtcatgggaattctaagaagggatggcctagacatttttagctcagttaaattcagcatttaatgcaggtgagttcctgggtcgttttccaactagtctggaacagtctggttctgactcaaactggtataaagcattattttaggttttctctttgccagtttttaagcagttataaccatgtaaatcaagatgtgaggacatctatatgaagtatagtaaagaagtggtgtcagcagatcaatatgtgtgtcctgggtgtgctgctctcttaagtgagactttgtgagactatactttaaatgcattattaccattgcttacattttgggggattttcttcctcctcaaaacttccatttctattgtaatattcttaatgacaatcttttttttttttagcagtgtatgtttgaaacagccaaagatggcgatgaaccaagtgtaaattgatctaagcagcccatgcagtttgtgttgaatcaacaaacagtgtattgttgaagtgaaattattttctgaaatgacttgttagaccagttttgaggacatactcaaaagtagagtaataatggctcctgggatggagaaatatgagatgaacctggaacattctattatggtgccacaaaggaaatctaaaaaaaaaaaaaaaaaaaaagtggttggctaggagcagtggcacacgcctgtgattccagcactttgggaggccgaagtgggcaggagttcaagaccagcctggccaacatagtgaaaccctgtctctactaaaaatacaaaaattagccgggtgtggtggcgggcgcctgtaatcccagcttttcaagaggctgaggcagaagaatcgcttgaacccgggagatggaggttgcagtgagctgagatcgtgccactgcactccagcctgggcgttgcagtgagactccgtctcaacaacaacaaaaaggtggatacatgtcaaaagggcacaggagccacttgaaggattatacttgctaaatctgtgtcaattatcaaaataaactggtagcaacgtt

SEQ ID NO: 325467 - DNA, 3965 bp, Homo sapiens
tcggagcgagcgcccgagatccctttcccagagtgctctgcgccgtgaagaagcggctcccggggactgggggcattttgtgttggctggagctggagtaacaagatggcgtcgtccgcggagtgacaggggtccctctgggccggagccggcggcagtggtggcagcggtatcgccgccctagctcaccgcgccccttttccagcccgcgacgtcgccgcgcaagcgaggcagcggcggccgccgagaaacaagtggcccagcctggtaaccgccgagaagcccttcacaaactgcggcctggcaaaaagaaacctgactgagcggcggtgatcaggttcccctctgctgattctgggccccgaaccccggtaaaggcctccgtgttccgtttcctgccgccctcctccgtagccttgcctagtgtaggagccccgaggcctccgtcctcttcccagaggtgtcggggcttggccccagcctccatcttcgtctctcaggatggcgagtagcagcggctccaaggctgaattcattgtcggagggaaatataaactggtacggaagatcgggtctggctccttcggggacatctatttggcgatcaacatcaccaacggcgaggaagtggcagtgaagctagaatctcagaaggccaggcatccccagttgctgtacgagagcaagctctataagattcttcaaggtggggttggcatcccccacatacggtggtatggtcaggaaaaagactacaatgtactagtcatggatcttctgggacctagcctcgaagacctcttcaatttctgttcaagaaggttcacaatgaaaactgtacttatgttagctgaccagatgatcagtagaattgaatatgtgcatacaaagaattttatacacagagacattaaaccagataacttcctaatgggtattgggcgtcactgtaataagttattccttattgattttggtttggccaaaaagtacagagacaacaggacaaggcaacacataccatacagagaagataaaaacctcactggcactgcccgatatgctagcatcaatgcacatcttggtattgagcagagtcgccgagatgacatggaatcattaggatatgttttgatgtattttaatagaaccagcctgccatggcaagggctaaaggctgcaacaaagaaacaaaaatatgaaaagattagtgaaaagaagatgtccacgcctgttgaagttttatgtaaggggtttcctgcagaatttgcgatgtacttaaactattgtcgtgggctacgctttgaggaagccccagattacatgtatctgaggcagctattccgcattcttttcaggaccctgaaccatcaatatgactacacatttgattggacaatgttaaagcagaaagcagcacagcaggcagcctcttccagtgggcagggtcagcaggcccaaacccccacaggtttctaagcatgaattgaggaacagaagaagcagagcagatgatcggagcagcatttgtttctccccaaatctagaaattttagttcatatgtacactagccagtggttgtggacaaccatttacttggtgtaaagaacttaatttcagtataaactgactctgggcagcattggtgatgctgtatcctgagttgtagcctctgtaattgtgaatattaactgagatagtgaaacatggtgtccggttttctattgcattttttcaagtggaaaagttaactaaatggttgacacacaaaaattggtggagaaattgtgcatatgccaattttttgttaaaaccttttgttttgaactatactgctttgagatctcatttcagaagaacggcatgaacagtcttcagccacagttgtgatggttgttaaatgctcacaattgtgcattcttagggtttttccatccctggggtttgcaagttgttcacttaaaacattcttaaaatggttggcttcttgtctgcaagccagctgatatggtagcaaccaaagattccagtgtttgagcatatgaaagactctgcctgcttaattgtgctagaaataacagcatctaaagtgaagacttaagaaaaacttagtgactactagattatccttaggactctgcattaactctataatgttcttggtattaaaaaaaaagcatatttgtcacagaaatttagttaacatcttacaactgaacatgtatgtatgttgcttagataaatgtaatcactgtaaacatctatatgatctgggattttgtttttattttgaaatgggagcttttttgtttacaagttcattaaaaactaaaaactgtttctgtaaggaaatgagattttttttaaacaacaaaaaatgccttgctgactcactattaaataaaaatctccccaattttttgatagactacttcaagccatttgttacatggtattcctttgcaagtcaatttaggtttcgtgttataacttttcctctttttttaagaaaaatgaaaaaagtaattcttttgtctgaaggggaaaggcattctttcatttttttctttttttttttttttttttatgacttgcaggcacaatatctagtactgcaactgccagaacttggtattgtagctgctgcccgctgactagcagctggactgattttgaataaaaatgaaagcattaaagggtttccctacaaaacatttttctttaaaatacttttgaaatggctataagcagttgactttcacccttggagagcatcacactgtgtgaggttcagtgattgttgaccctccccagcccctcctgcttctttaagttatctgtgtgcgtgcgcttcctctcaatcttctttgcacgctcatttctttttctctgacccatgagaaaggaaaacttactgatgataatttttaaatagtgtaatttattcatttatagcatgtcaggataaattaaaagaacatttgtctggaaatgctgccgggagcctattgtgtaaatgtaggtattttgtaaaataaccttgaaattgtaaattgacacgtgtttggtcagattgtgtcaagtttaatttgttttgttttcttttttcttttttttatttgaaaactactttagcaataattaattccatgattatcacattctgccattaagggatattagtaccgtaatactgaagaaattttattaagtctgaacttctggggtaggcagcttctttgtttcttttctatccacccttgtcggttgaggtatttgtttcttgactaataaaccctttgatacttttagccagaaatcagtctcataaagctatttttgagtatagtttgtgtaaaatatttttcagtgcttttatttactatgcacttagactatgcactttttctgaaatatttttgtaacacttttttgtatttttgccatttgaaaaggttgtggtgtagttggtctgtaattaagttgcagatttaaaactgctgttagctttgtaaatcaaaatataggtgttttttgtcctggtatatcgtcattccatctgcagctggagctggaatcccattgatcttctagctaccattcattttcttcactgttcacaaaagaagagtgtgaaattcagtgaatgctgttactaatcctgttacgagatgaatctcatttcaccaaaattaaattatgtttttccgctaaaatgatgatacaagttgaagacacatcactctgaaattggaagacctcaccacttaaggctccacagtggcttactcagctgaactctaggttactactctttactttgttcacccattggggggtgcagtttttttaaaatgttgggagatggccattctaactactgttgaatgtctctgttttgggaaggtataacaagaaataaaaaagaatatatatgaagggagagactggttatctcctccca

SEQ ID NO: 325468 - DNA, 4496 bp, Homo sapiens
tcggagcgagcgcccgagatccctttcccagagtgctctgcgccgtgaagaagcggctcccggggactgggggcattttgtgttggctggagctggagtaacaagatggcgtcgtccgcggagtgacaggggtccctctgggccggagccggcggcagtggtggcagcggtatcgccgccctagctcaccgcgccccttttccagcccgcgacgtcgccgcgcaagcgaggcagcggcggccgccgagaaacaagtggcccagcctggtaaccgccgagaagcccttcacaaactgcggcctggcaaaaagaaacctgactgagcggcggtgatcaggttcccctctgctgattctgggccccgaaccccggtaaaggcctccgtgttccgtttcctgccgccctcctccgtagccttgcctagtgtaggagccccgaggcctccgtcctcttcccagaggtgtcggggcttggccccagcctccatcttcgtctctcaggatggcgagtagcagcggctccaaggctgaattcattgtcggagggaaatataaactggtacggaagatcgggtctggctccttcggggacatctatttggcgatcaacatcaccaacggcgaggaagtggcagtgaagctagaatctcagaaggccaggcatccccagttgctgtacgagagcaagctctataagattcttcaaggtggggttggcatcccccacatacggtggtatggtcaggaaaaagactacaatgtactagtcatggatcttctgggacctagcctcgaagacctcttcaatttctgttcaagaaggttcacaatgaaaactgtacttatgttagctgaccagatgatcagtagaattgaatatgtgcatacaaagaattttatacacagagacattaaaccagataacttcctaatgggtattgggcgtcactgtaataagttattccttattgattttggtttggccaaaaagtacagagacaacaggacaaggcaacacataccatacagagaagataaaaacctcactggcactgcccgatatgctagcatcaatgcacatcttggtattgagcagagtcgccgagatgacatggaatcattaggatatgttttgatgtattttaatagaaccagcctgccatggcaagggctaaaggctgcaacaaagaaacaaaaatatgaaaagattagtgaaaagaagatgtccacgcctgttgaagttttatgtaaggggtttcctgcagaatttgcgatgtacttaaactattgtcgtgggctacgctttgaggaagccccagattacatgtatctgaggcagctattccgcattcttttcaggaccctgaaccatcaatatgactacacatttgattggacaatgttaaagcagaaagcagcacagcaggcagcctcttccagtgggcagggtcagcaggcccaaacccccacaggtttctaagcatgaattgaggaacagaagaagcagagcagatgatcggagcagcatttgtttctccccaaatctagaaattttagttcatatgtacactagccagtggttgtggacaaccatttacttggtgtaaagaacttaatttcagtataaactgactctgggcagcattggtgatgctgtatcctgagttgtagcctctgtaattgtgaatattaactgagatagtgaaacatggtgtccggttttctattgcattttttcaagtggaaaagttaactaaatggttgacacacaaaaattggtggagaaattgtgcatatgccaattttttgttaaaaccttttgttttgaactatactgctttgagatctcatttcagaagaacggcatgaacagtcttcagccacagttgtgatggttgttaaatgctcacaattgtgcattcttagggtttttccatccctggggtttgcaagttgttcacttaaaacattcttaaaatggttggcttcttgtctgcaagccagctgatatggtagcaaccaaagattccagtgtttgagcatatgaaagactctgcctgcttaattgtgctagaaataacagcatctaaagtgaagacttaagaaaaacttagtgactactagattatccttaggactctgcattaactctataatgttcttggtattaaaaaaaaagcatatttgtcacagaaatttagttaacatcttacaactgaacatgtatgtatgttgcttagataaatgtaatcactgtaaacatctatatgatctgggattttgtttttattttgaaatgggagcttttttgtttacaagttcattaaaaactaaaaactgtttctgtaaggaaatgagattttttttaaacaacaaaaaatgccttgctgactcactattaaataaaaatctccccaattttttgatagactacttcaagccatttgttacatggtattcctttgcaagtcaatttaggtttcgtgttataacttttcctctttttttaagaaaaatgaaaaaagtaattcttttgtctgaaggggaaaggcattctttcatttttttctttttttttttttttttttatgacttgcaggcacaatatctagtactgcaactgccagaacttggtattgtagctgctgcccgctgactagcagctggactgattttgaataaaaatgaaagcattaaagggtttccctacaaaacatttttctttaaaatacttttgaaatggctataagcagttgactttcacccttggagagcatcacactgtgtgaggttcagtgattgttgaccctccccagcccctcctgcttctttaagttatctgtgtgcgtgcgcttcctctcaatcttctttgcacgctcatttctttttctctgacccatgagaaaggaaaacttactgatgataatttttaaatagtgtaatttattcatttatagcatgtcaggataaattaaaagaacatttgtctggaaatgctgccgggagcctattgtgtaaatgtaggtattttgtaaaataaccttgaaattgtaaattgacacgtgtttggtcagattgtgtcaagtttaatttgttttgttttcttttttcttttttttatttgaaaactactttagcaataattaattccatgattatcacattctgccattaagggatattagtaccgtaatactgaagaaattttattaagtctgaacttctggggtaggcagcttctttgtttcttttctatccacccttgtcggttgaggtatttgtttcttgactaataaaccctttgatacttttagccagaaatcagtctcataaagctatttttgagtatagtttgtgtaaaataaaaatgtttagctttggtaataacttccaagctgaactccctctagcaagatatttttcagtgcttttatttactatgcacttagactatgcactttttctgaaatatttttgtaacacttttttgtatttttgccatttgaaaaggttgtggtgtagttggtctgtaattaagttgcagatttaaaactgctgttagctttgtaaatcaaaatataggtgttttttgtcctggtatatcgtcattccatctgcagctggagctggaatcccattgatcttctagctaccattcattttcttcactgttcacaaaagaagagtgtgaaattcagtgaatgctgttactaatcctgttacgagatgaatctcatttcaccaaaattaaattatgtttttccgctaaaatgatgatacaagttgaagacacatcactctgaaattggaagacctcaccacttaaggctccacagtggcttactcagctgaactctagcagtgtatgtttgaaacagccaaagatggcgatgaaccaagtgtaaattgatctaagcagcccatgcagtttgtgttgaatcaacaaacagtgtattgttgaagtgaaattattttctgaaatgacttgttagaccagttttgaggacatactcaaaagtagagtaataatggctcctgggatggagaaatatgagatgaacctggaacattctattatggtgccacaaaggaaatctaaaaaaaaaaaaaaaaaaaaagtggttggctaggagcagtggcacacgcctgtgattccagcactttgggaggccgaagtgggcaggagttcaagaccagcctggccaacatagtgaaaccctgtctctactaaaaatacaaaaattagccgggtgtggtggcgggcgcctgtaatcccagcttttcaagaggctgaggcagaagaatcgcttgaacccgggagatggaggttgcagtgagctgagatcgtgccactgcactccagcctgggcgttgcagtgagactccgtctcaacaacaacaaaaaggtggatacatgtcaaaagggcacaggagccacttgaaggattatacttgctaaatctgtgtcaattatcaaaataaactggtagcaacgtt

SEQ ID NO: 325469 - DNA, 4077 bp, Homo sapiens
gagtgtaaacaaaatatattgagcctgtaaattgcttgaaagaaaatttcaatattttacagtatttcataaagtgcagtgtatataatgcctactgaaatctaaaaggtattgaaataaatttctccaacatttggtaacaaaacaaacgttgttgtttcaagatggcgtcgtccgcggagtgacaggggtccctctgggccggagccggcggcagtggtggcagcggtatcgccgccctagctcaccgcgccccttttccagcccgcgacgtcgccgcgcaagcgaggcagcggcggccgccgagaaacaagtggcccagcctggtaaccgccgagaagcccttcacaaactgcggcctggcaaaaagaaacctgactgagcggcggtgatcaggttcccctctgctgattctgggccccgaaccccggtaaaggcctccgtgttccgtttcctgccgccctcctccgtagccttgcctagtgtaggagccccgaggcctccgtcctcttcccagaggtgtcggggcttggccccagcctccatcttcgtctctcaggatggcgagtagcagcggctccaaggctgaattcattgtcggagggaaatataaactggtacggaagatcgggtctggctccttcggggacatctatttggcgatcaacatcaccaacggcgaggaagtggcagtgaagctagaatctcagaaggccaggcatccccagttgctgtacgagagcaagctctataagattcttcaaggtggggttggcatcccccacatacggtggtatggtcaggaaaaagactacaatgtactagtcatggatcttctgggacctagcctcgaagacctcttcaatttctgttcaagaaggttcacaatgaaaactgtacttatgttagctgaccagatgatcagtagaattgaatatgtgcatacaaagaattttatacacagagacattaaaccagataacttcctaatgggtattgggcgtcactgtaataagttattccttattgattttggtttggccaaaaagtacagagacaacaggacaaggcaacacataccatacagagaagataaaaacctcactggcactgcccgatatgctagcatcaatgcacatcttggtattgagcagagtcgccgagatgacatggaatcattaggatatgttttgatgtattttaatagaaccagcctgccatggcaagggctaaaggctgcaacaaagaaacaaaaatatgaaaagattagtgaaaagaagatgtccacgcctgttgaagttttatgtaaggggtttcctgcagaatttgcgatgtacttaaactattgtcgtgggctacgctttgaggaagccccagattacatgtatctgaggcagctattccgcattcttttcaggaccctgaaccatcaatatgactacacatttgattggacaatgttaaagcagaaagcagcacagcaggcagcctcttccagtgggcagggtcagcaggcccaaacccccacaggtttctaagcatgaattgaggaacagaagaagcagagcagatgatcggagcagcatttgtttctccccaaatctagaaattttagttcatatgtacactagccagtggttgtggacaaccatttacttggtgtaaagaacttaatttcagtataaactgactctgggcagcattggtgatgctgtatcctgagttgtagcctctgtaattgtgaatattaactgagatagtgaaacatggtgtccggttttctattgcattttttcaagtggaaaagttaactaaatggttgacacacaaaaattggtggagaaattgtgcatatgccaattttttgttaaaaccttttgttttgaactatactgctttgagatctcatttcagaagaacggcatgaacagtcttcagccacagttgtgatggttgttaaatgctcacaattgtgcattcttagggtttttccatccctggggtttgcaagttgttcacttaaaacattcttaaaatggttggcttcttgtctgcaagccagctgatatggtagcaaccaaagattccagtgtttgagcatatgaaagactctgcctgcttaattgtgctagaaataacagcatctaaagtgaagacttaagaaaaacttagtgactactagattatccttaggactctgcattaactctataatgttcttggtattaaaaaaaaagcatatttgtcacagaaatttagttaacatcttacaactgaacatgtatgtatgttgcttagataaatgtaatcactgtaaacatctatatgatctgggattttgtttttattttgaaatgggagcttttttgtttacaagttcattaaaaactaaaaactgtttctgtaaggaaatgagattttttttaaacaacaaaaaatgccttgctgactcactattaaataaaaatctccccaattttttgatagactacttcaagccatttgttacatggtattcctttgcaagtcaatttaggtttcgtgttataacttttcctctttttttaagaaaaatgaaaaaagtaattcttttgtctgaaggggaaaggcattctttcatttttttctttttttttttttttttttatgacttgcaggcacaatatctagtactgcaactgccagaacttggtattgtagctgctgcccgctgactagcagctggactgattttgaataaaaatgaaagcattaaagggtttccctacaaaacatttttctttaaaatacttttgaaatggctataagcagttgactttcacccttggagagcatcacactgtgtgaggttcagtgattgttgaccctccccagcccctcctgcttctttaagttatctgtgtgcgtgcgcttcctctcaatcttctttgcacgctcatttctttttctctgacccatgagaaaggaaaacttactgatgataatttttaaatagtgtaatttattcatttatagcatgtcaggataaattaaaagaacatttgtctggaaatgctgccgggagcctattgtgtaaatgtaggtattttgtaaaataaccttgaaattgtaaattgacacgtgtttggtcagattgtgtcaagtttaatttgttttgttttcttttttcttttttttatttgaaaactactttagcaataattaattccatgattatcacattctgccattaagggatattagtaccgtaatactgaagaaattttattaagtctgaacttctggggtaggcagcttctttgtttcttttctatccacccttgtcggttgaggtatttgtttcttgactaataaaccctttgatacttttagccagaaatcagtctcataaagctatttttgagtatagtttgtgtaaaataaaaatgtttagctttggtaataacttccaagctgaactccctctagcaagatatttttcagtgcttttatttactatgcacttagactatgcactttttctgaaatatttttgtaacacttttttgtatttttgccatttgaaaaggttgtggtgtagttggtctgtaattaagttgcagatttaaaactgctgttagctttgtaaatcaaaatataggtgttttttgtcctggtatatcgtcattccatctgcagctggagctggaatcccattgatcttctagctaccattcattttcttcactgttcacaaaagaagagtgtgaaattcagtgaatgctgttactaatcctgttacgagatgaatctcatttcaccaaaattaaattatgtttttccgctaaaatgatgatacaagttgaagacacatcactctgaaattggaagacctcaccacttaaggctccacagtggcttactcagctgaactctaggttactactctttactttgttcacccattggggggtgcagtttttttaaaatgttgggagatggccattctaactactgttgaatgtctctgttttgggaaggtataacaagaaataaaaaagaatatatatgaagggagagactggttatctcctccca

SEQ ID NO: 325470 - DNA, 3193 bp, Homo sapiens
tggtattatgctatgcattcaaatatatcaaaataaagtatcctaagtatgaatagataccatttaatgaataagacgcagtttaattgaacaaggttggaaacctaatgtttctgtatttctcttttaaagttattccttattgattttggtttggccaaaaagtacagagacaacaggacaaggcaacacataccatacagagaagataaaaacctcactggcactgcccgatatgctagcatcaatgcacatcttggtattgagcagagtcgccgagatgacatggaatcattaggatatgttttgatgtattttaatagaaccagcctgccatggcaagggctaaaggctgcaacaaagaaacaaaaatatgaaaagattagtgaaaagaagatgtccacgcctgttgaagttttatgtaaggggtttcctgcagaatttgcgatgtacttaaactattgtcgtgggctacgctttgaggaagccccagattacatgtatctgaggcagctattccgcattcttttcaggaccctgaaccatcaatatgactacacatttgattggacaatgttaaagcagaaagcagcacagcaggcagcctcttccagtgggcagggtcagcaggcccaaacccccacaggtttctaagcatgaattgaggaacagaagaagcagagcagatgatcggagcagcatttgtttctccccaaatctagaaattttagttcatatgtacactagccagtggttgtggacaaccatttacttggtgtaaagaacttaatttcagtataaactgactctgggcagcattggtgatgctgtatcctgagttgtagcctctgtaattgtgaatattaactgagatagtgaaacatggtgtccggttttctattgcattttttcaagtggaaaagttaactaaatggttgacacacaaaaattggtggagaaattgtgcatatgccaattttttgttaaaaccttttgttttgaactatactgctttgagatctcatttcagaagaacggcatgaacagtcttcagccacagttgtgatggttgttaaatgctcacaattgtgcattcttagggtttttccatccctggggtttgcaagttgttcacttaaaacattcttaaaatggttggcttcttgtctgcaagccagctgatatggtagcaaccaaagattccagtgtttgagcatatgaaagactctgcctgcttaattgtgctagaaataacagcatctaaagtgaagacttaagaaaaacttagtgactactagattatccttaggactctgcattaactctataatgttcttggtattaaaaaaaaagcatatttgtcacagaaatttagttaacatcttacaactgaacatgtatgtatgttgcttagataaatgtaatcactgtaaacatctatatgatctgggattttgtttttattttgaaatgggagcttttttgtttacaagttcattaaaaactaaaaactgtttctgtaaggaaatgagattttttttaaacaacaaaaaatgccttgctgactcactattaaataaaaatctccccaattttttgatagactacttcaagccatttgttacatggtattcctttgcaagtcaatttaggtttcgtgttataacttttcctctttttttaagaaaaatgaaaaaagtaattcttttgtctgaaggggaaaggcattctttcatttttttctttttttttttttttttttatgacttgcaggcacaatatctagtactgcaactgccagaacttggtattgtagctgctgcccgctgactagcagctggactgattttgaataaaaatgaaagcattaaagggtttccctacaaaacatttttctttaaaatacttttgaaatggctataagcagttgactttcacccttggagagcatcacactgtgtgaggttcagtgattgttgaccctccccagcccctcctgcttctttaagttatctgtgtgcgtgcgcttcctctcaatcttctttgcacgctcatttctttttctctgacccatgagaaaggaaaacttactgatgataatttttaaatagtgtaatttattcatttatagcatgtcaggataaattaaaagaacatttgtctggaaatgctgccgggagcctattgtgtaaatgtaggtattttgtaaaataaccttgaaattgtaaattgacacgtgtttggtcagattgtgtcaagtttaatttgttttgttttcttttttcttttttttatttgaaaactactttagcaataattaattccatgattatcacattctgccattaagggatattagtaccgtaatactgaagaaattttattaagtctgaacttctggggtaggcagcttctttgtttcttttctatccacccttgtcggttgaggtatttgtttcttgactaataaaccctttgatacttttagccagaaatcagtctcataaagctatttttgagtatagtttgtgtaaaataaaaatgtttagctttggtaataacttccaagctgaactccctctagcaagatatttttcagtgcttttatttactatgcacttagactatgcactttttctgaaatatttttgtaacacttttttgtatttttgccatttgaaaaggttgtggtgtagttggtctgtaattaagttgcagatttaaaactgctgttagctttgtaaatcaaaatataggtgttttttgtcctggtatatcgtcattccatctgcagctggagctggaatcccattgatcttctagctaccattcattttcttcactgttcacaaaagaagagtgtgaaattcagtgaatgctgttactaatcctgttacgagatgaatctcatttcaccaaaattaaattatgtttttccgctaaaatgatgatacaagttgaagacacatcactctgaaattggaagacctcaccacttaaggctccacagtggcttactcagctgaactctaggttactactctttactttgttcacccattggggggtgcagtttttttaaaatgttgggagatggccattctaactactgttgaatgtctctgttttgggaaggtataacaagaaataaaaaagaatatatatgaagggagagactggttatctcctccca

SEQ ID NO: 325471 - DNA, 3088 bp, Homo sapiens
cctcagcagcacgacatgcggctacagttagatgagatgctccggtctgctgaggagaggcggaggaaataggccgaggagttagcagccagacaaagagaagataaaaacctcactggcactgcccgatatgctagcatcaatgcacatcttggtattgagcagagtcgccgagatgacatggaatcattaggatatgttttgatgtattttaatagaaccagcctgccatggcaagggctaaaggctgcaacaaagaaacaaaaatatgaaaagattagtgaaaagaagatgtccacgcctgttgaagttttatgtaaggggtttcctgcagaatttgcgatgtacttaaactattgtcgtgggctacgctttgaggaagccccagattacatgtatctgaggcagctattccgcattcttttcaggaccctgaaccatcaatatgactacacatttgattggacaatgttaaagcagaaagcagcacagcaggcagcctcttccagtgggcagggtcagcaggcccaaacccccacaggtttctaagcatgaattgaggaacagaagaagcagagcagatgatcggagcagcatttgtttctccccaaatctagaaattttagttcatatgtacactagccagtggttgtggacaaccatttacttggtgtaaagaacttaatttcagtataaactgactctgggcagcattggtgatgctgtatcctgagttgtagcctctgtaattgtgaatattaactgagatagtgaaacatggtgtccggttttctattgcattttttcaagtggaaaagttaactaaatggttgacacacaaaaattggtggagaaattgtgcatatgccaattttttgttaaaaccttttgttttgaactatactgctttgagatctcatttcagaagaacggcatgaacagtcttcagccacagttgtgatggttgttaaatgctcacaattgtgcattcttagggtttttccatccctggggtttgcaagttgttcacttaaaacattcttaaaatggttggcttcttgtctgcaagccagctgatatggtagcaaccaaagattccagtgtttgagcatatgaaagactctgcctgcttaattgtgctagaaataacagcatctaaagtgaagacttaagaaaaacttagtgactactagattatccttaggactctgcattaactctataatgttcttggtattaaaaaaaaagcatatttgtcacagaaatttagttaacatcttacaactgaacatgtatgtatgttgcttagataaatgtaatcactgtaaacatctatatgatctgggattttgtttttattttgaaatgggagcttttttgtttacaagttcattaaaaactaaaaactgtttctgtaaggaaatgagattttttttaaacaacaaaaaatgccttgctgactcactattaaataaaaatctccccaattttttgatagactacttcaagccatttgttacatggtattcctttgcaagtcaatttaggtttcgtgttataacttttcctctttttttaagaaaaatgaaaaaagtaattcttttgtctgaaggggaaaggcattctttcatttttttctttttttttttttttttttatgacttgcaggcacaatatctagtactgcaactgccagaacttggtattgtagctgctgcccgctgactagcagctggactgattttgaataaaaatgaaagcattaaagggtttccctacaaaacatttttctttaaaatacttttgaaatggctataagcagttgactttcacccttggagagcatcacactgtgtgaggttcagtgattgttgaccctccccagcccctcctgcttctttaagttatctgtgtgcgtgcgcttcctctcaatcttctttgcacgctcatttctttttctctgacccatgagaaaggaaaacttactgatgataatttttaaatagtgtaatttattcatttatagcatgtcaggataaattaaaagaacatttgtctggaaatgctgccgggagcctattgtgtaaatgtaggtattttgtaaaataaccttgaaattgtaaattgacacgtgtttggtcagattgtgtcaagtttaatttgttttgttttcttttttcttttttttatttgaaaactactttagcaataattaattccatgattatcacattctgccattaagggatattagtaccgtaatactgaagaaattttattaagtctgaacttctggggtaggcagcttctttgtttcttttctatccacccttgtcggttgaggtatttgtttcttgactaataaaccctttgatacttttagccagaaatcagtctcataaagctatttttgagtatagtttgtgtaaaataaaaatgtttagctttggtaataacttccaagctgaactccctctagcaagatatttttcagtgcttttatttactatgcacttagactatgcactttttctgaaatatttttgtaacacttttttgtatttttgccatttgaaaaggttgtggtgtagttggtctgtaattaagttgcagatttaaaactgctgttagctttgtaaatcaaaatataggtgttttttgtcctggtatatcgtcattccatctgcagctggagctggaatcccattgatcttctagctaccattcattttcttcactgttcacaaaagaagagtgtgaaattcagtgaatgctgttactaatcctgttacgagatgaatctcatttcaccaaaattaaattatgtttttccgctaaaatgatgatacaagttgaagacacatcactctgaaattggaagacctcaccacttaaggctccacagtggcttactcagctgaactctaggttactactctttactttgttcacccattggggggtgcagtttttttaaaatgttgggagatggccattctaactactgttgaatgtctctgttttgggaaggtataacaagaaataaaaaagaatatatatgaagggagagactggttatctcctccca

SEQ ID NO: 325472 - DNA, 1493 bp, Homo sapiens
tcggagcgagcgcccgagatccctttcccagagtgctctgcgccgtgaagaagcggctcccggggactgggggcattttgtgttggctggagctggagtaacaagatggcgtcgtccgcggagtgacaggggtccctctgggccggagccggcggcagtggtggcagcggtatcgccgccctagctcaccgcgccccttttccagcccgcgacgtcgccgcgcaagcgaggcagcggcggccgccgagaaacaagtggcccagcctggtaaccgccgagaagcccttcacaaactgcggcctggcaaaaagaaacctgactgagcggcggtgatcaggttcccctctgctgattctgggccccgaaccccggtaaaggcctccgtgttccgtttcctgccgccctcctccgtagccttgcctagtgtaggagccccgaggcctccgtcctcttcccagaggtgtcggggcttggccccagcctccatcttcgtctctcaggatggcgagtagcagcggctccaaggctgaattcattgtcggagggaaatataaactggtacggaagatcgggtctggctccttcggggacatctatttggcgatcaacatcaccaacggcgaggaagtggcagtgaagctagaatctcagaaggccaggcatccccagttgctgtacgagagcaagctctataagattcttcaaggtggggttggcatcccccacatacggtggtatggtcaggaaaaagactacaatgtactagtcatggatcttctgggacctagcctcgaagacctcttcaatttctgttcaagaaggttcacaatgaaaactgtacttatgttagctgaccagatgatcagtagaattgaatatgtgcatacaaagaattttatacacagagacattaaaccagataacttcctaatgggtattgggcgtcactgtaataagttattccttattgattttggtttggccaaaaagtacagagacaacaggacaaggcaacacataccatacagagaagataaaaacctcactggcactgcccgatatgctagcatcaatgcacatcttggtattgagcagagtcgccgagatgacatggaatcattaggatatgttttgatgtattttaatagaaccagcctgccatggcaagggctaaaggctgcaacaaagaaacaaaaatatgaaaagattagtgaaaagaagatgtccacgcctgttgaagttttatgtaaggggtttcctgcagaatttgcgatgtacttaaactattgtcgtgggctacgctttgaggaagccccagattacatgtatctgaggcagctattccgcattcttttcaggtcagtttttaaggtattttaagattataaactctgtgagggaaattggttaaatttacctaacaaattcattctgataaatactaaagtaaagcagatctagctaacatgaataaaaggtttcagaaactgatt

SEQ ID NO: 325473 - DNA, 2034 bp, Homo sapiens
tcggagcgagcgcccgagatccctttcccagagtgctctgcgccgtgaagaagcggctcccggggactgggggcattttgtgttggctggagctggagtaacaagatggcgtcgtccgcggagtgacaggggtccctctgggccggagccggcggcagtggtggcagcggtatcgccgccctagctcaccgcgccccttttccagcccgcgacgtcgccgcgcaagcgaggcagcggcggccgccgagaaacaagtggcccagcctggtaaccgccgagaagcccttcacaaactgcggcctggcaaaaagaaacctgactgagcggcggtgatcaggttcccctctgctgattctgggccccgaaccccggtaaaggcctccgtgttccgtttcctgccgccctcctccgtagccttgcctagtgtaggagccccgaggcctccgtcctcttcccagaggtgtcggggcttggccccagcctccatcttcgtctctcaggatggcgagtagcagcggctccaaggctgaattcattgtcggagggaaatataaactggtacggaagatcgggtctggctccttcggggacatctatttggcgatcaacatcaccaacggcgaggaagtggcagtgaagctagaatctcagaaggccaggcatccccagttgctgtacgagagcaagctctataagattcttcaaggtggggttggcatcccccacatacggtggtatggtcaggaaaaagactacaatgtactagtcatggatcttctgggacctagcctcgaagacctcttcaatttctgttcaagaaggttcacaatgaaaactgtacttatgttagctgaccagatgatcagtagaattgaatatgtgcatacaaagaattttatacacagagacattaaaccagataacttcctaatgggtattgggcgtcactgtaataagttattccttattgattttggtttggccaaaaagtacagagacaacaggacaaggcaacacataccatacagagaagataaaaacctcactggcactgcccgatatgctagcatcaatgcacatcttggtattgagcagaggctgcaacaaagaaacaaaaatatgaaaagattagtgaaaagaagatgtccacgcctgttgaagttttatgtaaggggtttcctgcagaatttgcgatgtacttaaactattgtcgtgggctacgctttgaggaagccccagattacatgtatctgaggcagctattccgcattcttttcaggaccctgaaccatcaatatgactacacatttgattggacaatgttaaagcagaaagcagcacagcaggcagcctcttccagtgggcagggtcagcaggcccaaacccccacaggcaagcaaactgacaaaaccaagagtaacatgaaaggttagtagccaagaaccaagtgacgttacagggaaaaaattgaatacaaaattgggtaattcatttctaacagtgttagatcaaggaggtggttttaaaatacataaaaatttggctctgcgttaaaaaaaaaaagacgtccttggaaaatttgactactaactttaaacccaaatgtccttgttcatatatatgtatatgtatttgtatatacatatatgtgtgtatatttatatcatttctcttgggattttgggtcatttttttaacaactgcatcttttttactcattcattaaccccctttccaaaaatttggtgttgggaatataatataatcaatcaatccaaaatcctagacctaacacttgttgatttctaataatgaatttggttagccatattttgactttatttcagactaacaatgttaagattttttattttgcatgttaatgctttagcatttaaaatggaaaattgtgaacatgttgtaatttcaagaggtgagtttggcattacccccaaagtgtctatcttctcagttgcagagcatctcattttctctcttaaatgctcaaataaatgcaaagctcagcacatcttt

SEQ ID NO: 325474 - DNA, 1025 bp, Homo sapiens
  misc_feature (968)..(968): n is a, c, g, or t
  misc_feature (971)..(971): n is a, c, g, or t
  misc_feature (1013)..(1013): n is a, c, g, or t
  misc_feature (1024)..(1024): n is a, c, g, or t
tcggagcgagcgcccgagatccctttcccagagtgctctgcgccgtgaagaagcggctcccggggactgggggcattttgtgttggctggagctggagtaacaagatggcgtcgtccgcggagtgacaggggtccctctgggccggagccggcggcagtggtggcagcggtatcgccgccctagctcaccgcgccccttttccagcccgcgacgtcgccgcgcaagcgaggcagcggcggccgccgagaaacaagtggcccagcctggtaaccgccgagaagcccttcacaaactgcggcctggcaaaaagaaacctgactgagcggcggtgatcaggttcccctctgctgattctgggccccgaaccccggtaaaggcctccgtgttccgtttcctgccgccctcctccgtagccttgcctagtgtaggagccccgaggcctccgtcctcttcccagaggtgtcggggcttggccccagcctccatcttcgtctctcaggatggcgagtagcagcggctccaaggctgaattcattgtcggagggaaatataaactggtacggaagatcgggtctggctccttcggggacatctatttggcgatcaacatcaccaacggcgaggaagtggcagtgaagctagaatctcagaaggccaggcatccccagttgctgtacgagagcaagctctataagattcttcaaggtggggttggcatcccccacatacggtggtatggtcaggaaaaagactacaatgtactagtcatggatcttctgggacctagcctcgaagacctcttcaatttctgttcaagaaggttcacaatgaaaactgtacttatgttagctgaccagatgatcagtagaattgaatatgtgcatacaaagaattttatacacagagacattaaaccagataacttcctaatgggtattgggcgtcactgtaataagttattccttangcnattttggtttggccaaaaagtactcagacacggacgagaccntgtgccgaatnt

SEQ ID NO: 325475 - DNA, 947 bp, Homo sapiens
  misc_feature (773)..(773): n is a, c, g, or t
  misc_feature (778)..(778): n is a, c, g, or t
  misc_feature (786)..(787): n is a, c, g, or t
  misc_feature (812)..(812): n is a, c, g, or t
  misc_feature (838)..(838): n is a, c, g, or t
  misc_feature (863)..(863): n is a, c, g, or t
tcggagcgagcgcccgagatccctttcccagagtgctctgcgccgtgaagaagcggctcccggggactgggggcattttgtgttggctggagctggagtaacaagatggcgtcgtccgcggagtgacaggggtccctctgggccggagccggcggcagtggtggcagcggtatcgccgccctagctcaccgcgccccttttccagcccgcgacgtcgccgcgcaagcgaggcagcggcggccgccgagaaacaagtggcccagcctggtaaccgccgagaagcccttcacaaactgcggcctggcaaaaagaaacctgactgagcggcggtgatcaggttcccctctgctgattctgggccccgaaccccggtaaaggcctccgtgttccgtttcctgccgccctcctccgtagccttgcctagtgtaggagccccgaggcctccgtcctcttcccagaggtgtcggggcttggccccagcctccatcttcgtctctcaggatggcgagtagcagcggctccaaggctgaattcattgtcggagggaaatataaactggtacggaagatcgggtctggctccttcggggacatctatttggcgatcaacatcaccaacggcgaggaagtggcagtgaagctagaatctcagaaggccaggcatccccagttgctgtacgagagcaagctctataagattcttcaaggtggggttggcatcccccacatacgggtatggtcaggacttcaatgtctggtcaagaagggtcacantgaanactgtacnntatgtagctgaccagatgatcagtngaattgcatatgtgcatacaagaatntatcacagagcataaccagatactnctatgggatgggcgtcactgataagtatctgatgattggttgcaaagtcaggcacagcaggaccatcatcaggagtctatgact

SEQ ID NO: 325476 - DNA, 309 bp, Homo sapiens
tgcagcaccagccagaaaagcaaagctccagcctccactccccagctcagttcacccaagagcagcaggcggccagtcccaggggctgcactgctgcaaacctgctcaaaacctccagccgccacgtggcaacttgctccccagctctgagagtgcaggaccggggcgcagagacgacagaagaggctttaaatatgcagaatgactgtctaggtcaacgcacaaaaggaaagggccccaggtgtgggagatgcaaggggtgagagggaaagctcagaagagacgtgttggagctgctggcctgcagca

SEQ ID NO: 325477 - DNA, 4685 bp, Homo sapiens
taaggctaggtatgaggccgggtggttaatcaggcagagggagatacctgaaccttagcctgggtgaatctcacagacctcacctacctcaacctcagccgaaaccagctgtcgctgctgccaccctacatctgccagctgcccctgagggtcctcatcgtcagcaacaacaagctgggagccctgccccctgacatcggcaccctgggaagcctgcgacagcttgacgtgagcagcaacgagctccaatccctgccctcggaactgtgtggcctctcttccctgcgggacctcaatgtccggaggaaccagctcagtacgctgcccgaagagctgggggacctccctctggtccgcctggatttctcctgtaaccgcgtctcccgaatcccagtctccttctgccgcctgaggcacctgcaggtcattctgctggacagcaaccctctgcagagtccacctgcccaggtctgcctgaaggggaaacttcacatcttcaagtatttgtccacagaggccgggcagcgtgggtcggccctgggggacctggccccttctcggcccccgagtttcagtccctggtaagtcctaggtggggaggaaggaagccctgggatactgaatgccccttcccggccccaggcaccccctgctttctggcaggaggatggggggctgttgtccagcatcaggctgaccagatccgcctggctggccccagccctgcagaggatctatttccgggacatcggtacgatggtgggctggactcaggcttccacagcgttgatagtggcagcaagaggtggtctggaaatgaggtaagggcgtcctgtccatgggtgattgagggtgtcagccctgggagagcacctctgaactggggacctccaaattgcagggtgccaggcagaagctggagctgtcctcttccttccctctgcccagcatccagggaagggctggctcagcagagacctgagcttagtccacacaggacccccaggtcctgagcccccatgtacagagaggccatctcccatctctgcctctgcctttacagtcaacagatgaattttcagagctgtcattccggatctcagagctggcccgggagccccgggggcccagagaacgcaaggaggatggctcagcggacggagaccctgtgcagattgacttcatcgacagccatgtccccggggaggatgaagagcgaggcactgtggaggagcagcgaccacccgaattaagccctggggcaggggacagggagagggcaccaagcagcaggcgggaggagccggcaggggaggagcggcggcgcccggacaccttgcagctgtggcaggagcgggaacggcggcagcagcagcagagcggggcgtggggggccccgaggaaggatagcctcttgaagccagggctcagggctgttgtgggaggggccgccgccgtgtccactcaagccatgcacaacggctcgcctaagtccagtgcctcccaagcaggggctgcagcggggcagggagcccccgcccctgcccctgcctcccaagagccccttcccatagctggaccagcgacagcacctgctccacggccacttggctccattcagagaccaaacagcttcctcttccgttcctcctctcagagtggctcaggcccttcctcaccagactctgtcctgagacctcggcggtacccccaggttccagatgagaaggacttaatgactcagctgcgccaggtccttgagtcccggctgcagcggcccctgcctgaggacctggccgaggctctggccagtggggtcatcctgtgccagctggccaaccagctacggccgcgctccgtgcccttcatccatgtgccctcccctgctgtgccaaaactcagtgccctcaaggctcggaagaatgtggagagttttctagaagcctgtcgaaaaatgggggtgcctgaggctgacctgtgctcgccctcggatctcctccagggcactgcccgggggctgcggaccgcgctggaggccgtgaagcgggtggggggcaaggccctaccgcccctctggcccccctctggtctgggcggcttcgtcgtcttctacgtggtcctcatgctgctgctctatgtcacctacactcggctcctgggttcctaggccccaaaatcggccctccctcacccctttcccttcctctctatttataaggtccctgctccacccgaccccacctgcggtgccttcagccccaaccaaagacactagtgcacccccttcacagacactgacctcagaggccccactctggtgcccccagaccctgggcccccagcctctggcctccctccagtagccccacgagtccccacctctcagtgctgacggtgccttcatgtccccgccggccctgcccctgccctctgtaccccgtgaggggtggcaggagctggagtctcccccttcctcctgtgccctccccttccccccccaacagctgctatgggggggctaaattatctctattttgtagagaggatctatatttgtaggggttcggggcccaggccgggtccctatctctgtgtataaactgtacagaccgtggccgccctgcctgtgtgtgtgtgtgtgcgcgcgcgcgcgcgtctgctccgcgtgttggtggctgtggccatggctctgtgcccaccagcatctccctcctgagatgccggcctctcatgctcccggagcgtccgccaaccccccgtgtcacctcccttctgttatcgctgacagctttcttgcgtctcatttgtcgccgagccccgagcgcacggtgatgctcgggtctgcccccgaccccctgccacaggccggaagccgcagggggcaccgtggggaagctaacccggccccttcccccaggagtcactgtgccagccccaccacatcctggaagaggagggggccccgggaaggggcctcccctacatcgctgctgtcgtccacgccctgctggaccggccttaggggtgaaggtgggggcacagggcccaccccgcccgggaccccgggagcagaagacgcgcctgggctccgcgctctcagagaagcacgtggtgagggtggcctgggcctgggcacccttggcctgccggcctggctgcctctggggtcgagggtctgggtggaaggaccgcgggtgtcgcaggtgtcgtgtcagccgcaataaacagaagccagaagccctctgggtggccctcaggtgtaactgtgtctgagagcacgtgcgtcgcggggttgttgggggggcctctgtttccggaattcaccgcccagtcgccagggggcgcccgcgggagcccggcgggggcacgcgccacgtggccgggagacgcacagggcgccagcgtcgccgcgaggcctctggggtgggttcgccaggagggcacgttcgcgccgcgccgcggagggaggctgagagggccgggccgggcggcggggacacggcggtaccgtcctgcgctcgggaacgcggaatgttgccctggtcgccgccgcggtggggcgcgggcccggaggaggcgcccgagggaccaggccttccggcgggcaaggaccagggcgagccctggagcgccggagcggacgcccccagggagctggggacacccccatgggacaggtgaggggctcggacggagccgtggggggacagagactgggggcctccatgcgttcaccacgcgctctacggaggcttctccattgtccctgctggagattgggtccctcggtctcccttgcaccaggcacccttgggctccaggggagggtgcgtgggggcggtgtggctgcagcctcagtccctgcccctccagcccacagcccccatcccgtagcccttcctggatctggagagagcagctgctgctgccccaccacctgccaggcccggccactgagcagccccccggagccccagatccccgttccccccaggtggcctgggaggtggccccctcgaggatgactccactagcgccctgggaccccaagtatgaagccaaagcaggacctcggccggtgtggggggccaactgtagctcaggagcctcgttctcaggccggacgctgtgtcacccctcattctggccgctgtatgaagcagcctcgggcaggggtctcaggcccgtggcccctgccacagggcactggaatggacagcaggcgcccccagatgcagggttcccggtggtgtgctgtgaagatgtcttcctctcggaccctctgctgccccgggggcagcgtgttcccctgtacctgtccaaggccccccagcagatgatgggctccctgaaactgctgccgccgccccccatcatgtctgccagggtgctcccccgcccatcaccctcccggggcccctccactgcctggctcagcgggccggagctgatcgctctcactggcctgctgcagatgagccagggggagcctaggcccagctcctccgcggttggccccccagaccatacctctgacccacccagcccctgtggtagccccagcagttctcagggtgctgacctctctctcccacagaccccagacacccattgtccatagccttctcagggcagagtgggctggttgtgttgacaataaaacagtgttggtttgcaaaaaaaac

SEQ ID NO: 325478 - DNA, 4765 bp, Homo sapiens
taaggctaggtatgaggccgggtggttaatcaggcagagggagatacctgaaccttagcctgggtgaatctcacagacctcacctacctcaacctcagccgaaaccagctgtcgctgctgccaccctacatctgccagctgcccctgagggtcctcatcgtcagcaacaacaagctgggagccctgccccctgacatcggcaccctgggaagcctgcgacagcttgacgtgagcagcaacgagctccaatccctgccctcggaactgtgtggcctctcttccctgcgggacctcaatgtccggaggaaccagctcagtacgctgcccgaagagctgggggacctccctctggtccgcctggatttctcctgtaaccgcgtctcccgaatcccagtctccttctgccgcctgaggcacctgcaggtcattctgctggacagcaaccctctgcagagtccacctgcccaggtctgcctgaaggggaaacttcacatcttcaagtatttgtccacagaggccgggcagcgtgggtcggccctgggggacctggccccttctcggcccccgagtttcagtccctggtaagtcctaggtggggaggaaggaagccctgggatactgaatgccccttcccggccccaggcaccccctgctttctggcaggaggatggggggctgttgtccagcatcaggctgaccagatccgcctggctggccccagccctgcagaggatctatttccgggacatcggtacgatggtgggctggactcaggcttccacagcgttgatagtggcagcaagaggtggtctggaaatgagtcaacagatgaattttcagagctgtcattccggatctcagagctggcccgggagccccgggggcccagagaacgcaaggaggatggctcagcggacggagaccctgtgcagattgacttcatcgacagccatgtccccggggaggatgaagagcgaggcactgtggaggagcagcgaccacccgaattaagccctggggcaggggacagggagagggcaccaagcagcaggcgggaggagccggcaggggaggagcggcggcgcccggacaccttgcagctgtggcaggagcgggaacggcggcagcagcagcagagcggggcgtggggggccccgaggaaggataggtgggacccagggccgcccggggctgttgctggacactgagccctggaaatggggccaccgagccccgctgagccgttctgccttggggctagctgaccccacctctccttgttccagcctcttgaagccagggctcagggctgttgtgggaggggccgccgccgtgtccactcaagccatgcacaagtaggtttcctgccagcatcccctccccactcctcttcctatgaccatcatccctctaattcccttctgtctctcctcagcggctcgcctaagtccagtgcctcccaagcaggggctgcagcggggcagggagcccccgcccctgcccctgcctcccaagagccccttcccatagctggaccaggtgggacagggattttgggaggaggatggggcctgtgttggtgagggctggttgggagagagggacacagaggggatgcctgtctcacctgcccctgtcgctgtgtccctggttccggccccagcgacagcacctgctccacggccacttggctccattcagagaccaaacagcttcctcttccgttcctcctctcagagtggctcaggcccttcctcaccagactctgtcctgagacctcggcggtacccccaggttccagatgagaaggacttaatgactcagctgcgccaggtccttgagtcccggctgcagcggcccctgcctgaggacctggccgaggctctggccagtggggtcatcctgtgccagctggccaaccagctacggccgcgctccgtgcccttcatccatgtgccctcccctgctgtgccaaaactcagtgccctcaaggctcggaagaatgtggagagttttctagaagcctgtcgaaaaatgggggtgcctgaggctgacctgtgctcgccctcggatctcctccagggcactgcccgggggctgcggaccgcgctggaggccgtgaagcgggtggggggcaaggccctaccgcccctctggcccccctctggtctgggcggcttcgtcgtcttctacgtggtcctcatgctgctgctctatgtcacctacactcggctcctgggttcctaggccccaaaatcggccctccctcacccctttcccttcctctctatttataaggtccctgctccacccgaccccacctgcggtgccttcagccccaaccaaagacactagtgcacccccttcacagacactgacctcagaggccccactctggtgcccccagaccctgggcccccagcctctggcctccctccagtagccccacgagtccccacctctcagtgctgacggtgccttcatgtccccgccggccctgcccctgccctctgtaccccgtgaggggtggcaggagctggagtctcccccttcctcctgtgccctccccttccccccccaacagctgctatgggggggctaaattatctctattttgtagagaggatctatatttgtaggggttcggggcccaggccgggtccctatctctgtgtataaactgtacagaccgtggccgccctgcctgtgtgtgtgtgtgtgcgcgcgcgcgcgcgtctgctccgcgtgttggtggctgtggccatggctctgtgcccaccagcatctccctcctgagatgccggcctctcatgctcccggagcgtccgccaaccccccgtgtcacctcccttctgttatcgctgacagctttcttgcgtctcatttgtcgccgagccccgagcgcacggtgatgctcgggtctgcccccgaccccctgccacaggccggaagccgcagggggcaccgtggggaagctaacccggccccttcccccaggagtcactgtgccagccccaccacatcctggaagaggagggggccccgggaaggggcctcccctacatcgctgctgtcgtccacgccctgctggaccggccttaggggtgaaggtgggggcacagggcccaccccgcccgggaccccgggagcagaagacgcgcctgggctccgcgctctcagagaagcacgtggtgagggtggcctgggcctgggcacccttggcctgccggcctggctgcctctggggtcgagggtctgggtggaaggaccgcgggtgtcgcaggtgtcgtgtcagccgcaataaacagaagccagaagccctctgggtggccctcaggtgtaactgtgtctgagagcacgtgcgtcgcggggttgttgggggggcctctgtttccggaattcaccgcccagtcgccagggggcgcccgcgggagcccggcgggggcacgcgccacgtggccgggagacgcacagggcgccagcgtcgccgcgaggcctctggggtgggttcgccaggagggcacgttcgcgccgcgccgcggagggaggctgagagggccgggccgggcggcggggacacggcggtaccgtcctgcgctcgggaacgcggaatgttgccctggtcgccgccgcggtggggcgcgggcccggaggaggcgcccgagggaccaggccttccggcgggcaaggaccagggcgagccctggagcgccggagcggacgcccccagggagctggggacacccccatgggacaggtgaggggctcggacggagccgtggggggacagagactgggggcctccatgcgttcaccacgcgctctacggaggcttctccattgtccctgctggagattgggtccctcggtctcccttgcaccaggcacccttgggctccaggggagggtgcgtgggggcggtgtggctgcagcctcagtccctgcccctccagcccacagcccccatcccgtagcccttcctggatctggagagagcagctgctgctgccccaccacctgccaggcccggccactgagcagccccccggagccccagatccccgttccccccaggtggcctgggaggtggccccctcgaggatgactccactagcgccctgggaccccaagtatgaagccaaagcaggacctcggccggtgtggggggccaactgtagctcaggagcctcgttctcaggccggacgctgtgtcacccctcattctggccgctgtatgaagcagcctcgggcaggggtctcaggcccgtggcccctgccacagggcactggaatggacagcaggcgcccccagatgcagggttcccggtggtgtgctgtgaagatgtcttcctctcggaccctctgctgccccgggggcagcgtgttcccctgtacctgtccaaggccccccagcagatgatgggctccctgaaactgctgccgccgccccccatcatgtctgccagggtgctcccccgcccatcaccctcccggggcccctccactgcctggctcagcgggccggagctgatcgctctcactggcctgctgcagatgagccagggggagcctaggcccagctcctccgcggttggccccccagaccatacctctgacccacccagcccctgtggtagccccagcagttctcagggtgctgacctctctctcccacagaccccagacacccattgtccatagccttctcagggcagagtgggctggttgtgttgacaataaaacagtgttggtttgcaaaaaaaac

SEQ ID NO: 325479 - DNA, 5377 bp, Homo sapiens
taaggctaggtatgaggccgggtggttaatcaggcagagggagatacctgaaccttagcctgggtgaatctcacagacctcacctacctcaacctcagccgaaaccagctgtcgctgctgccaccctacatctgccagctgcccctgagggtcctcatcgtcagcaacaacaagctgggagccctgccccctgacatcggcaccctgggaagcctgcgacagcttgacgtgagcagcaacgagctccaatccctgccctcggaactgtgtggcctctcttccctgcgggacctcaatgtccggaggaaccagctcagtacgctgcccgaagagctgggggacctccctctggtccgcctggatttctcctgtaaccgcgtctcccgaatcccagtctccttctgccgcctgaggcacctgcaggtcattctgctggacagcaaccctctgcagagtccacctgcccaggtctgcctgaaggggaaacttcacatcttcaagtatttgtccacagaggccgggcagcgtgggtcggccctgggggacctggccccttctcggcccccgagtttcagtccctggtaagtcctaggtggggaggaaggaagccctgggatactgaatgccccttcccggccccaggcaccccctgctttctggcaggaggatggggggctgttgtccagcatcaggctgaccagatccgcctggctggccccagccctgcagaggatctatttccgggacatcggtacgatggtgggctggactcaggcttccacagcgttgatagtggcagcaagaggtggtctggaaatgaggtaagggcgtcctgtccatgggtgattgagggtgtcagccctgggagagcacctctgaactggggacctccaaattgcagggtgccaggcagaagctggagctgtcctcttccttccctctgcccagcatccagggaagggctggctcagcagagacctgagcttagtccacacaggacccccaggtcctgagcccccatgtacagagaggccatctcccatctctgcctctgcctttacagtcaacagatgaattttcagagctgtcattccggatctcagagctggcccgggagccccgggggcccagagaacgcaaggaggatggctcagcggacggagaccctgtgcagattgacttcatcgacagccatgtccccggggaggatgaagagcgaggcactgtggaggagcagcgaccacccgaattaagccctggggcaggggacagggagagggcaccaagcagcaggcgggaggagccggcaggggaggagcggcggcgcccggacaccttgcagctgtggcaggagcgggaacggcggcagcagcagcagagcggggcgtggggggccccgaggaaggataggtgggacccagggccgcccggggctgttgctggacactgagccctggaaatggggccaccgagccccgctgagccgttctgccttggggctagctgaccccacctctccttgttccagcctcttgaagccagggctcagggctgttgtgggaggggccgccgccgtgtccactcaagccatgcacaagtaggtttcctgccagcatcccctccccactcctcttcctatgaccatcatccctctaattcccttctgtctctcctcagcggctcgcctaagtccagtgcctcccaagcaggggctgcagcggggcagggagcccccgcccctgcccctgcctcccaagagccccttcccatagctggaccaggtgggacagggattttgggaggaggatggggcctgtgttggtgagggctggttgggagagagggacacagaggggatgcctgtctcacctgcccctgtcgctgtgtccctggttccggccccagcgacagcacctgctccacggccacttggctccattcagagaccaaacagcttcctcttccgttcctcctctcagagtggctcaggtgggtgtcctgccctccccagtgctgacccagtgcttgccagcaccaacggctacatcacccttctgccctgggagccctctgggtctgttgtaccttttgtacctttgcgttgaaaatcccacaagcaagccgggtgtggtggctcacacctgtaatcgcagcactttaggaggcccaggtgggaggatcgcttgagcccaggaattcaagaccagcctgggcaacatagcgagaccccatctccatgaaataaaaaaaaatcccacaagcagagaggcaggaggtgtaggtgccaggccactgggacccagctacagagtcagtggtgagcagtggaggcagccccatgcccccctttttctcctaggcccttcctcaccagactctgtcctgagacctcggcggtacccccaggttccagatgagaaggacttaatgactcagctgcgccaggtccttgagtcccggctgcagcggcccctgcctgaggacctggccgaggctctggccagtggggtcatcctgtgccagctggccaaccagctacggccgcgctccgtgcccttcatccatgtgccctcccctgctgtgccaaaactcagtgccctcaaggctcggaagaatgtggagagttttctagaagcctgtcgaaaaatgggggtgcctgaggctgacctgtgctcgccctcggatctcctccagggcactgcccgggggctgcggaccgcgctggaggccgtgaagcgggtggggggcaaggccctaccgcccctctggcccccctctggtctgggcggcttcgtcgtcttctacgtggtcctcatgctgctgctctatgtcacctacactcggctcctgggttcctaggccccaaaatcggccctccctcacccctttcccttcctctctatttataaggtccctgctccacccgaccccacctgcggtgccttcagccccaaccaaagacactagtgcacccccttcacagacactgacctcagaggccccactctggtgcccccagaccctgggcccccagcctctggcctccctccagtagccccacgagtccccacctctcagtgctgacggtgccttcatgtccccgccggccctgcccctgccctctgtaccccgtgaggggtggcaggagctggagtctcccccttcctcctgtgccctccccttccccccccaacagctgctatgggggggctaaattatctctattttgtagagaggatctatatttgtaggggttcggggcccaggccgggtccctatctctgtgtataaactgtacagaccgtggccgccctgcctgtgtgtgtgtgtgtgcgcgcgcgcgcgcgtctgctccgcgtgttggtggctgtggccatggctctgtgcccaccagcatctccctcctgagatgccggcctctcatgctcccggagcgtccgccaaccccccgtgtcacctcccttctgttatcgctgacagctttcttgcgtctcatttgtcgccgagccccgagcgcacggtgatgctcgggtctgcccccgaccccctgccacaggccggaagccgcagggggcaccgtggggaagctaacccggccccttcccccaggagtcactgtgccagccccaccacatcctggaagaggagggggccccgggaaggggcctcccctacatcgctgctgtcgtccacgccctgctggaccggccttaggggtgaaggtgggggcacagggcccaccccgcccgggaccccgggagcagaagacgcgcctgggctccgcgctctcagagaagcacgtggtgagggtggcctgggcctgggcacccttggcctgccggcctggctgcctctggggtcgagggtctgggtggaaggaccgcgggtgtcgcaggtgtcgtgtcagccgcaataaacagaagccagaagccctctgggtggccctcaggtgtaactgtgtctgagagcacgtgcgtcgcggggttgttgggggggcctctgtttccggaattcaccgcccagtcgccagggggcgcccgcgggagcccggcgggggcacgcgccacgtggccgggagacgcacagggcgccagcgtcgccgcgaggcctctggggtgggttcgccaggagggcacgttcgcgccgcgccgcggagggaggctgagagggccgggccgggcggcggggacacggcggtaccgtcctgcgctcgggaacgcggaatgttgccctggtcgccgccgcggtggggcgcgggcccggaggaggcgcccgagggaccaggccttccggcgggcaaggaccagggcgagccctggagcgccggagcggacgcccccagggagctggggacacccccatgggacaggtgaggggctcggacggagccgtggggggacagagactgggggcctccatgcgttcaccacgcgctctacggaggcttctccattgtccctgctggagattgggtccctcggtctcccttgcaccaggcacccttgggctccaggggagggtgcgtgggggcggtgtggctgcagcctcagtccctgcccctccagcccacagcccccatcccgtagcccttcctggatctggagagagcagctgctgctgccccaccacctgccaggcccggccactgagcagccccccggagccccagatccccgttccccccaggtggcctgggaggtggccccctcgaggatgactccactagcgccctgggaccccaagtatgaagccaaagcaggacctcggccggtgtggggggccaactgtagctcaggagcctcgttctcaggccggacgctgtgtcacccctcattctggccgctgtatgaagcagcctcgggcaggggtctcaggcccgtggcccctgccacagggcactggaatggacagcaggcgcccccagatgcagggttcccggtggtgtgctgtgaagatgtcttcctctcggaccctctgctgccccgggggcagcgtgttcccctgtacctgtccaaggccccccagcagatgatgggctccctgaaactgctgccgccgccccccatcatgtctgccagggtgctcccccgcccatcaccctcccggggcccctccactgcctggctcagcgggccggagctgatcgctctcactggcctgctgcagatgagccagggggagcctaggcccagctcctccgcggttggccccccagaccatacctctgacccacccagcccctgtggtagccccagcagttctcagggtgctgacctctctctcccacagaccccagacacccattgtccatagccttctcagggcagagtgggctggttgtgttgacaataaaacagtgttggtttgcaaaaaaaac

SEQ ID NO: 325480 - DNA, 4967 bp, Homo sapiens
taaggctaggtatgaggccgggtggttaatcaggcagagggagatacctgaaccttagcctgggtgaatctcacagacctcacctacctcaacctcagccgaaaccagctgtcgctgctgccaccctacatctgccagctgcccctgagggtcctcatcgtcagcaacaacaagctgggagccctgccccctgacatcggcaccctgggaagcctgcgacagcttgacgtgagcagcaacgagctccaatccctgccctcggaactgtgtggcctctcttccctgcgggacctcaatgtccggaggaaccagctcagtacgctgcccgaagagctgggggacctccctctggtccgcctggatttctcctgtaaccgcgtctcccgaatcccagtctccttctgccgcctgaggcacctgcaggtcattctgctggacagcaaccctctgcagagtccacctgcccaggtctgcctgaaggggaaacttcacatcttcaagtatttgtccacagaggccgggcagcgtgggtcggccctgggggacctggccccttctcggcccccgagtttcagtccctggtaagtcctaggtggggaggaaggaagccctgggatactgaatgccccttcccggccccaggcaccccctgctttctggcaggaggatggggggctgttgtccagcatcaggctgaccagatccgcctggctggccccagccctgcagaggatctatttccgggacatcggtacgatggtgggctggactcaggcttccacagcgttgatagtggcagcaagaggtggtctggaaatgaggtaagggcgtcctgtccatgggtgattgagggtgtcagccctgggagagcacctctgaactggggacctccaaattgcagggtgccaggcagaagctggagctgtcctcttccttccctctgcccagcatccagggaagggctggctcagcagagacctgagcttagtccacacaggacccccaggtcctgagcccccatgtacagagaggccatctcccatctctgcctctgcctttacagtcaacagatgaattttcagagctgtcattccggatctcagagctggcccgggagccccgggggcccagagaacgcaaggaggatggctcagcggacggagaccctgtgcagattgacttcatcgacagccatgtccccggggaggatgaagagcgaggcactgtggaggagcagcgaccacccgaattaagccctggggcaggggacagggagagggcaccaagcagcaggcgggaggagccggcaggggaggagcggcggcgcccggacaccttgcagctgtggcaggagcgggaacggcggcagcagcagcagagcggggcgtggggggccccgaggaaggatagcctcttgaagccagggctcagggctgttgtgggaggggccgccgccgtgtccactcaagccatgcacaacggctcgcctaagtccagtgcctcccaagcaggggctgcagcggggcagggagcccccgcccctgcccctgcctcccaagagccccttcccatagctggaccagcgacagcacctgctccacggccacttggctccattcagagaccaaacagcttcctcttccgttcctcctctcagagtggctcaggcccttcctcaccagactctgtcctgagacctcggcggtacccccaggttccagatgagaaggacttaatgactcagctgcgccaggtccttgagtcccggctgcagcggcccctgcctgaggacctggccgaggctctggccagtggggtcatcctgtgccagctggccaaccagctacggccgcgctccgtgcccttcatccatgtgccctcccctgctgtgccaaaactcagtgccctcaaggctcggaagaatgtggagagttttctagaagcctgtcgaaaaatgggggtgcctgaggctgacctgtgctcgccctcggatctcctccagggcactgcccgggggctgcggaccgcgctggaggccgtgaagcgggtggggggcaaggccctaccgcccctctggcccccctctggtctgggcggcttcgtcgtcttctacgtggtcctcatgctgctgctctatgtcacctacactcggctcctgggttcctaggccccaaaatcggccctccctcacccctttcccttcctctctatttataaggtccctgctccacccgaccccacctgcggtgccttcagccccaaccaaagacactagtgcacccccttcacagacactgacctcagaggccccactctggtgcccccagaccctgggcccccagcctctggcctccctccagtagccccacgagtccccacctctcagtgctgacggtgccttcatgtccccgccggccctgcccctgccctctgtaccccgtgaggggtggcaggagctggagtctcccccttcctcctgtgccctccccttccccccccaacagctgctatgggggggctaaattatctctattttgtagagaggatctatatttgtaggggttcggggcccaggccgggtccctatctctgtgtataaactgtacagaccgtggccgccctgcctgtgtgtgtgtgtgtgcgcgcgcgcgcgcgtctgctccgcgtgttggtggctgtggccatggctctgtgcccaccagcatctccctcctgagatgccggcctctcatgctcccggagcgtccgccaaccccccgtgtcacctcccttctgttatcgctgacagctttcttgcgtctcatttgtcgccgagccccgagcgcacggtgatgctcgggtctgcccccgaccccctgccacaggccggaagccgcagggggcaccgtggggaagctaacccggccccttcccccaggagtcactgtgccagccccaccacatcctggaagaggagggggccccgggaaggggcctcccctacatcgctgctgtcgtccacgccctgctggaccggccttaggggtgaaggtgggggcacagggcccaccccgcccgggaccccgggagcagaagacgcgcctgggctccgcgctctcagagaagcacgtggtgagggtggcctgggcctgggcacccttggcctgccggcctggctgcctctggggtcgagggtctgggtggaaggaccgcgggtgtcgcaggtgtcgtgtcagccgcaataaacagaagccagaagccctctgggtggccctcaggtgtaactgtgtctgagagcacgtgcgtcgcggggttgttgggggggcctctgtttccggaattcaccgcccagtcgccagggggcgcccgcgggagcccggcgggggcacgcgccacgtggccgggagacgcacagggcgccagcgtcgccgcgaggcctctggggtgggttcgccaggagggcacgttcgcgccgcgccgcggagggaggctgagagggccgggccgggcggcggggacacggcggtaccgtcctgcgctcgggaacgcggaatgttgccctggtcgccgccgcggtggggcgcgggcccggaggaggcgcccgagggaccaggccttccggcgggcaaggaccagggcgagccctggagcgccggagcggacgcccccagggagctggggacacccccatgggacaggtgaggggctcggacggagccgtggggggacagagactgggggcctccatgcgttcaccacgcgctctacggaggcttctccattgtccctgctggagattgggtccctcggtctcccttgcaccaggcacccttgggctccaggggagggtgcgtgggggcggtgtggctgcagcctcagtccctgcccctccagcccacagcccccatcccgtagcccttcctggatctggagagagcagctgctgctgccccaccacctgccaggcccggccactgagcagccccccggagccccagatccccgttccccccaggtggcctgggaggtggccccctcgaggatgactccactagcgccctgggaccccaagtatgaagccaaagcaggacctcggccggtgtgggtgagttgggggcaaacctgtgggactggctggggtgctcagggagctgtgcggtggcctgaggctccagtgctctgtcctcctcaccctagggggccaactgtagctcaggagcctcgttctcaggccggacgctgtgtcacccctcattctggccgctgtatgaagcagcctcgggcaggggtctcaggcccgtggcccctgccacagggcactggaatggacagcaggcgcccccagatgcaggtacctcccttggtcccccgggggcgcaaggctgccccaactcctctgggaaccagtgcccaggggtgggagcccgcagcccgccaccctagtggtgtttcctcctagggttcccggtggtgtgctgtgaagatgtcttcctctcggaccctctgctgccccgggggcagcgtgttcccctgtacctgtccaaggccccccagcaggtgagagctctttcccctccctgtccttaccccagcctccaggcttgcctggcaggaaacacattccattctctctcctcagatgatgggctccctgaaactgctgccgccgccccccatcatgtctgccagggtgctcccccgcccatcaccctcccggggcccctccactgcctggctcagcgggccggagctgatcgctctcactggcctgctgcagatgagccagggggagcctaggcccagctcctccgcggttggccccccagaccatacctctgacccacccagcccctgtggtagccccagcagttctcagggtgctgacctctctctcccacagaccccagacacccattgtccatagccttctcagggcagagtgggctggttgtgttgacaataaaacagtgttggtttgcaaaaaaaac

SEQ ID NO: 325481 - DNA, 4905 bp, Homo sapiens
taaggctaggtatgaggccgggtggttaatcaggcagagggagatacctgaaccttagcctgggtgaatctcacagacctcacctacctcaacctcagccgaaaccagctgtcgctgctgccaccctacatctgccagctgcccctgagggtcctcatcgtcagcaacaacaagctgggagccctgccccctgacatcggcaccctgggaagcctgcgacagcttgacgtgagcagcaacgagctccaatccctgccctcggaactgtgtggcctctcttccctgcgggacctcaatgtccggaggaaccagctcagtacgctgcccgaagagctgggggacctccctctggtccgcctggatttctcctgtaaccgcgtctcccgaatcccagtctccttctgccgcctgaggcacctgcaggtcattctgctggacagcaaccctctgcagagtccacctgcccaggtctgcctgaaggggaaacttcacatcttcaagtatttgtccacagaggccgggcagcgtgggtcggccctgggggacctggccccttctcggcccccgagtttcagtccctggtaagtcctaggtggggaggaaggaagccctgggatactgaatgccccttcccggccccaggcaccccctgctttctggcaggaggatggggggctgttgtccagcatcaggctgaccagatccgcctggctggccccagccctgcagaggatctatttccgggacatcggtacgatggtgggctggactcaggcttccacagcgttgatagtggcagcaagaggtggtctggaaatgaggtaagggcgtcctgtccatgggtgattgagggtgtcagccctgggagagcacctctgaactggggacctccaaattgcagggtgccaggcagaagctggagctgtcctcttccttccctctgcccagcatccagggaagggctggctcagcagagacctgagcttagtccacacaggacccccaggtcctgagcccccatgtacagagaggccatctcccatctctgcctctgcctttacagtcaacagatgaattttcagagctgtcattccggatctcagagctggcccgggagccccgggggcccagagaacgcaaggaggatggctcagcggacggagaccctgtgcagattgacttcatcgacagccatgtccccggggaggatgaagagcgaggcactgtggaggagcagcgaccacccgaattaagccctggggcaggggacagggagagggcaccaagcagcaggcgggaggagccggcaggggaggagcggcggcgcccggacaccttgcagctgtggcaggagcgggaacggcggcagcagcagcagagcggggcgtggggggccccgaggaaggatagcctcttgaagccagggctcagggctgttgtgggaggggccgccgccgtgtccactcaagccatgcacaacggctcgcctaagtccagtgcctcccaagcaggggctgcagcggggcagggagcccccgcccctgcccctgcctcccaagagccccttcccatagctggaccagcgacagcacctgctccacggccacttggctccattcagagaccaaacagcttcctcttccgttcctcctctcagagtggctcaggcccttcctcaccagactctgtcctgagacctcggcggtacccccaggttccagatgagaaggacttaatgactcagctgcgccaggtccttgagtcccggctgcagcggcccctgcctgaggacctggccgaggctctggccagtggggtcatcctgtgccagctggccaaccagctacggccgcgctccgtgcccttcatccatgtgccctcccctgctgtgccaaaactcagtgccctcaaggctcggaagaatgtggagagttttctagaagcctgtcgaaaaatgggggtgcctgaggctgacctgtgctcgccctcggatctcctccagggcactgcccgggggctgcggaccgcgctggaggccgtgaagcgggtggggggcaaggccctaccgcccctctggcccccctctggtctgggcggcttcgtcgtcttctacgtggtcctcatgctgctgctctatgtcacctacactcggctcctgggttcctaggccccaaaatcggccctccctcacccctttcccttcctctctatttataaggtccctgctccacccgaccccacctgcggtgccttcagccccaaccaaagacactagtgcacccccttcacagacactgacctcagaggccccactctggtgcccccagaccctgggcccccagcctctggcctccctccagtagccccacgagtccccacctctcagtgctgacggtgccttcatgtccccgccggccctgcccctgccctctgtaccccgtgaggggtggcaggagctggagtctcccccttcctcctgtgccctccccttccccccccaacagctgctatgggggggctaaattatctctattttgtagagaggatctatatttgtaggggttcggggcccaggccgggtccctatctctgtgtataaactgtacagaccgtggccgccctgcctgtgtgtgtgtgtgtgcgcgcgcgcgcgcgtctgctccgcgtgttggtggctgtggccatggctctgtgcccaccagcatctccctcctgagatgccggcctctcatgctcccggagcgtccgccaaccccccgtgtcacctcccttctgttatcgctgacagctttcttgcgtctcatttgtcgccgagccccgagcgcacggtgatgctcgggtctgcccccgaccccctgccacaggccggaagccgcagggggcaccgtggggaagctaacccggccccttcccccaggagtcactgtgccagccccaccacatcctggaagaggagggggccccgggaaggggcctcccctacatcgctgctgtcgtccacgccctgctggaccggccttaggggtgaaggtgggggcacagggcccaccccgcccgggaccccgggagcagaagacgcgcctgggctccgcgctctcagagaagcacgtggtgagggtggcctgggcctgggcacccttggcctgccggcctggctgcctctggggtcgagggtctgggtggaaggaccgcgggtgtcgcaggtgtcgtgtcagccgcaataaacagaagccagaagccctctgggtggccctcaggtgtaactgtgtctgagagcacgtgcgtcgcggggttgttgggggggcctctgtttccggaattcaccgcccagtcgccagggggcgcccgcgggagcccggcgggggcacgcgccacgtggccgggagacgcacagggcgccagcgtcgccgcgaggcctctggggtgggttcgccaggagggcacgttcgcgccgcgccgcggagggaggctgagagggccgggccgggcggcggggacacggcggtaccgtcctgcgctcgggaacgcggaatgttgccctggtcgccgccgcggtggggcgcgggcccggaggaggcgcccgagggaccaggccttccggcgggcaaggaccagggcgagccctggagcgccggagcggacgcccccagggagctggggacacccccatgggacaggtgaggggctcggacggagccgtggggggacagagactgggggcctccatgcgttcaccacgcgctctacggaggcttctccattgtccctgctggagattgggtccctcggtctcccttgcaccaggcacccttgggctccaggggagggtgcgtgggggcggtgtggctgcagcctcagtccctgcccctccagcccacagcccccatcccgtagcccttcctggatctggagagagcagctgctgctgccccaccacctgccaggcccggccactgagcagccccccggagccccagatccccgttccccccaggtggcctgggaggtggccccctcgaggatgactccactagcgccctgggaccccaagtatgaagccaaagcaggacctcggccggtgtgggtgagttgggggcaaacctgtgggactggctggggtgctcagggagctgtgcggtggcctgaggctccagtgctctgtcctcctcaccctagggggccaactgtagctcaggagcctcgttctcaggccggacgctgtgtcacccctcattctggccgctgtatgaagcagcctcgggcaggggtctcaggcccgtggcccctgccacagggcactggaatggacagcaggcgcccccagatgcaggtacctcccttggtcccccgggggcgcaaggctgccccaactcctctgggaaccagtgcccaggggtgggagcccgcagcccgccaccctagtggtgtttcctcctagggttcccggtggtgtgctgtgaagatgtcttcctctcggaccctctgctgccccgggggcagcgtgttcccctgtacctgtccaaggccccccagcaggtgagagctctttcccctccctgtccttaccccagcctccaggcttgcctggcaggaaacacattccattctctctcctcagatgatgggctccctgaaactgctgccgccgccccccatcatgtctgccagggtgctcccccgcccatcaccctcccggggcccctccactgcctggctcagcgggccggagctgatcgctctcactggcctgctgcagatgagccagggggagcctaggcccagctcctccgcggttggccccccagaccatacctctgaccccagacacccattgtccatagccttctcagggcagagtgggctggttgtgttgacaataaaacagtgttggtttgcaaaaaaaac

SEQ ID NO: 325482 - DNA, 4438 bp, Homo sapiens
taaggctaggtatgaggccgggtggttaatcaggcagagggagatacctgaaccttagcctgggtgaatctcacagacctcacctacctcaacctcagccgaaaccagctgtcgctgctgccaccctacatctgccagctgcccctgagggtcctcatcgtcagcaacaacaagctgggagccctgccccctgacatcggcaccctgggaagcctgcgacagcttgacgtgagcagcaacgagctccaatccctgccctcggaactgtgtggcctctcttccctgcgggacctcaatgtccggaggaaccagctcagtacgctgcccgaagagctgggggacctccctctggtccgcctggatttctcctgtaaccgcgtctcccgaatcccagtctccttctgccgcctgaggcacctgcaggtcattctgctggacagcaaccctctgcagagtccacctgcccaggtctgcctgaaggggaaacttcacatcttcaagtatttgtccacagaggccgggcagcgtgggtcggccctgggggacctggccccttctcggcccccgagtttcagtccctggtaagtcctaggtggggaggaaggaagccctgggatactgaatgccccttcccggccccaggcaccccctgctttctggcaggaggatggggggctgttgtccagcatcaggctgaccagatccgcctggctggccccagccctgcagaggatctatttccgggacatcggtacgatggtgggctggactcaggcttccacagcgttgatagtggcagcaagaggtggtctggaaatgaggtaagggcgtcctgtccatgggtgattgagggtgtcagccctgggagagcacctctgaactggggacctccaaattgcagggtgccaggcagaagctggagctgtcctcttccttccctctgcccagcatccagggaagggctggctcagcagagacctgagcttagtccacacaggacccccaggtcctgagcccccatgtacagagaggccatctcccatctctgcctctgcctttacagtcaacagatgaattttcagagctgtcattccggatctcagagctggcccgggagccccgggggcccagagaacgcaaggaggatggctcagcggacggagaccctgtgcagattgacttcatcgacagccatgtccccggggaggatgaagagcgaggcactgtggaggagcagcgaccacccgaattaagccctggggcaggggacagggagagggcaccaagcagcaggcgggaggagccggcaggggaggagcggcggcgcccggacaccttgcagctgtggcaggagcgggaacggcggcagcagcagcagagcggggcgtggggggccccgaggaaggatagcctcttgaagccagggctcagggctgttgtgggaggggccgccgccgtgtccactcaagccatgcacaacggctcgcctaagtccagtgcctcccaagcaggggctgcagcggggcagggagcccccgcccctgcccctgcctcccaagagccccttcccatagctggaccagcgacagcacctgctccacggccacttggctccattcagagaccaaacagcttcctcttccgttcctcctctcagagtggctcaggcccttcctcaccagactctgtcctgagacctcggcggtacccccaggttccagatgagaaggacttaatgactcagctgcgccaggtccttgagtcccggctgcagcggcccctgcctgaggacctggccgaggctctggccagtggggtcatcctgtgccagctggccaaccagctacggccgcgctccgtgcccttcatccatgtgccctcccctgctgtgccaaaactcagtgccctcaaggctcggaagaatgtggagagttttctagaagcctgtcgaaaaatgggggtgcctgaggctgacctgtgctcgccctcggatctcctccagggcactgcccgggggctgcggaccgcgctggaggccgtgaagcgggtggggggcaaggccctaccgcccctctggcccccctctggtctgggcggcttcgtcgtcttctacgtggtcctcatgctgctgctctatgtcacctacactcggctcctgggttcctaggccccaaaatcggccctccctcacccctttcccttcctctctatttataaggtccctgctccacccgaccccacctgcggtgccttcagccccaaccaaagacactagtgcacccccttcacagacactgacctcagaggccccactctggtgcccccaggccgggtccctatctctgtgtataaactgtacagaccgtggccgccctgcctgtgtgtgtgtgtgtgcgcgcgcgcgcgcgtctgctccgcgtgttggtggctgtggccatggctctgtgcccaccagcatctccctcctgagatgccggcctctcatgctcccggagcgtccgccaaccccccgtgtcacctcccttctgttatcgctgacagctttcttgcgtctcatttgtcgccgagccccgagcgcacggtgatgctcgggtctgcccccgaccccctgccacaggccggaagccgcagggggcaccgtggggaagctaacccggccccttcccccaggagtcactgtgccagccccaccacatcctggaagaggagggggccccgggaaggggcctcccctacatcgctgctgtcgtccacgccctgctggaccggccttaggggtgaaggtgggggcacagggcccaccccgcccgggaccccgggagcagaagacgcgcctgggctccgcgctctcagagaagcacgtggtgagggtggcctgggcctgggcacccttggcctgccggcctggctgcctctggggtcgagggtctgggtggaaggaccgcgggtgtcgcaggtgtcgtgtcagccgcaataaacagaagccagaagccctctgggtggccctcaggtgtaactgtgtctgagagcacgtgcgtcgcggggttgttgggggggcctctgtttccggaattcaccgcccagtcgccagggggcgcccgcgggagcccggcgggggcacgcgccacgtggccgggagacgcacagggcgccagcgtcgccgcgaggcctctggggtgggttcgccaggagggcacgttcgcgccgcgccgcggagggaggctgagagggccgggccgggcggcggggacacggcggtaccgtcctgcgctcgggaacgcggaatgttgccctggtcgccgccgcggtggggcgcgggcccggaggaggcgcccgagggaccaggccttccggcgggcaaggaccagggcgagccctggagcgccggagcggacgcccccagggagctggggacacccccatgggacaggtgaggggctcggacggagccgtggggggacagagactgggggcctccatgcgttcaccacgcgctctacggaggcttctccattgtccctgctggagattgggtccctcggtctcccttgcaccaggcacccttgggctccaggggagggtgcgtgggggcggtgtggctgcagcctcagtccctgcccctccagcccacagcccccatcccgtagcccttcctggatctggagagagcagctgctgctgccccaccacctgccaggcccggccactgagcagccccccggagccccagatccccgttccccccaggtggcctgggaggtggccccctcgaggatgactccactagcgccctgggaccccaagtatgaagccaaagcaggacctcggccggtgtggggggccaactgtagctcaggagcctcgttctcaggccggacgctgtgtcacccctcattctggccgctgtatgaagcagcctcgggcaggggtctcaggcccgtggcccctgccacagggcactggaatggacagcaggcgcccccagatgcagggttcccggtggtgtgctgtgaagatgtcttcctctcggaccctctgctgccccgggggcagcgtgttcccctgtacctgtccaaggccccccagcagatgatgggctccctgaaactgctgccgccgccccccatcatgtctgccagggtgctcccccgcccatcaccctcccggggcccctccactgcctggctcagcgggccggagctgatcgctctcactggcctgctgcagatgagccagggggagcctaggcccagctcctccgcggttggccccccagaccatacctctgacccacccagcccctgtggtagccccagcagttctcagggtgctgacctctctctcccacagaccccagacacccattgtccatagccttctcagggcagagtgggctggttgtgttgacaataaaacagtgttggtttgcaaaaaaaac

SEQ ID NO: 325483 - DNA, 3239 bp, Homo sapiens
taaggctaggtatgaggccgggtggttaatcaggcagagggagatacctgaaccttagcctgggtgaatctcacagacctcacctacctcaacctcagccgaaaccagctgtcgctgctgccaccctacatctgccagctgcccctgagggtcctcatcgtcagcaacaacaagctgggagccctgccccctgacatcggcaccctgggaagcctgcgacagcttgacgtgagcagcaacgagctccaatccctgccctcggaactgtgtggcctctcttccctgcgggacctcaatgtccggaggaaccagctcagtacgctgcccgaagagctgggggacctccctctggtccgcctggatttctcctgtaaccgcgtctcccgaatcccagtctccttctgccgcctgaggcacctgcaggtcattctgctggacagcaaccctctgcagagtccacctgcccaggtctgcctgaaggggaaacttcacatcttcaagtatttgtccacagaggccgggcagcgtgggtcggccctgggggacctggccccttctcggcccccgagtttcagtccctggtaagtcctaggtggggaggaaggaagccctgggatactgaatgccccttcccggccccaggcaccccctgctttctggcaggaggatggggggctgttgtccagcatcaggctgaccagatccgcctggctggccccagccctgcagaggatctatttccgggacatcggtacgatggtgggctggactcaggcttccacagcgttgatagtggcagcaagaggtggtctggaaatgaggtaagggcgtcctgtccatgggtgattgagggtgtcagccctgggagagcacctctgaactggggacctccaaattgcagggtgccaggcagaagctggagctgtcctcttccttccctctgcccagcatccagggaagggctggctcagcagagacctgagcttagtccacacaggacccccaggtcctgagcccccatgtacagagaggccatctcccatctctgcctctgcctttacagtcaacagatgaattttcagagctgtcattccggatctcagagctggcccgggagccccgggggcccagagaacgcaaggaggatggctcagcggacggagaccctgtgcagattgacttcatcgacagccatgtccccggggaggatgaagagcgaggcactgtggaggagcagcgaccacccgaattaagccctggggcaggggacagggagagggcaccaagcagcaggcgggaggagccggcaggggaggagcggcggcgcccggacaccttgcagctgtggcaggagcgggaacggcggcagcagcagcagagcggggcgtggggggccccgaggaaggatagcctcttgaagccagggctcagggctgttgtgggaggggccgccgccgtgtccactcaagccatgcacaacggctcgcctaagtccagtgcctcccaagcaggggctgcagcggggcagggagcccccgcccctgcccctgcctcccaagagccccttcccatagctggaccagcgacagcacctgctccacggccacttggctccattcagagaccaaacagcttcctcttccgttcctcctctcagagtggctcaggcccttcctcaccagactctgtcctgagacctcggcggtacccccaggttccagatgagaaggacttaatgactcagctgcgccaggtccttgagtcccggctgcagcggcccctgcctgaggacctggccgaggctctggccagtggggtcatcctgtgccagctggccaaccagctacggccgcgctccgtgcccttcatccatgtgccctcccctgctgtgccaaaactcagtgccctcaaggctcggaagaatgtggagagttttctagaagcctgtcgaaaaatgggggtgcctgaggctgacctgtgctcgccctcggatctcctccagggcactgcccgggggctgcggaccgcgctggaggccgtgaagcgggtggggggcaaggccctaccgcccctctggcccccctctggtctgggcggcttcgtcgtcttctacgtggtcctcatgctgctgctctatgtcacctacactcggctcctgggttcctaggccccaaaatcggccctccctcacccctttcccttcctctctatttataaggtccctgctccacccgaccccacctgcggtgccttcagccccaaccaaagacactagtgcacccccttcacagacactgacctcagaggccccactctggtgcccccagaccctgggcccccagcctctggcctccctccagtagccccacgagtccccacctctcagtgctgacggtgccttcatgtccccgccggccctgcccctgccctctgtaccccgtgaggggtggcaggagctggagtctcccccttcctcctgtgccctccccttccccccccaacagctgctatgggggggctaaattatctctattttgtagagaggatctatatttgtaggggttcggggcccaggccgggtccctatctctgtgtataaactgtacagaccgtggccgccctgcctgtgtgtgtgtgtgtgcgcgcgcgcgcgcgtctgctccgcgtgttggtggctgtggccatggctctgtgcccaccagcatctccctcctgagatgccggcctctcatgctcccggagcgtccgccaaccccccgtgtcacctcccttctgttatcgctgacagctttcttgcgtctcatttgtcgccgagccccgagcgcacggtgatgctcgggtctgcccccgaccccctgccacaggccggaagccgcagggggcaccgtggggaagctaacccggccccttcccccaggagtcactgtgccagccccaccacatcctggaagaggagggggccccgggaaggggcctcccctacatcgctgctgtcgtccacgccctgctggaccggccttaggggtgaaggtgggggcacagggcccaccccgcccgggaccccgggagcagaagacgcgcctgggctccgcgctctcagagaagcacgtggtgagggtggcctgggcctgggcacccttggcctgccggcctggctgcctctggggtcgagggtctgggtggaaggaccgcgggtgtcgcaggtgtcgtgtcagccgcaataaacagaagccagaagc

SEQ ID NO: 325484 - DNA, 3172 bp, Homo sapiens
tggagggaaggaaatcttatctcctagctgggagtgctggccagctagagactgtccttccacgcctccacccgcaggatctgtccaaccatgcaccctccaccctggtgtctgtggatggtgggcttccatttgcagcggatgtctgctctcagatgaaggcacaggctgcccctgccctgcccagcatgccccctgccctgcatgccccctgccctgcatgtcacctgtcctacacatcccctgccctgcaggccccatcttgtcctgcatgtcacctgtcctgcacatgccctgccctgcactcctcctgcactgcactccccctgcccagcacgtcagcatgtgggcgtggttctggccccagcacgtgagggcaggggtgggagggactgtcctgctgctgctgctgacgtctgtcccttgtccttgtccacctgctctcctctcccccaggctgacctgtgctcgccctcggatctcctccagggcactgcccgggggctgcggaccgcgctggaggccgtgaagcgggtggggggcaaggccctaccgcccctctggcccccctctggtctgggcggcttcgtcgtcttctacgtggtcctcatgctgctgctctatgtcacctacactcggctcctgggttcctaggccccaaaatcggccctccctcacccctttcccttcctctctatttataaggtccctgctccacccgaccccacctgcggtgccttcagccccaaccaaagacactagtgcacccccttcacagacactgacctcagaggccccactctggtgcccccagaccctgggcccccagcctctggcctccctccagtagccccacgagtccccacctctcagtgctgacggtgccttcatgtccccgccggccctgcccctgccctctgtaccccgtgaggggtggcaggagctggagtctcccccttcctcctgtgccctccccttccccccccaacagctgctatgggggggctaaattatctctattttgtagagaggatctatatttgtaggggttcggggcccaggccgggtccctatctctgtgtataaactgtacagaccgtggccgccctgcctgtgtgtgtgtgtgtgcgcgcgcgcgcgcgtctgctccgcgtgttggtggctgtggccatggctctgtgcccaccagcatctccctcctgagatgccggcctctcatgctcccggagcgtccgccaaccccccgtgtcacctcccttctgttatcgctgacagctttcttgcgtctcatttgtcgccgagccccgagcgcacggtgatgctcgggtctgcccccgaccccctgccacaggccggaagccgcagggggcaccgtggggaagctaacccggccccttcccccaggagtcactgtgccagccccaccacatcctggaagaggagggggccccgggaaggggcctcccctacatcgctgctgtcgtccacgccctgctggaccggccttaggggtgaaggtgggggcacagggcccaccccgcccgggaccccgggagcagaagacgcgcctgggctccgcgctctcagagaagcacgtggtgagggtggcctgggcctgggcacccttggcctgccggcctggctgcctctggggtcgagggtctgggtggaaggaccgcgggtgtcgcaggtgtcgtgtcagccgcaataaacagaagccagaagccctctgggtggccctcaggtgtaactgtgtctgagagcacgtgcgtcgcggggttgttgggggggcctctgtttccggaattcaccgcccagtcgccagggggcgcccgcgggagcccggcgggggcacgcgccacgtggccgggagacgcacagggcgccagcgtcgccgcgaggcctctggggtgggttcgccaggagggcacgttcgcgccgcgccgcggagggaggctgagagggccgggccgggcggcggggacacggcggtaccgtcctgcgctcgggaacgcggaatgttgccctggtcgccgccgcggtggggcgcgggcccggaggaggcgcccgagggaccaggccttccggcgggcaaggaccagggcgagccctggagcgccggagcggacgcccccagggagctggggacacccccatgggacaggtgaggggctcggacggagccgtggggggacagagactgggggcctccatgcgttcaccacgcgctctacggaggcttctccattgtccctgctggagattgggtccctcggtctcccttgcaccaggcacccttgggctccaggggagggtgcgtgggggcggtgtggctgcagcctcagtccctgcccctccagcccacagcccccatcccgtagcccttcctggatctggagagagcagctgctgctgccccaccacctgccaggcccggccactgagcagccccccggagccccagatccccgttccccccaggtggcctgggaggtggccccctcgaggatgactccactagcgccctgggaccccaagtatgaagccaaagcaggacctcggccggtgtggggggccaactgtagctcaggagcctcgttctcaggccggacgctgtgtcacccctcattctggccgctgtatgaagcagcctcgggcaggggtctcaggcccgtggcccctgccacagggcactggaatggacagcaggcgcccccagatgcagggttcccggtggtgtgctgtgaagatgtcttcctctcggaccctctgctgccccgggggcagcgtgttcccctgtacctgtccaaggccccccagcagatgatgggctccctgaaactgctgccgccgccccccatcatgtctgccagggtgctcccccgcccatcaccctcccggggcccctccactgcctggctcagcgggccggagctgatcgctctcactggcctgctgcagatgagccagggggagcctaggcccagctcctccgcggttggccccccagaccatacctctgacccacccagcccctgtggtagccccagcagttctcagggtgctgacctctctctcccacagaccccagacacccattgtccatagccttctcagggcagagtgggctggttgtgttgacaataaaacagtgttggtttgcaaaaaaaac

SEQ ID NO: 325485 - DNA, 2772 bp, Homo sapiens
ggacgcgtgggtcgacccacgcgtcggaagcctgtcgaaaaatgggggtgcctgaggctgacctgtgctcgccctcggatctcctccagggcactgcccgggggctgcggaccgcgctggaggccgtgaagcgggtggggggcaaggccctaccgcccctctggcccccctctggtctgggcggcttcgtcgtcttctacgtggtcctcatgctgctgctctatgtcacctacactcggctcctgggttcctaggccccaaaatcggccctccctcacccctttcccttcctctctatttataaggtccctgctccacccgaccccacctgcggtgccttcagccccaaccaaagacactagtgcacccccttcacagacactgacctcagaggccccactctggtgcccccagaccctgggcccccagcctctggcctccctccagtagccccacgagtccccacctctcagtgctgacggtgccttcatgtccccgccggccctgcccctgccctctgtaccccgtgaggggtggcaggagctggagtctcccccttcctcctgtgccctccccttccccccccaacagctgctatgggggggctaaattatctctattttgtagagaggatctatatttgtaggggttcggggcccaggccgggtccctatctctgtgtataaactgtacagaccgtggccgccctgcctgtgtgtgtgtgtgtgcgcgcgcgcgcgcgtctgctccgcgtgttggtggctgtggccatggctctgtgcccaccagcatctccctcctgagatgccggcctctcatgctcccggagcgtccgccaaccccccgtgtcacctcccttctgttatcgctgacagctttcttgcgtctcatttgtcgccgagccccgagcgcacggtgatgctcgggtctgcccccgaccccctgccacaggccggaagccgcagggggcaccgtggggaagctaacccggccccttcccccaggagtcactgtgccagccccaccacatcctggaagaggagggggccccgggaaggggcctcccctacatcgctgctgtcgtccacgccctgctggaccggccttaggggtgaaggtgggggcacagggcccaccccgcccgggaccccgggagcagaagacgcgcctgggctccgcgctctcagagaagcacgtggtgagggtggcctgggcctgggcacccttggcctgccggcctggctgcctctggggtcgagggtctgggtggaaggaccgcgggtgtcgcaggtgtcgtgtcagccgcaataaacagaagccagaagccctctgggtggccctcaggtgtaactgtgtctgagagcacgtgcgtcgcggggttgttgggggggcctctgtttccggaattcaccgcccagtcgccagggggcgcccgcgggagcccggcgggggcacgcgccacgtggccgggagacgcacagggcgccagcgtcgccgcgaggcctctggggtgggttcgccaggagggcacgttcgcgccgcgccgcggagggaggctgagagggccgggccgggcggcggggacacggcggtaccgtcctgcgctcgggaacgcggaatgttgccctggtcgccgccgcggtggggcgcgggcccggaggaggcgcccgagggaccaggccttccggcgggcaaggaccagggcgagccctggagcgccggagcggacgcccccagggagctggggacacccccatgggacaggtgaggggctcggacggagccgtggggggacagagactgggggcctccatgcgttcaccacgcgctctacggaggcttctccattgtccctgctggagattgggtccctcggtctcccttgcaccaggcacccttgggctccaggggagggtgcgtgggggcggtgtggctgcagcctcagtccctgcccctccagcccacagcccccatcccgtagcccttcctggatctggagagagcagctgctgctgccccaccacctgccaggcccggccactgagcagccccccggagccccagatccccgttccccccaggtggcctgggaggtggccccctcgaggatgactccactagcgccctgggaccccaagtatgaagccaaagcaggacctcggccggtgtggggggccaactgtagctcaggagcctcgttctcaggccggacgctgtgtcacccctcattctggccgctgtatgaagcagcctcgggcaggggtctcaggcccgtggcccctgccacagggcactggaatggacagcaggcgcccccagatgcagggttcccggtggtgtgctgtgaagatgtcttcctctcggaccctctgctgccccgggggcagcgtgttcccctgtacctgtccaaggccccccagcagatgatgggctccctgaaactgctgccgccgccccccatcatgtctgccagggtgctcccccgcccatcaccctcccggggcccctccactgcctggctcagcgggccggagctgatcgctctcactggcctgctgcagatgagccagggggagcctaggcccagctcctccgcggttggccccccagaccatacctctgacccacccagcccctgtggtagccccagcagttctcagggtgctgacctctctctcccacagaccccagacacccattgtccatagccttctcagggcagagtgggctggttgtgttgacaataaaacagtgttggtttgcaaaaaaaac

SEQ ID NO: 325486 - DNA, 3737 bp, Homo sapiens
taaggctaggtatgaggccgggtggttaatcaggcagagggagatacctgaaccttagcctgggtgaatctcacagacctcacctacctcaacctcagccgaaaccagctgtcgctgctgccaccctacatctgccagctgcccctgagggtcctcatcgtcagcaacaacaagctgggagccctgccccctgacatcggcaccctgggaagcctgcgacagcttgacgtgagcagcaacgagctccaatccctgccctcggaactgtgtggcctctcttccctgcgggacctcaatgtccggaggaaccagctcagtacgctgcccgaagagctgggggacctccctctggtccgcctggatttctcctgtaaccgcgtctcccgaatcccagtctccttctgccgcctgaggcacctgcaggtcattctgctggacagcaaccctctgcagagtccacctgcccaggtctgcctgaaggggaaacttcacatcttcaagtatttgtccacagaggccgggcagcgtgggtcggccctgggggacctggccccttctcggcccccgagtttcagtccctggtaagtcctaggtggggaggaaggaagccctgggatactgaatgccccttcccggccccaggcaccccctgctttctggcaggaggatggggggctgttgtccagcatcaggctgaccagatccgcctggctggccccagccctgcagaggatctatttccgggacatcggtacgatggtgggctggactcaggcttccacagcgttgatagtggcagcaagaggtggtctggaaatgaggtaagggcgtcctgtccatgggtgattgagggtgtcagccctgggagagcacctctgaactggggacctccaaattgcagggtgccaggcagaagctggagctgtcctcttccttccctctgcccagcatccagggaagggctggctcagcagagacctgagcttagtccacacaggacccccaggtcctgagcccccatgtacagagaggccatctcccatctctgcctctgcctttacagtcaacagatgaattttcagagctgtcattccggatctcagagctggcccgggagccccgggggcccagagaacgcaaggaggatggctcagcggacggagaccctgtgcagattgacttcatcgacagccatgtccccggggaggatgaagagcgaggcactgtggaggagcagcgaccacccgaattaagccctggggcaggggacagggagagggcaccaagcagcaggcgggaggagccggcaggggaggagcggcggcgcccggacaccttgcagctgtggcaggagcgggaacggcggcagcagcagcagagcggggcgtggggggccccgaggaaggatagcctcttgaagccagggctcagggctgttgtgggaggggccgccgccgtgtccactcaagccatgcacaacggctcgcctaagtccagtgcctcccaagcaggggctgcagcggggcagggagcccccgcccctgcccctgcctcccaagagccccttcccatagctggaccagcgacagcacctgctccacggccacttggctccattcagagaccaaacagcttcctcttccgttcctcctctcagagtggctcaggcccttcctcaccagactctgtcctgagacctcggcggtacccccaggttccagatgagaaggacttaatgactcagctgcgccaggtccttgagtcccggctgcagcggcccctgcctgaggacctggccgaggctctggccagtggggtcatcctgtgccagctggccaaccagctacggccgcgctccgtgcccttcatccatgtgccctcccctgctgtgccaaaactcagtgccctcaaggctcggaagaatgtggagagttttctagaagcctgtcgaaaaatgggggtgcctgaggagtcactgtgccagccccaccacatcctggaagaggagggggccccgggaaggggcctcccctacatcgctgctgtcgtccacgccctgctggaccggccttaggggtgaaggtgggggcacagggcccaccccgcccgggaccccgggagcagaagacgcgcctgggctccgcgctctcagagaagcacgtggtgagggtggcctgggcctgggcacccttggcctgccggcctggctgcctctggggtcgagggtctgggtggaaggaccgcgggtgtcgcaggtgtcgtgtcagccgcaataaacagaagccagaagccctctgggtggccctcaggtgtaactgtgtctgagagcacgtgcgtcgcggggttgttgggggggcctctgtttccggaattcaccgcccagtcgccagggggcgcccgcgggagcccggcgggggcacgcgccacgtggccgggagacgcacagggcgccagcgtcgccgcgaggcctctggggtgggttcgccaggagggcacgttcgcgccgcgccgcggagggaggctgagagggccgggccgggcggcggggacacggcggtaccgtcctgcgctcgggaacgcggaatgttgccctggtcgccgccgcggtggggcgcgggcccggaggaggcgcccgagggaccaggccttccggcgggcaaggaccagggcgagccctggagcgccggagcggacgcccccagggagctggggacacccccatgggacaggtgaggggctcggacggagccgtggggggacagagactgggggcctccatgcgttcaccacgcgctctacggaggcttctccattgtccctgctggagattgggtccctcggtctcccttgcaccaggcacccttgggctccaggggagggtgcgtgggggcggtgtggctgcagcctcagtccctgcccctccagcccacagcccccatcccgtagcccttcctggatctggagagagcagctgctgctgccccaccacctgccaggcccggccactgagcagccccccggagccccagatccccgttccccccaggtggcctgggaggtggccccctcgaggatgactccactagcgccctgggaccccaagtatgaagccaaagcaggacctcggccggtgtggggggccaactgtagctcaggagcctcgttctcaggccggacgctgtgtcacccctcattctggccgctgtatgaagcagcctcgggcaggggtctcaggcccgtggcccctgccacagggcactggaatggacagcaggcgcccccagatgcagggttcccggtggtgtgctgtgaagatgtcttcctctcggaccctctgctgccccgggggcagcgtgttcccctgtacctgtccaaggccccccagcagatgatgggctccctgaaactgctgccgccgccccccatcatgtctgccagggtgctcccccgcccatcaccctcccggggcccctccactgcctggctcagcgggccggagctgatcgctctcactggcctgctgcagatgagccagggggagcctaggcccagctcctccgcggttggccccccagaccatacctctgacccacccagcccctgtggtagccccagcagttctcagggtgctgacctctctctcccacagaccccagacacccattgtccatagccttctcagggcagagtgggctggttgtgttgacaataaaacagtgttggtttgcaaaaaaaac

SEQ ID NO: 325487 - DNA, 3870 bp, Homo sapiens
  misc_feature (1838)..(1838): n is a, c, g, or t
  misc_feature (1867)..(1867): n is a, c, g, or t
taaggctaggtatgaggccgggtggttaatcaggcagagggagatacctgaaccttagcctgggtgaatctcacagacctcacctacctcaacctcagccgaaaccagctgtcgctgctgccaccctacatctgccagctgcccctgagggtcctcatcgtcagcaacaacaagctgggagccctgccccctgacatcggcaccctgggaagcctgcgacagcttgacgtgagcagcaacgagctccaatccctgccctcggaactgtgtggcctctcttccctgcgggacctcaatgtccggaggaaccagctcagtacgctgcccgaagagctgggggacctccctctggtccgcctggatttctcctgtaaccgcgtctcccgaatcccagtctccttctgccgcctgaggcacctgcaggtcattctgctggacagcaaccctctgcagagtccacctgcccaggtctgcctgaaggggaaacttcacatcttcaagtatttgtccacagaggccgggcagcgtgggtcggccctgggggacctggccccttctcggcccccgagtttcagtccctggtaagtcctaggtggggaggaaggaagccctgggatactgaatgccccttcccggccccaggcaccccctgctttctggcaggaggatggggggctgttgtccagcatcaggctgaccagatccgcctggctggccccagccctgcagaggatctatttccgggacatcggtacgatggtgggctggactcaggcttccacagcgttgatagtggcagcaagaggtggtctggaaatgaggtaagggcgtcctgtccatgggtgattgagggtgtcagccctgggagagcacctctgaactggggacctccaaattgcagggtgccaggcagaagctggagctgtcctcttccttccctctgcccagcatccagggaagggctggctcagcagagacctgagcttagtccacacaggacccccaggtcctgagcccccatgtacagagaggccatctcccatctctgcctctgcctttacagtcaacagatgaattttcagagctgtcattccggatctcagagctggcccgggagccccgggggcccagagaacgcaaggaggatggctcagcggacggagaccctgtgcagattgacttcatcgacagccatgtccccggggaggatgaagagcgaggcactgtggaggagcagcgaccacccgaattaagccctggggcaggggacagggagagggcaccaagcagcaggcgggaggagccggcaggggaggagcggcggcgcccggacaccttgcagctgtggcaggagcgggaacggcggcagcagcagcagagcggggcgtggggggccccgaggaaggatagcctcttgaagccagggctcagggctgttgtgggaggggccgccgccgtgtccactcaagccatgcacaacggctcgcctaagtccagtgcctcccaagcaggggctgcagcggggcagggagcccccgcccctgcccctgcctcccaagagccccttcccatagctggaccaggtgggacagggattttgggaggaggatggggcctgtgttggtgagggctggttgggagagagggacacagaggggatgcctgtctcacctgcccctgtcgctgtgtccctggttccggccccagcgacagcacctgctccacggccacttggctccattcagagaccaaacagcttcctcttccgttcctcctctcagagtggctcagccccttcctcagccagacctctgtctctgagaccctcgggcggtacnccgccacggttgccagagtgaggaaggancttaatgagcgtgaggtgcgtccttgagtcccggctgcagcggcccctgcctgaggacctggccgaggctctggccagtggggtcatcctgtgccagctggccaaccagctacggccgcgctccgtgcccttcatccatgtgccctcccctgctgtgccaaaactcagtgccctcaaggctcggaagaatgtggagagttttctagaagcctgtcgaaaaatgggggtgcctgaggagtcactgtgccagccccaccacatcctggaagaggagggggccccgggaaggggcctcccctacatcgctgctgtcgtccacgccctgctggaccggccttaggggtgaaggtgggggcacagggcccaccccgcccgggaccccgggagcagaagacgcgcctgggctccgcgctctcagagaagcacgtggtgagggtggcctgggcctgggcacccttggcctgccggcctggctgcctctggggtcgagggtctgggtggaaggaccgcgggtgtcgcaggtgtcgtgtcagccgcaataaacagaagccagaagccctctgggtggccctcaggtgtaactgtgtctgagagcacgtgcgtcgcggggttgttgggggggcctctgtttccggaattcaccgcccagtcgccagggggcgcccgcgggagcccggcgggggcacgcgccacgtggccgggagacgcacagggcgccagcgtcgccgcgaggcctctggggtgggttcgccaggagggcacgttcgcgccgcgccgcggagggaggctgagagggccgggccgggcggcggggacacggcggtaccgtcctgcgctcgggaacgcggaatgttgccctggtcgccgccgcggtggggcgcgggcccggaggaggcgcccgagggaccaggccttccggcgggcaaggaccagggcgagccctggagcgccggagcggacgcccccagggagctggggacacccccatgggacaggtgaggggctcggacggagccgtggggggacagagactgggggcctccatgcgttcaccacgcgctctacggaggcttctccattgtccctgctggagattgggtccctcggtctcccttgcaccaggcacccttgggctccaggggagggtgcgtgggggcggtgtggctgcagcctcagtccctgcccctccagcccacagcccccatcccgtagcccttcctggatctggagagagcagctgctgctgccccaccacctgccaggcccggccactgagcagccccccggagccccagatccccgttccccccaggtggcctgggaggtggccccctcgaggatgactccactagcgccctgggaccccaagtatgaagccaaagcaggacctcggccggtgtggggggccaactgtagctcaggagcctcgttctcaggccggacgctgtgtcacccctcattctggccgctgtatgaagcagcctcgggcaggggtctcaggcccgtggcccctgccacagggcactggaatggacagcaggcgcccccagatgcagggttcccggtggtgtgctgtgaagatgtcttcctctcggaccctctgctgccccgggggcagcgtgttcccctgtacctgtccaaggccccccagcagatgatgggctccctgaaactgctgccgccgccccccatcatgtctgccagggtgctcccccgcccatcaccctcccggggcccctccactgcctggctcagcgggccggagctgatcgctctcactggcctgctgcagatgagccagggggagcctaggcccagctcctccgcggttggccccccagaccatacctctgacccacccagcccctgtggtagccccagcagttctcagggtgctgacctctctctcccacagaccccagacacccattgtccatagccttctcagggcagagtgggctggttgtgttgacaataaaacagtgttggtttgcaaaaaaaac

SEQ ID NO: 325488 - DNA, 2016 bp, Homo sapiens
ccatctgtacgttctgtctcctggctactcgcgctgcttcttgtcctagccctggatatcatggggctggtgccgtccaaaccgttccgttatccaggctattttgaccacgctatgctccaggccacggtcaacttgtcgccgagccccgagcgcacggtgatgctcgggtctgcccccgaccccctgccacaggccggaagccgcagggggcaccgtggggaagctaacccggccccttcccccaggagtcactgtgccagccccaccacatcctggaagaggagggggccccgggaaggggcctcccctacatcgctgctgtcgtccacgccctgctggaccggccttaggggtgaaggtgggggcacagggcccaccccgcccgggaccccgggagcagaagacgcgcctgggctccgcgctctcagagaagcacgtggtgagggtggcctgggcctgggcacccttggcctgccggcctggctgcctctggggtcgagggtctgggtggaaggaccgcgggtgtcgcaggtgtcgtgtcagccgcaataaacagaagccagaagccctctgggtggccctcaggtgtaactgtgtctgagagcacgtgcgtcgcggggttgttgggggggcctctgtttccggaattcaccgcccagtcgccagggggcgcccgcgggagcccggcgggggcacgcgccacgtggccgggagacgcacagggcgccagcgtcgccgcgaggcctctggggtgggttcgccaggagggcacgttcgcgccgcgccgcggagggaggctgagagggccgggccgggcggcggggacacggcggtaccgtcctgcgctcgggaacgcggaatgttgccctggtcgccgccgcggtggggcgcgggcccggaggaggcgcccgagggaccaggccttccggcgggcaaggaccagggcgagccctggagcgccggagcggacgcccccagggagctggggacacccccatgggacaggtgaggggctcggacggagccgtggggggacagagactgggggcctccatgcgttcaccacgcgctctacggaggcttctccattgtccctgctggagattgggtccctcggtctcccttgcaccaggcacccttgggctccaggggagggtgcgtgggggcggtgtggctgcagcctcagtccctgcccctccagcccacagcccccatcccgtagcccttcctggatctggagagagcagctgctgctgccccaccacctgccaggcccggccactgagcagccccccggagccccagatccccgttccccccaggtggcctgggaggtggccccctcgaggatgactccactagcgccctgggaccccaagtatgaagccaaagcaggacctcggccggtgtggggggccaactgtagctcaggagcctcgttctcaggccggacgctgtgtcacccctcattctggccgctgtatgaagcagcctcgggcaggggtctcaggcccgtggcccctgccacagggcactggaatggacagcaggcgcccccagatgcagggttcccggtggtgtgctgtgaagatgtcttcctctcggaccctctgctgccccgggggcagcgtgttcccctgtacctgtccaaggccccccagcagatgatgggctccctgaaactgctgccgccgccccccatcatgtctgccagggtgctcccccgcccatcaccctcccggggcccctccactgcctggctcagcgggccggagctgatcgctctcactggcctgctgcagatgagccagggggagcctaggcccagctcctccgcggttggccccccagaccatacctctgacccacccagcccctgtggtagccccagcagttctcagggtgctgacctctctctcccacagaccccagacacccattgtccatagccttctcagggcagagtgggctggttgtgttgacaataaaacagtgttggtttgcaaaaaaaac

SEQ ID NO: 325489 - DNA, 3023 bp, Homo sapiens
cggagctccacccccactgacgggttctgattggccgcttctgacgcgtctcggggccacgattggtccgtccggtcccggacaccgctccctcccccttgaggcaactacggcggctccaaggagggggtgggggaaggagggacggccggtcccgtcagtcaggcagcgggagccgccgggagcggatggcggcggccgtagcggctccactcgccgccgggggtgaggaggcggcagccacgacctccgtgcccgggtctccaggtctgccggggagacgcagtgcagagcgggccctagaggaggccgtggccaccgggaccctgaacctgtctaaccggcgcttgaagcacttcccccggggcgcggcccgtagctacgacctgtcagacatcacccaggctgacctgtcccggaaccggtttcccgaggtgcccgaggcggcgtgccagctggtgtccctggagggcctgagcctctaccacaattgcctgagatgcctgaacccagccttggggaatctcacagccctcacctacctcaacctcagccgaaaccagctgtcgctgctgccaccctacatctgccagctgcccctgagggtcctcatcgtcagcaacaacaagctgggagccctgccccctgacatcggcaccctgggaagcctgcgacagcttgacgtgagcagcaacgagctccaatccctgccctcggaactgtgtggcctctcttccctgcgggacctcaatgtccggaggaaccagctcagtacgctgcccgaagagctgggggacctccctctggtccgcctggatttctcctgtaaccgcgtctcccgaatcccagtctccttctgccgcctgaggcacctgcaggtcattctgctggacagcaaccctctgcagagtccacctgcccaggtctgcctgaaggggaaacttcacatcttcaagtatttgtccacagaggccgggcagcgtgggtcggccctgggggacctggccccttctcggcccccgagtttcagtccctgccctgcagaggatctatttccgggacatcggtacgatggtgggctggactcaggcttccacagcgttgatagtggcagcaagaggtggtctggaaatgagtcaacagatgaattttcagagctgtcattccggatctcagagctggcccgggagccccgggggcccagagaacgcaaggaggatggctcagcggacggagaccctgtgcagattgacttcatcgacagccatgtccccggggaggatgaagagcgaggcactgtggaggagcagcgaccacccgaattaagccctggggcaggggacagggagagggcaccaagcagcaggcgggaggagccggcaggggaggagcggcggcgcccggacaccttgcagctgtggcaggagcgggaacggcggcagcagcagcagagcggggcgtggggggccccgaggaaggatagcctcttgaagccagggctcagggctgttgtgggaggggccgccgccgtgtccactcaagccatgcacaacggctcgcctaagtccagtgcctcccaagcaggggctgcagcggggcagggagcccccgcccctgcccctgcctcccaagagccccttcccatagctggaccagcgacagcacctgctccacggccacttggctccattcagagaccaaacagcttcctcttccgttcctcctctcagagtggctcaggcccttcctcaccagactctgtcctgagacctcggcggtacccccaggttccagatgagaaggacttaatgactcagctgcgccaggtccttgagtcccggctgcagcggcccctgcctgaggacctggccgaggctctggccagtggggtcatcctgtgccagctggccaaccagctacggccgcgctccgtgcccttcatccatgtgccctcccctgctgtgccaaaactcagtgccctcaaggctcggaagaatgtggagagttttctagaagcctgtcgaaaaatgggggtgcctgaggctgacctgtgctcgccctcggatctcctccagggcactgcccgggggctgcggaccgcgctggaggccgtgaagcgggtggggggcaaggccctaccgcccctctggcccccctctggtctgggcggcttcgtcgtcttctacgtggtcctcatgctgctgctctatgtcacctacactcatccccgttccccccaggtggcctgggaggtggccccctcgaggatgactccactagcgccctgggaccccaagtatgaagccaaagcaggacctcggccggtgtgggtgagttgggggcaaacctgtgggactggctggggtgctcagggagctgtgcggtggcctgaggctccagtgctctgtcctcctcaccctagggggccaactgtagctcaggagcctcgttctcaggccggacgctgtgtcacccctcattctggccgctgtatgaagcagcctcgggcaggggtctcaggcccgtggcccctgccacagggcactggaatggacagcaggcgcccccagatgcagggttcccggtggtgtgctgtgaagatgtcttcctctcggaccctctgctgccccgggggcagcgtgttcccctgtacctgtccaaggccccccagcagatgatgggctccctgaaactgctgccgccgccccccatcatgtctgccagggtgctcccccgcccatcaccctcccggggcccctccactgcctggctcagcgggccggagctgatcgctctcactggcctgctgcagatgagccagggggagcctaggcccagctcctccgcggttggccccccagaccatacctctgacccacccagcccctgtggtagccccagcagttctcagggtgctgacctctctctcccacagaccccagacacccattgtccatagccttctcagggcagagtgggctggttgtgttgacaataaaacagtgttggtttgcaaaaaaaac

SEQ ID NO: 325490 - DNA, 4809 bp, Homo sapiens
taaggctaggtatgaggccgggtggttaatcaggcagagggagatacctgaaccttagcctgggtgaatctcacagacctcacctacctcaacctcagccgaaaccagctgtcgctgctgccaccctacatctgccagctgcccctgagggtcctcatcgtcagcaacaacaagctgggagccctgccccctgacatcggcaccctgggaagcctgcgacagcttgacgtgagcagcaacgagctccaatccctgccctcggaactgtgtggcctctcttccctgcgggacctcaatgtccggaggaaccagctcagtacgctgcccgaagagctgggggacctccctctggtccgcctggatttctcctgtaaccgcgtctcccgaatcccagtctccttctgccgcctgaggcacctgcaggtcattctgctggacagcaaccctctgcagagtccacctgcccaggtctgcctgaaggggaaacttcacatcttcaagtatttgtccacagaggccgggcagcgtgggtcggccctgggggacctggccccttctcggcccccgagtttcagtccctggtaagtcctaggtggggaggaaggaagccctgggatactgaatgccccttcccggccccaggcaccccctgctttctggcaggaggatggggggctgttgtccagcatcaggctgaccagatccgcctggctggccccagccctgcagaggatctatttccgggacatcggtacgatggtgggctggactcaggcttccacagcgttgatagtggcagcaagaggtggtctggaaatgaggtaagggcgtcctgtccatgggtgattgagggtgtcagccctgggagagcacctctgaactggggacctccaaattgcagggtgccaggcagaagctggagctgtcctcttccttccctctgcccagcatccagggaagggctggctcagcagagacctgagcttagtccacacaggacccccaggtcctgagcccccatgtacagagaggccatctcccatctctgcctctgcctttacagtcaacagatgaattttcagagctgtcattccggatctcagagctggcccgggagccccgggggcccagagaacgcaaggaggatggctcagcggacggagaccctgtgcagattgacttcatcgacagccatgtccccggggaggatgaagagcgaggcactgtggaggagcagcgaccacccgaattaagccctggggcaggggacagggagagggcaccaagcagcaggcgggaggagccggcaggggaggagcggcggcgcccggacaccttgcagctgtggcaggagcgggaacggcggcagcagcagcagagcggggcgtggggggccccgaggaaggatagcctcttgaagccagggctcagggctgttgtgggaggggccgccgccgtgtccactcaagccatgcacaacggctcgcctaagtccagtgcctcccaagcaggggctgcagcggggcagggagcccccgcccctgcccctgcctcccaagagccccttcccatagctggaccaggtgggacagggattttgggaggaggatggggcctgtgttggtgagggctggttgggagagagggacacagaggggatgcctgtctcacctgcccctgtcgctgtgtccctggttccggccccagcgacagcacctgctccacggccacttggctccattcagagaccaaacagcttcctcttccgttcctcctctcagagtggctcaggcccttcctcaccagactctgtcctgagacctcggcggtacccccaggttccagatgagaaggacttaatgactcagctgcgccaggtccttgagtcccggctgcagcggcccctgcctgaggacctggccgaggctctggccagtggggtcatcctgtgccagctggccaaccagctacggccgcgctccgtgcccttcatccatgtgccctcccctgctgtgccaaaactcagtgccctcaaggctcggaagaatgtggagagttttctagaagcctgtcgaaaaatgggggtgcctgaggctgacctgtgctcgccctcggatctcctccagggcactgcccgggggctgcggaccgcgctggaggccgtgaagcgggtggggggcaaggccctaccgcccctctggcccccctctggtctgggcggcttcgtcgtcttctacgtggtcctcatgctgctgctctatgtcacctacactcggctcctgggttcctaggccccaaaatcggccctccctcacccctttcccttcctctctatttataaggtccctgctccacccgaccccacctgcggtgccttcagccccaaccaaagacactagtgcacccccttcacagacactgacctcagaggccccactctggtgcccccagaccctgggcccccagcctctggcctccctccagtagccccacgagtccccacctctcagtgctgacggtgccttcatgtccccgccggccctgcccctgccctctgtaccccgtgaggggtggcaggagctggagtctcccccttcctcctgtgccctccccttccccccccaacagctgctatgggggggctaaattatctctattttgtagagaggatctatatttgtaggggttcggggcccaggccgggtccctatctctgtgtataaactgtacagaccgtggccgccctgcctgtgtgtgtgtgtgtgcgcgcgcgcgcgcgtctgctccgcgtgttggtggctgtggccatggctctgtgcccaccagcatctccctcctgagatgccggcctctcatgctcccggagcgtccgccaaccccccgtgtcacctcccttctgttatcgctgacagctttcttgcgtctcatttgtcgccgagccccgagcgcacggtgatgctcgggtctgcccccgaccccctgccacaggccggaagccgcagggggcaccgtggggaagctaacccggccccttcccccaggagtcactgtgccagccccaccacatcctggaagaggagggggccccgggaaggggcctcccctacatcgctgctgtcgtccacgccctgctggaccggccttaggggtgaaggtgggggcacagggcccaccccgcccgggaccccgggagcagaagacgcgcctgggctccgcgctctcagagaagcacgtggtgagggtggcctgggcctgggcacccttggcctgccggcctggctgcctctggggtcgagggtctgggtggaaggaccgcgggtgtcgcaggtgtcgtgtcagccgcaataaacagaagccagaagccctctgggtggccctcaggtgtaactgtgtctgagagcacgtgcgtcgcggggttgttgggggggcctctgtttccggaattcaccgcccagtcgccagggggcgcccgcgggagcccggcgggggcacgcgccacgtggccgggagacgcacagggcgccagcgtcgccgcgaggcctctggggtgggttcgccaggagggcacgttcgcgccgcgccgcggagggaggctgagagggccgggccgggcggcggggacacggcggtaccgtcctgcgctcgggaacgcggaatgttgccctggtcgccgccgcggtggggcgcgggcccggaggaggcgcccgagggaccaggccttccggcgggcaaggaccagggcgagccctggagcgccggagcggacgcccccagggagctggggacacccccatgggacaggtgaggggctcggacggagccgtggggggacagagactgggggcctccatgcgttcaccacgcgctctacggaggcttctccattgtccctgctggagattgggtccctcggtctcccttgcaccaggcacccttgggctccaggggagggtgcgtgggggcggtgtggctgcagcctcagtccctgcccctccagcccacagcccccatcccgtagcccttcctggatctggagagagcagctgctgctgccccaccacctgccaggcccggccactgagcagccccccggagccccagatccccgttccccccaggtggcctgggaggtggccccctcgaggatgactccactagcgccctgggaccccaagtatgaagccaaagcaggacctcggccggtgtggggggccaactgtagctcaggagcctcgttctcaggccggacgctgtgtcacccctcattctggccgctgtatgaagcagcctcgggcaggggtctcaggcccgtggcccctgccacagggcactggaatggacagcaggcgcccccagatgcagggttcccggtggtgtgctgtgaagatgtcttcctctcggaccctctgctgccccgggggcagcgtgttcccctgtacctgtccaaggccccccagcagatgatgggctccctgaaactgctgccgccgccccccatcatgtctgccagggtgctcccccgcccatcaccctcccggggcccctccactgcctggctcagcgggccggagctgatcgctctcactggcctgctgcagatgagccagggggagcctaggcccagctcctccgcggttggccccccagaccatacctctgacccacccagcccctgtggtagccccagcagttctcagggtgctgacctctctctcccacagaccccagacacccattgtccatagccttctcagggcagagtgggctggttgtgttgacaataaaacagtgttggtttgcaaaaaaaac

SEQ ID NO: 325491 - DNA, 4885 bp, Homo sapiens
taaggctaggtatgaggccgggtggttaatcaggcagagggagatacctgaaccttagcctgggtgaatctcacagacctcacctacctcaacctcagccgaaaccagctgtcgctgctgccaccctacatctgccagctgcccctgagggtcctcatcgtcagcaacaacaagctgggagccctgccccctgacatcggcaccctgggaagcctgcgacagcttgacgtgagcagcaacgagctccaatccctgccctcggaactgtgtggcctctcttccctgcgggacctcaatgtccggaggaaccagctcagtacgctgcccgaagagctgggggacctccctctggtccgcctggatttctcctgtaaccgcgtctcccgaatcccagtctccttctgccgcctgaggcacctgcaggtcattctgctggacagcaaccctctgcagagtccacctgcccaggtctgcctgaaggggaaacttcacatcttcaagtatttgtccacagaggccgggcagcgtgggtcggccctgggggacctggccccttctcggcccccgagtttcagtccctggtaagtcctaggtggggaggaaggaagccctgggatactgaatgccccttcccggccccaggcaccccctgctttctggcaggaggatggggggctgttgtccagcatcaggctgaccagatccgcctggctggccccagccctgcagaggatctatttccgggacatcggtacgatggtgggctggactcaggcttccacagcgttgatagtggcagcaagaggtggtctggaaatgaggtaagggcgtcctgtccatgggtgattgagggtgtcagccctgggagagcacctctgaactggggacctccaaattgcagggtgccaggcagaagctggagctgtcctcttccttccctctgcccagcatccagggaagggctggctcagcagagacctgagcttagtccacacaggacccccaggtcctgagcccccatgtacagagaggccatctcccatctctgcctctgcctttacagtcaacagatgaattttcagagctgtcattccggatctcagagctggcccgggagccccgggggcccagagaacgcaaggaggatggctcagcggacggagaccctgtgcagattgacttcatcgacagccatgtccccggggaggatgaagagcgaggcactgtggaggagcagcgaccacccgaattaagccctggggcaggggacagggagagggcaccaagcagcaggcgggaggagccggcaggggaggagcggcggcgcccggacaccttgcagctgtggcaggagcgggaacggcggcagcagcagcagagcggggcgtggggggccccgaggaaggatagcctcttgaagccagggctcagggctgttgtgggaggggccgccgccgtgtccactcaagccatgcacaacggctcgcctaagtccagtgcctcccaagcaggggctgcagcggggcagggagcccccgcccctgcccctgcctcccaagagccccttcccatagctggaccagcgacagcacctgctccacggccacttggctccattcagagaccaaacagcttcctcttccgttcctcctctcagagtggctcaggcccttcctcaccagactctgtcctgagacctcggcggtacccccaggttccagatgagaaggacttaatgactcagctgcgccaggtccttgagtcccggctgcagcggcccctgcctgaggacctggccgaggctctggccagtggggtcatcctgtgccagctggccaaccagctacggccgcgctccgtgcccttcatccatgtgccctcccctgctgtgccaaaactcagtgccctcaaggctcggaagaatgtggagagttttctagaagcctgtcgaaaaatgggggtgcctgaggctgacctgtgctcgccctcggatctcctccagggcactgcccgggggctgcggaccgcgctggaggccgtgaagcgggtggggggcaaggccctaccgcccctctggcccccctctggtctgggcggcttcgtcgtcttctacgtggtcctcatgctgctgctctatgtcacctacactcggctcctgggttcctaggccccaaaatcggccctccctcacccctttcccttcctctctatttataaggtccctgctccacccgaccccacctgcggtgccttcagccccaaccaaagacactagtgcacccccttcacagacactgacctcagaggccccactctggtgcccccagaccctgggcccccagcctctggcctccctccagtagccccacgagtccccacctctcagtgctgacggtgccttcatgtccccgccggccctgcccctgccctctgtaccccgtgaggggtggcaggagctggagtctcccccttcctcctgtgccctccccttccccccccaacagctgctatgggggggctaaattatctctattttgtagagaggatctatatttgtaggggttcggggcccaggccgggtccctatctctgtgtataaactgtacagaccgtggccgccctgcctgtgtgtgtgtgtgtgcgcgcgcgcgcgcgtctgctccgcgtgttggtggctgtggccatggctctgtgcccaccagcatctccctcctgagatgccggcctctcatgctcccggagcgtccgccaaccccccgtgtcacctcccttctgttatcgctgacagctttcttgcgtctcatttgtcgccgagccccgagcgcacggtgatgctcgggtctgcccccgaccccctgccacaggccggaagccgcagggggcaccgtggggaagctaacccggccccttcccccaggagtcactgtgccagccccaccacatcctggaagaggagggggccccgggaaggggcctcccctacatcgctgctgtcgtccacgccctgctggaccggccttaggggtgaaggtgggggcacagggcccaccccgcccgggaccccgggagcagaagacgcgcctgggctccgcgctctcagagaagcacgtggtgagggtggcctgggcctgggcacccttggcctgccggcctggctgcctctggggtcgagggtctgggtggaaggaccgcgggtgtcgcaggtgtcgtgtcagccgcaataaacagaagccagaagccctctgggtggccctcaggtgtaactgtgtctgagagcacgtgcgtcgcggggttgttgggggggcctctgtttccggaattcaccgcccagtcgccagggggcgcccgcgggagcccggcgggggcacgcgccacgtggccgggagacgcacagggcgccagcgtcgccgcgaggcctctggggtgggttcgccaggagggcacgttcgcgccgcgccgcggagggaggctgagagggccgggccgggcggcggggacacggcggtaccgtcctgcgctcgggaacgcggaatgttgccctggtcgccgccgcggtggggcgcgggcccggaggaggcgcccgagggaccaggccttccggcgggcaaggaccagggcgagccctggagcgccggagcggacgcccccagggagctggggacacccccatgggacaggtgaggggctcggacggagccgtggggggacagagactgggggcctccatgcgttcaccacgcgctctacggaggcttctccattgtccctgctggagattgggtccctcggtctcccttgcaccaggcacccttgggctccaggggagggtgcgtgggggcggtgtggctgcagcctcagtccctgcccctccagcccacagcccccatcccgtagcccttcctggatctggagagagcagctgctgctgccccaccacctgccaggcccggccactgagcagccccccggagccccagatccccgttccccccaggtggcctgggaggtggccccctcgaggatgactccactagcgccctgggaccccaagtatgaagccaaagcaggacctcggccggtgtgggtgagttgggggcaaacctgtgggactggctggggtgctcagggagctgtgcggtggcctgaggctccagtgctctgtcctcctcaccctagggggccaactgtagctcaggagcctcgttctcaggccggacgctgtgtcacccctcattctggccgctgtatgaagcagcctcgggcaggggtctcaggcccgtggcccctgccacagggcactggaatggacagcaggcgcccccagatgcaggtacctcccttggtcccccgggggcgcaaggctgccccaactcctctgggaaccagtgcccaggggtgggagcccgcagcccgccaccctagtggtgtttcctcctagggttcccggtggtgtgctgtgaagatgtcttcctctcggaccctctgctgccccgggggcagcgtgttcccctgtacctgtccaaggccccccagcagatgatgggctccctgaaactgctgccgccgccccccatcatgtctgccagggtgctcccccgcccatcaccctcccggggcccctccactgcctggctcagcgggccggagctgatcgctctcactggcctgctgcagatgagccagggggagcctaggcccagctcctccgcggttggccccccagaccatacctctgacccacccagcccctgtggtagccccagcagttctcagggtgctgacctctctctcccacagaccccagacacccattgtccatagccttctcagggcagagtgggctggttgtgttgacaataaaacagtgttggtttgcaaaaaaaac

SEQ ID NO: 325492 - DNA, 5085 bp, Homo sapiens
taaggctaggtatgaggccgggtggttaatcaggcagagggagatacctgaaccttagcctgggtgaatctcacagacctcacctacctcaacctcagccgaaaccagctgtcgctgctgccaccctacatctgccagctgcccctgagggtcctcatcgtcagcaacaacaagctgggagccctgccccctgacatcggcaccctgggaagcctgcgacagcttgacgtgagcagcaacgagctccaatccctgccctcggaactgtgtggcctctcttccctgcgggacctcaatgtccggaggaaccagctcagtacgctgcccgaagagctgggggacctccctctggtccgcctggatttctcctgtaaccgcgtctcccgaatcccagtctccttctgccgcctgaggcacctgcaggtcattctgctggacagcaaccctctgcagagtccacctgcccaggtctgcctgaaggggaaacttcacatcttcaagtatttgtccacagaggccgggcagcgtgggtcggccctgggggacctggccccttctcggcccccgagtttcagtccctggtaagtcctaggtggggaggaaggaagccctgggatactgaatgccccttcccggccccaggcaccccctgctttctggcaggaggatggggggctgttgtccagcatcaggctgaccagatccgcctggctggccccagccctgcagaggatctatttccgggacatcggtacgatggtgggctggactcaggcttccacagcgttgatagtggcagcaagaggtggtctggaaatgaggtaagggcgtcctgtccatgggtgattgagggtgtcagccctgggagagcacctctgaactggggacctccaaattgcagggtgccaggcagaagctggagctgtcctcttccttccctctgcccagcatccagggaagggctggctcagcagagacctgagcttagtccacacaggacccccaggtcctgagcccccatgtacagagaggccatctcccatctctgcctctgcctttacagtcaacagatgaattttcagagctgtcattccggatctcagagctggcccgggagccccgggggcccagagaacgcaaggaggatggctcagcggacggagaccctgtgcagattgacttcatcgacagccatgtccccggggaggatgaagagcgaggcactgtggaggagcagcgaccacccgaattaagccctggggcaggggacagggagagggcaccaagcagcaggcgggaggagccggcaggggaggagcggcggcgcccggacaccttgcagctgtggcaggagcgggaacggcggcagcagcagcagagcggggcgtggggggccccgaggaaggatagcctcttgaagccagggctcagggctgttgtgggaggggccgccgccgtgtccactcaagccatgcacaacggctcgcctaagtccagtgcctcccaagcaggggctgcagcggggcagggagcccccgcccctgcccctgcctcccaagagccccttcccatagctggaccagcgacagcacctgctccacggccacttggctccattcagagaccaaacagcttcctcttccgttcctcctctcagagtggctcaggcccttcctcaccagactctgtcctgagacctcggcggtacccccaggttccagatgagaaggacttaatgactcagctgcgccaggtccttgagtcccggctgcagcggcccctgcctgaggacctggccgaggctctggccagtggggtcatcctgtgccagctggccaaccagctacggccgcgctccgtgcccttcatccatgtgccctcccctgctgtgccaaaactcagtgccctcaaggctcggaagaatgtggagagttttctagaagcctgtcgaaaaatgggggtgcctgaggtatgggggctgctttctaaagagtggtggcatgccggactcagccgagcatgtggcatggatggtgggcttccatttgcagcggatgtctgctctcagatgaaggcacaggctgcccctgccctgcccagcatgccccctgccctgcatgccccctgccctgcatgtcacctgtcctacacatcccctgccctgcaggccccatcttgtcctgcatgtcacctgtcctgcacatgccctgccctgcactcctcctgcactgcactccccctgcccagcacgtcagcatgtgggcgtggttctggccccagcacgtgagggcaggggtgggagggactgtcctgctgctgctgctgacgtctgtcccttgtccttgtccacctgctctcctctcccccaggctgacctgtgctcgccctcggatctcctccagggcactgcccgggggctgcggaccgcgctggaggccgtgaagcgggtggggggcaaggccctaccgcccctctggcccccctctggtctgggcggcttcgtcgtcttctacgtggtcctcatgctgctgctctatgtcacctacactcggctcctgggttcctaggccccaaaatcggccctccctcacccctttcccttcctctctatttataaggtccctgctccacccgaccccacctgcggtgccttcagccccaaccaaagacactagtgcacccccttcacagacactgacctcagaggccccactctggtgcccccagaccctgggcccccagcctctggcctccctccagtagccccacgagtccccacctctcagtgctgacggtgccttcatgtccccgccggccctgcccctgccctctgtaccccgtgaggggtggcaggagctggagtctcccccttcctcctgtgccctccccttccccccccaacagctgctatgggggggctaaattatctctattttgtagagaggatctatatttgtaggggttcggggcccaggccgggtccctatctctgtgtataaactgtacagaccgtggccgccctgcctgtgtgtgtgtgtgtgcgcgcgcgcgcgcgtctgctccgcgtgttggtggctgtggccatggctctgtgcccaccagcatctccctcctgagatgccggcctctcatgctcccggagcgtccgccaaccccccgtgtcacctcccttctgttatcgctgacagctttcttgcgtctcatttgtcgccgagccccgagcgcacggtgatgctcgggtctgcccccgaccccctgccacaggccggaagccgcagggggcaccgtggggaagctaacccggccccttcccccaggagtcactgtgccagccccaccacatcctggaagaggagggggccccgggaaggggcctcccctacatcgctgctgtcgtccacgccctgctggaccggccttaggggtgaaggtgggggcacagggcccaccccgcccgggaccccgggagcagaagacgcgcctgggctccgcgctctcagagaagcacgtggtgagggtggcctgggcctgggcacccttggcctgccggcctggctgcctctggggtcgagggtctgggtggaaggaccgcgggtgtcgcaggtgtcgtgtcagccgcaataaacagaagccagaagccctctgggtggccctcaggtgtaactgtgtctgagagcacgtgcgtcgcggggttgttgggggggcctctgtttccggaattcaccgcccagtcgccagggggcgcccgcgggagcccggcgggggcacgcgccacgtggccgggagacgcacagggcgccagcgtcgccgcgaggcctctggggtgggttcgccaggagggcacgttcgcgccgcgccgcggagggaggctgagagggccgggccgggcggcggggacacggcggtaccgtcctgcgctcgggaacgcggaatgttgccctggtcgccgccgcggtggggcgcgggcccggaggaggcgcccgagggaccaggccttccggcgggcaaggaccagggcgagccctggagcgccggagcggacgcccccagggagctggggacacccccatgggacaggtgaggggctcggacggagccgtggggggacagagactgggggcctccatgcgttcaccacgcgctctacggaggcttctccattgtccctgctggagattgggtccctcggtctcccttgcaccaggcacccttgggctccaggggagggtgcgtgggggcggtgtggctgcagcctcagtccctgcccctccagcccacagcccccatcccgtagcccttcctggatctggagagagcagctgctgctgccccaccacctgccaggcccggccactgagcagccccccggagccccagatccccgttccccccaggtggcctgggaggtggccccctcgaggatgactccactagcgccctgggaccccaagtatgaagccaaagcaggacctcggccggtgtggggggccaactgtagctcaggagcctcgttctcaggccggacgctgtgtcacccctcattctggccgctgtatgaagcagcctcgggcaggggtctcaggcccgtggcccctgccacagggcactggaatggacagcaggcgcccccagatgcagggttcccggtggtgtgctgtgaagatgtcttcctctcggaccctctgctgccccgggggcagcgtgttcccctgtacctgtccaaggccccccagcagatgatgggctccctgaaactgctgccgccgccccccatcatgtctgccagggtgctcccccgcccatcaccctcccggggcccctccactgcctggctcagcgggccggagctgatcgctctcactggcctgctgcagatgagccagggggagcctaggcccagctcctccgcggttggccccccagaccatacctctgacccacccagcccctgtggtagccccagcagttctcagggtgctgacctctctctcccacagaccccagacacccattgtccatagccttctcagggcagagtgggctggttgtgttgacaataaaacagtgttggtttgcaaaaaaaac

SEQ ID NO: 325493 - DNA, 5777 bp, Homo sapiens
taaggctaggtatgaggccgggtggttaatcaggcagagggagatacctgaaccttagcctgggtgaatctcacagacctcacctacctcaacctcagccgaaaccagctgtcgctgctgccaccctacatctgccagctgcccctgagggtcctcatcgtcagcaacaacaagctgggagccctgccccctgacatcggcaccctgggaagcctgcgacagcttgacgtgagcagcaacgagctccaatccctgccctcggaactgtgtggcctctcttccctgcgggacctcaatgtccggaggaaccagctcagtacgctgcccgaagagctgggggacctccctctggtccgcctggatttctcctgtaaccgcgtctcccgaatcccagtctccttctgccgcctgaggcacctgcaggtcattctgctggacagcaaccctctgcagagtccacctgcccaggtctgcctgaaggggaaacttcacatcttcaagtatttgtccacagaggccgggcagcgtgggtcggccctgggggacctggccccttctcggcccccgagtttcagtccctggtaagtcctaggtggggaggaaggaagccctgggatactgaatgccccttcccggccccaggcaccccctgctttctggcaggaggatggggggctgttgtccagcatcaggctgaccagatccgcctggctggccccagccctgcagaggatctatttccgggacatcggtacgatggtgggctggactcaggcttccacagcgttgatagtggcagcaagaggtggtctggaaatgaggtaagggcgtcctgtccatgggtgattgagggtgtcagccctgggagagcacctctgaactggggacctccaaattgcagggtgccaggcagaagctggagctgtcctcttccttccctctgcccagcatccagggaagggctggctcagcagagacctgagcttagtccacacaggacccccaggtcctgagcccccatgtacagagaggccatctcccatctctgcctctgcctttacagtcaacagatgaattttcagagctgtcattccggatctcagagctggcccgggagccccgggggcccagagaacgcaaggaggatggctcagcggacggagaccctgtgcagattgacttcatcgacagccatgtccccggggaggatgaagagcgaggcactgtggaggagcagcgaccacccgaattaagccctggggcaggggacagggagagggcaccaagcagcaggcgggaggagccggcaggggaggagcggcggcgcccggacaccttgcagctgtggcaggagcgggaacggcggcagcagcagcagagcggggcgtggggggccccgaggaaggataggtgggacccagggccgcccggggctgttgctggacactgagccctggaaatggggccaccgagccccgctgagccgttctgccttggggctagctgaccccacctctccttgttccagcctcttgaagccagggctcagggctgttgtgggaggggccgccgccgtgtccactcaagccatgcacaagtaggtttcctgccagcatcccctccccactcctcttcctatgaccatcatccctctaattcccttctgtctctcctcagcggctcgcctaagtccagtgcctcccaagcaggggctgcagcggggcagggagcccccgcccctgcccctgcctcccaagagccccttcccatagctggaccaggtgggacagggattttgggaggaggatggggcctgtgttggtgagggctggttgggagagagggacacagaggggatgcctgtctcacctgcccctgtcgctgtgtccctggttccggccccagcgacagcacctgctccacggccacttggctccattcagagaccaaacagcttcctcttccgttcctcctctcagagtggctcaggtgggtgtcctgccctccccagtgctgacccagtgcttgccagcaccaacggctacatcacccttctgccctgggagccctctgggtctgttgtaccttttgtacctttgcgttgaaaatcccacaagcaagccgggtgtggtggctcacacctgtaatcgcagcactttaggaggcccaggtgggaggatcgcttgagcccaggaattcaagaccagcctgggcaacatagcgagaccccatctccatgaaataaaaaaaaatcccacaagcagagaggcaggaggtgtaggtgccaggccactgggacccagctacagagtcagtggtgagcagtggaggcagccccatgcccccctttttctcctaggcccttcctcaccagactctgtcctgagacctcggcggtacccccaggttccagatgagaaggacttaatgactcagctgcgccaggtccttgagtcccggctgcagcggcccctgcctgaggacctggccgaggctctggccagtggggtcatcctgtgccagctggccaaccagctacggccgcgctccgtgcccttcatccatgtgccctcccctgctgtgccaaaactcagtgccctcaaggctcggaagaatgtggagagttttctagaagcctgtcgaaaaatgggggtgcctgaggtatgggggctgctttctaaagagtggtggcatgccggactcagccgagcatgtggcatggatggtgggcttccatttgcagcggatgtctgctctcagatgaaggcacaggctgcccctgccctgcccagcatgccccctgccctgcatgccccctgccctgcatgtcacctgtcctacacatcccctgccctgcaggccccatcttgtcctgcatgtcacctgtcctgcacatgccctgccctgcactcctcctgcactgcactccccctgcccagcacgtcagcatgtgggcgtggttctggccccagcacgtgagggcaggggtgggagggactgtcctgctgctgctgctgacgtctgtcccttgtccttgtccacctgctctcctctcccccaggctgacctgtgctcgccctcggatctcctccagggcactgcccgggggctgcggaccgcgctggaggccgtgaagcgggtggggggcaaggccctaccgcccctctggcccccctctggtctgggcggcttcgtcgtcttctacgtggtcctcatgctgctgctctatgtcacctacactcggctcctgggttcctaggccccaaaatcggccctccctcacccctttcccttcctctctatttataaggtccctgctccacccgaccccacctgcggtgccttcagccccaaccaaagacactagtgcacccccttcacagacactgacctcagaggccccactctggtgcccccagaccctgggcccccagcctctggcctccctccagtagccccacgagtccccacctctcagtgctgacggtgccttcatgtccccgccggccctgcccctgccctctgtaccccgtgaggggtggcaggagctggagtctcccccttcctcctgtgccctccccttccccccccaacagctgctatgggggggctaaattatctctattttgtagagaggatctatatttgtaggggttcggggcccaggccgggtccctatctctgtgtataaactgtacagaccgtggccgccctgcctgtgtgtgtgtgtgtgcgcgcgcgcgcgcgtctgctccgcgtgttggtggctgtggccatggctctgtgcccaccagcatctccctcctgagatgccggcctctcatgctcccggagcgtccgccaaccccccgtgtcacctcccttctgttatcgctgacagctttcttgcgtctcatttgtcgccgagccccgagcgcacggtgatgctcgggtctgcccccgaccccctgccacaggccggaagccgcagggggcaccgtggggaagctaacccggccccttcccccaggagtcactgtgccagccccaccacatcctggaagaggagggggccccgggaaggggcctcccctacatcgctgctgtcgtccacgccctgctggaccggccttaggggtgaaggtgggggcacagggcccaccccgcccgggaccccgggagcagaagacgcgcctgggctccgcgctctcagagaagcacgtggtgagggtggcctgggcctgggcacccttggcctgccggcctggctgcctctggggtcgagggtctgggtggaaggaccgcgggtgtcgcaggtgtcgtgtcagccgcaataaacagaagccagaagccctctgggtggccctcaggtgtaactgtgtctgagagcacgtgcgtcgcggggttgttgggggggcctctgtttccggaattcaccgcccagtcgccagggggcgcccgcgggagcccggcgggggcacgcgccacgtggccgggagacgcacagggcgccagcgtcgccgcgaggcctctggggtgggttcgccaggagggcacgttcgcgccgcgccgcggagggaggctgagagggccgggccgggcggcggggacacggcggtaccgtcctgcgctcgggaacgcggaatgttgccctggtcgccgccgcggtggggcgcgggcccggaggaggcgcccgagggaccaggccttccggcgggcaaggaccagggcgagccctggagcgccggagcggacgcccccagggagctggggacacccccatgggacaggtgaggggctcggacggagccgtggggggacagagactgggggcctccatgcgttcaccacgcgctctacggaggcttctccattgtccctgctggagattgggtccctcggtctcccttgcaccaggcacccttgggctccaggggagggtgcgtgggggcggtgtggctgcagcctcagtccctgcccctccagcccacagcccccatcccgtagcccttcctggatctggagagagcagctgctgctgccccaccacctgccaggcccggccactgagcagccccccggagccccagatccccgttccccccaggtggcctgggaggtggccccctcgaggatgactccactagcgccctgggaccccaagtatgaagccaaagcaggacctcggccggtgtggggggccaactgtagctcaggagcctcgttctcaggccggacgctgtgtcacccctcattctggccgctgtatgaagcagcctcgggcaggggtctcaggcccgtggcccctgccacagggcactggaatggacagcaggcgcccccagatgcagggttcccggtggtgtgctgtgaagatgtcttcctctcggaccctctgctgccccgggggcagcgtgttcccctgtacctgtccaaggccccccagcagatgatgggctccctgaaactgctgccgccgccccccatcatgtctgccagggtgctcccccgcccatcaccctcccggggcccctccactgcctggctcagcgggccggagctgatcgctctcactggcctgctgcagatgagccagggggagcctaggcccagctcctccgcggttggccccccagaccatacctctgacccacccagcccctgtggtagccccagcagttctcagggtgctgacctctctctcccacagaccccagacacccattgtccatagccttctcagggcagagtgggctggttgtgttgacaataaaacagtgttggtttgcaaaaaaaac

SEQ ID NO: 325494 - DNA, 4470 bp, Homo sapiens
taaggctaggtatgaggccgggtggttaatcaggcagagggagatacctgaaccttagcctgggtgaatctcacagacctcacctacctcaacctcagccgaaaccagctgtcgctgctgccaccctacatctgccagctgcccctgagggtcctcatcgtcagcaacaacaagctgggagccctgccccctgacatcggcaccctgggaagcctgcgacagcttgacgtgagcagcaacgagctccaatccctgccctcggaactgtgtggcctctcttccctgcgggacctcaatgtccggaggaaccagctcagtacgctgcccgaagagctgggggacctccctctggtccgcctggatttctcctgtaaccgcgtctcccgaatcccagtctccttctgccgcctgaggcacctgcaggtcattctgctggacagcaaccctctgcagagtccacctgcccaggtctgcctgaaggggaaacttcacatcttcaagtatttgtccacagaggccgggcagcgtgggtcggccctgggggacctggccccttctcggcccccgagtttcagtccctggtaagtcctaggtggggaggaaggaagccctgggatactgaatgccccttcccggccccaggcaccccctgctttctggcaggaggatggggggctgttgtccagcatcaggctgaccagatccgcctggctggccccagccctgcagaggatctatttccgggacatcggtacgatggtgggctggactcaggcttccacagcgttgatagtggcagcaagaggtggtctggaaatgaggtaagggcgtcctgtccatgggtgattgagggtgtcagccctgggagagcacctctgaactggggacctccaaattgcagggtgccaggcagaagctggagctgtcctcttccttccctctgcccagcatccagggaagggctggctcagcagagacctgagcttagtccacacaggacccccaggtcctgagcccccatgtacagagaggccatctcccatctctgcctctgcctttacagtcaacagatgaattttcagagctgtcattccggatctcagagctggcccgggagccccgggggcccagagaacgcaaggaggatggctcagcggacggagaccctgtgcagattgacttcatcgacagccatgtccccggggaggatgaagagcgaggcactgtggaggagcagcgaccacccgaattaagccctggggcaggggacagggagagggcaccaagcagcaggcgggaggagccggcaggggaggagcggcggcgcccggacaccttgcagctgtggcaggagcgggaacggcggcagcagcagcagagcggggcgtggggggccccgaggaaggatagcctcttgaagccagggctcagggctgttgtgggaggggccgccgccgtgtccactcaagccatgcacaacggctcgcctaagtccagtgcctcccaagcaggggctgcagcggggcagggagcccccgcccctgcccctgcctcccaagagccccttcccatagctggaccagcgacagcacctgctccacggccacttggctccattcagagaccaaacagcttcctcttccgttcctcctctcagagtggctcaggcccttcctcaccagactctgtcctgagacctcggcggtacccccaggttccagatgagaaggacttaatgactcagctgcgccaggtccttgagtcccggctgcagcggcccctgcctgaggacctggccgaggctctggccagtggggtcatcctgtgccagctggccaaccagctacggccgcgctccgtgcccttcatccatgtgccctcccctgctgtgccaaaactcagtgccctcaaggctcggaagaatgtggagagttttctagaagcctgtcgaaaaatgggggtgcctgaggctgacctgtgctcgccctcggatctcctccagggcactgcccgggggctgcggaccgcgctggaggccgtgaagcgggtggggggcaaggccctaccgcccctctggcccccctctggtctgggcggcttcgtcgtcttctacgtggtcctcatgctgctgctctatgtcacctacactcccacgagtccccacctctcagtgctgacggtgccttcatgtccccgccggccctgcccctgccctctgtaccccgtgaggggtggcaggagctggagtctcccccttcctcctgtgccctccccttccccccccaacagctgctatgggggggctaaattatctctattttgtagagaggatctatatttgtaggggttcggggcccaggccgggtccctatctctgtgtataaactgtacagaccgtggccgccctgcctgtgtgtgtgtgtgtgcgcgcgcgcgcgcgtctgctccgcgtgttggtggctgtggccatggctctgtgcccaccagcatctccctcctgagatgccggcctctcatgctcccggagcgtccgccaaccccccgtgtcacctcccttctgttatcgctgacagctttcttgcgtctcatttgtcgccgagccccgagcgcacggtgatgctcgggtctgcccccgaccccctgccacaggccggaagccgcagggggcaccgtggggaagctaacccggccccttcccccaggagtcactgtgccagccccaccacatcctggaagaggagggggccccgggaaggggcctcccctacatcgctgctgtcgtccacgccctgctggaccggccttaggggtgaaggtgggggcacagggcccaccccgcccgggaccccgggagcagaagacgcgcctgggctccgcgctctcagagaagcacgtggtgagggtggcctgggcctgggcacccttggcctgccggcctggctgcctctggggtcgagggtctgggtggaaggaccgcgggtgtcgcaggtgtcgtgtcagccgcaataaacagaagccagaagccctctgggtggccctcaggtgtaactgtgtctgagagcacgtgcgtcgcggggttgttgggggggcctctgtttccggaattcaccgcccagtcgccagggggcgcccgcgggagcccggcgggggcacgcgccacgtggccgggagacgcacagggcgccagcgtcgccgcgaggcctctggggtgggttcgccaggagggcacgttcgcgccgcgccgcggagggaggctgagagggccgggccgggcggcggggacacggcggtaccgtcctgcgctcgggaacgcggaatgttgccctggtcgccgccgcggtggggcgcgggcccggaggaggcgcccgagggaccaggccttccggcgggcaaggaccagggcgagccctggagcgccggagcggacgcccccagggagctggggacacccccatgggacaggtgaggggctcggacggagccgtggggggacagagactgggggcctccatgcgttcaccacgcgctctacggaggcttctccattgtccctgctggagattgggtccctcggtctcccttgcaccaggcacccttgggctccaggggagggtgcgtgggggcggtgtggctgcagcctcagtccctgcccctccagcccacagcccccatcccgtagcccttcctggatctggagagagcagctgctgctgccccaccacctgccaggcccggccactgagcagccccccggagccccagatccccgttccccccaggtggcctgggaggtggccccctcgaggatgactccactagcgccctgggaccccaagtatgaagccaaagcaggacctcggccggtgtggggggccaactgtagctcaggagcctcgttctcaggccggacgctgtgtcacccctcattctggccgctgtatgaagcagcctcgggcaggggtctcaggcccgtggcccctgccacagggcactggaatggacagcaggcgcccccagatgcagggttcccggtggtgtgctgtgaagatgtcttcctctcggaccctctgctgccccgggggcagcgtgttcccctgtacctgtccaaggccccccagcagatgatgggctccctgaaactgctgccgccgccccccatcatgtctgccagggtgctcccccgcccatcaccctcccggggcccctccactgcctggctcagcgggccggagctgatcgctctcactggcctgctgcagatgagccagggggagcctaggcccagctcctccgcggttggccccccagaccatacctctgacccacccagcccctgtggtagccccagcagttctcagggtgctgacctctctctcccacagaccccagacacccattgtccatagccttctcagggcagagtgggctggttgtgttgacaataaaacagtgttggtttgcaaaaaaaac

SEQ ID NO: 325495 - DNA, 3260 bp, Homo sapiens
tcgagtaccttggtcgaaggttatcgagggaagccagatttcacggttgtttgacagtaataagttgcaataatctccaggctctaggctcggaagaatgtggagagttttctagaagcctgtcgaaaaatgggggtgcctgaggtatgggggctgctttctaaagagtggtggcatgccggactcagccgagcatgtggcatggatggtgggcttccatttgcagcggatgtctgctctcagatgaaggcacaggctgcccctgccctgcccagcatgccccctgccctgcatgccccctgccctgcatgtcacctgtcctacacatcccctgccctgcaggccccatcttgtcctgcatgtcacctgtcctgcacatgccctgccctgcactcctcctgcactgcactccccctgcccagcacgtcagcatgtgggcgtggttctggccccagcacgtgagggcaggggtgggagggactgtcctgctgctgctgctgacgtctgtcccttgtccttgtccacctgctctcctctcccccaggctgacctgtgctcgccctcggatctcctccagggcactgcccgggggctgcggaccgcgctggaggccgtgaagcgggtggggggcaaggccctaccgcccctctggcccccctctggtctgggcggcttcgtcgtcttctacgtggtcctcatgctgctgctctatgtcacctacactcggctcctgggttcctaggccccaaaatcggccctccctcacccctttcccttcctctctatttataaggtccctgctccacccgaccccacctgcggtgccttcagccccaaccaaagacactagtgcacccccttcacagacactgacctcagaggccccactctggtgcccccagaccctgggcccccagcctctggcctccctccagtagccccacgagtccccacctctcagtgctgacggtgccttcatgtccccgccggccctgcccctgccctctgtaccccgtgaggggtggcaggagctggagtctcccccttcctcctgtgccctccccttccccccccaacagctgctatgggggggctaaattatctctattttgtagagaggatctatatttgtaggggttcggggcccaggccgggtccctatctctgtgtataaactgtacagaccgtggccgccctgcctgtgtgtgtgtgtgtgcgcgcgcgcgcgcgtctgctccgcgtgttggtggctgtggccatggctctgtgcccaccagcatctccctcctgagatgccggcctctcatgctcccggagcgtccgccaaccccccgtgtcacctcccttctgttatcgctgacagctttcttgcgtctcatttgtcgccgagccccgagcgcacggtgatgctcgggtctgcccccgaccccctgccacaggccggaagccgcagggggcaccgtggggaagctaacccggccccttcccccaggagtcactgtgccagccccaccacatcctggaagaggagggggccccgggaaggggcctcccctacatcgctgctgtcgtccacgccctgctggaccggccttaggggtgaaggtgggggcacagggcccaccccgcccgggaccccgggagcagaagacgcgcctgggctccgcgctctcagagaagcacgtggtgagggtggcctgggcctgggcacccttggcctgccggcctggctgcctctggggtcgagggtctgggtggaaggaccgcgggtgtcgcaggtgtcgtgtcagccgcaataaacagaagccagaagccctctgggtggccctcaggtgtaactgtgtctgagagcacgtgcgtcgcggggttgttgggggggcctctgtttccggaattcaccgcccagtcgccagggggcgcccgcgggagcccggcgggggcacgcgccacgtggccgggagacgcacagggcgccagcgtcgccgcgaggcctctggggtgggttcgccaggagggcacgttcgcgccgcgccgcggagggaggctgagagggccgggccgggcggcggggacacggcggtaccgtcctgcgctcgggaacgcggaatgttgccctggtcgccgccgcggtggggcgcgggcccggaggaggcgcccgagggaccaggccttccggcgggcaaggaccagggcgagccctggagcgccggagcggacgcccccagggagctggggacacccccatgggacaggtgaggggctcggacggagccgtggggggacagagactgggggcctccatgcgttcaccacgcgctctacggaggcttctccattgtccctgctggagattgggtccctcggtctcccttgcaccaggcacccttgggctccaggggagggtgcgtgggggcggtgtggctgcagcctcagtccctgcccctccagcccacagcccccatcccgtagcccttcctggatctggagagagcagctgctgctgccccaccacctgccaggcccggccactgagcagccccccggagccccagatccccgttccccccaggtggcctgggaggtggccccctcgaggatgactccactagcgccctgggaccccaagtatgaagccaaagcaggacctcggccggtgtggggggccaactgtagctcaggagcctcgttctcaggccggacgctgtgtcacccctcattctggccgctgtatgaagcagcctcgggcaggggtctcaggcccgtggcccctgccacagggcactggaatggacagcaggcgcccccagatgcagggttcccggtggtgtgctgtgaagatgtcttcctctcggaccctctgctgccccgggggcagcgtgttcccctgtacctgtccaaggccccccagcagatgatgggctccctgaaactgctgccgccgccccccatcatgtctgccagggtgctcccccgcccatcaccctcccggggcccctccactgcctggctcagcgggccggagctgatcgctctcactggcctgctgcagatgagccagggggagcctaggcccagctcctccgcggttggccccccagaccatacctctgacccacccagcccctgtggtagccccagcagttctcagggtgctgacctctctctcccacagaccccagacacccattgtccatagccttctcagggcagagtgggctggttgtgttgacaataaaacagtgttggtttgcaaaaaaaac

SEQ ID NO: 325496 - DNA, 2291 bp, Homo sapiens
taaggctaggtatgaggccgggtggttaatcaggcagagggagatacctgaaccttagcctgggtgaatctcacagacctcacctacctcaacctcagccgaaaccagctgtcgctgctgccaccctacatctgccagctgcccctgagggtcctcatcgtcagcaacaacaagctgggagccctgccccctgacatcggcaccctgggaagcctgcgacagcttgacgtgagcagcaacgagctccaatccctgccctcggaactgtgtggcctctcttccctgcgggacctcaatgtccggaggaaccagctcagtacgctgcccgaagagctgggggacctccctctggtccgcctggatttctcctgtaaccgcgtctcccgaatcccagtctccttctgccgcctgaggcacctgcaggtcattctgctggacagcaaccctctgcagagtccacctgcccaggtctgcctgaaggggaaacttcacatcttcaagtatttgtccacagaggccgggcagcgtgggtcggccctgggggacctggccccttctcggcccccgagtttcagtccctggtaagtcctaggtggggaggaaggaagccctgggatactgaatgccccttcccggccccaggcaccccctgctttctggcaggaggatggggggctgttgtccagcatcaggctgaccagatccgcctggctggccccagccctgcagaggatctatttccgggacatcggtacgatggtgggctggactcaggcttccacagcgttgatagtggcagcaagaggtggtctggaaatgaggtaagggcgtcctgtccatgggtgattgagggtgtcagccctgggagagcacctctgaactggggacctccaaattgcagggtgccaggcagaagctggagctgtcctcttccttccctctgcccagcatccagggaagggctggctcagcagagacctgagcttagtccacacaggacccccaggtcctgagcccccatgtacagagaggccatctcccatctctgcctctgcctttacagtcaacagatgaattttcagagctgtcattccggatctcagagctggcccgggagccccgggggcccagagaacgcaaggaggatggctcagcggacggagaccctgtgcagattgacttcatcgacagccatgtccccggggaggatgaagagcgaggcactgtggaggagcagcgaccacccgaattaagccctggggcaggggacagggagagggcaccaagcagcaggcgggaggagccggcaggggaggagcggcggcgcccggacaccttgcagctgtggcaggagcgggaacggcggcagcagcagcagagcggggcgtggggggccccgaggaaggatagcctcttgaagccagggctcagggctgttgtgggaggggccgccgccgtgtccactcaagccatgcacaacggctcgcctaagtccagtgcctcccaagcaggggctgcagcggggcagggagcccccgcccctgcccctgcctcccaagagccccttcccatagctggaccagcgacagcacctgctccacggccacttggctccattcagagaccaaacagcttcctcttccgttcctcctctcagagtggctcaggcccttcctcaccagactctgtcctgagacctcggcggtacccccaggttccagatgagaaggacttaatgactcagctgcgccaggtccttgagtcccggctgcagcggcccctgcctgaggacctggccgaggctctggccagtggggtcatcctgtgccagctggccaaccagctacggccgcgctccgtgcccttcatccatgtgccctcccctgctgtgccaaaactcagtgccctcaaggctcggaagaatgtggagagttttctagaagcctgtcgaaaaatgggggtgcctgaggagtcactgtgccagccccaccacatcctggaagaggagggggccccgggaaggggcctcccctacatcgctgctgtcgtccacgccctgctggaccggccttaggggtgaaggtgggggcacagggcccaccccgcccgggaccccgggagcagaagacgcgcctgggctccgcgctctcagagaagcacgtggtgagggtggcctgggcctgggcacccttggcctgccggcctggctgcctctggggtcgagggtctgggtggaaggaccgcgggtgtcgcaggtgtcgtgtcagccgcaataaacagaagccagaagc

SEQ ID NO: 325497 - DNA, 1986 bp, Homo sapiens
taaggctaggtatgaggccgggtggttaatcaggcagagggagatacctgaaccttagcctgggtgaatctcacagacctcacctacctcaacctcagccgaaaccagctgtcgctgctgccaccctacatctgccagctgcccctgagggtcctcatcgtcagcaacaacaagctgggagccctgccccctgacatcggcaccctgggaagcctgcgacagcttgacgtgagcagcaacgagctccaatccctgccctcggaactgtgtggcctctcttccctgcgggacctcaatgtccggaggaaccagctcagtacgctgcccgaagagctgggggacctccctctggtccgcctggatttctcctgtaaccgcgtctcccgaatcccagtctccttctgccgcctgaggcacctgcaggtcattctgctggacagcaaccctctgcagagtccacctgcccaggtctgcctgaaggggaaacttcacatcttcaagtatttgtccacagaggccgggcagcgtgggtcggccctgggggacctggccccttctcggcccccgagtttcagtccctggtaagtcctaggtggggaggaaggaagccctgggatactgaatgccccttcccggccccaggcaccccctgctttctggcaggaggatggggggctgttgtccagcatcaggctgaccagatccgcctggctggccccagccctgcagaggatctatttccgggacatcggtacgatggtgggctggactcaggcttccacagcgttgatagtggcagcaagaggtggtctggaaatgaggtaagggcgtcctgtccatgggtgattgagggtgtcagccctgggagagcacctctgaactggggacctccaaattgcagggtgccaggcagaagctggagctgtcctcttccttccctctgcccagcatccagggaagggctggctcagcagagacctgagcttagtccacacaggacccccaggtcctgagcccccatgtacagagaggccatctcccatctctgcctctgcctttacagtcaacagatgaattttcagagctgtcattccggatctcagagctggcccgggagccccgggggcccagagaacgcaaggaggatggctcagcggacggagaccctgtgcagattgacttcatcgacagccatgtccccggggaggatgaagagcgaggcactgtggaggagcagcgaccacccgaattaagccctggggcaggggacagggagagggcaccaagcagcagctgtggcaggagcgggaacggcggcagcagcagcagagcggggcgtggggggccccgaggaaggataggtgggacccagggccgcccggggctgttgctggacactgagccctggaaatggggccaccgagccccgctgagccgttctgccttggggctagctgaccccacctctccttgttccagcctcttgaagccagggctcagggctgttgtgggaggggccgccgccgtgtccactcaagccatgcacaacggctcgcctaagtccagtgcctcccaagcaggggctgcagcggggcagggagcccccgcccctgcccctgcctcccaagagccccttcccatagctggaccagcgacagcacctgctccacggccacttggctccattcagagaccaaacagcttcctcttccgttcctcctctcagagtggctcaggcccttcctcaccagactctgtcctgagacctcggcggtacccccaggttccagatgagaaggacttaatgactcagctgcgccaggtccttgagtcccggctgcagcggcccctgcctgaggacctggccgaggctctggccagtggggtcatcctgtgccagctggccaaccagctacggccgcgctccgtgcccttcatccatgtgccctcccctgctgtggtcagttggggctggggaagaggtgg

SEQ ID NO: 325498 - DNA, 728 bp, Homo sapiens
ggacgtagcgtcgccgcgccaggtctctagcagctgccgctgagccgccggacggacgctcgtcttcgcccgccatggccgagagcgactgggacacggtgacggtgctgcgcaagaagggccctacggccgcccaggccaaatccaagcaggctatcttagcggcacagagacgaggagaagatgtggagacttccaagaaatgggctgctggccagaacaaacaacattctattaccaagaacacggccaagctggaccgggagacagaggagctgcaccatgacagggtgaccctggaggtgggcaaggtgatccagcaaggtcggcagagcaaggggcttacgcagaaggacctggccacgaaaatcaatgagaagccacaggtgatcgcggactatgagagcggacgggccatacccaataaccaggtgcttggcaaaatcgagcgggccattggcctcaagctccggggaaaggacattggaaagcccatcgagaaggggcctagggcgaaatgaacacaaagcctcgaaatcagtgcgctccagctgatctcgttccgccggttccccttggccgccagttccgttctcctcacgggccgaacggaacaaggggtccagcttgcgggggaccctccccagcccattcctgctgtcaaacaaacaaaaccttgcaaagcgcagaaaaagaatttatgaaaataaaaaaaaatatatttttgg

SEQ ID NO: 325499 - DNA, 860 bp, Homo sapiens
ggacgtagcgtcgccgcgccaggtctctagcagctgccgctgagccgccggacggacgctcgtcttcgcccgccatggccgagagcgactgggacacggtgacggtgctgcgcaagaagggccctacggccgcccaggccaaatccaagcaggctatcttagcggcacagagacgaggagaagatgtggagacttccaagaaatgggctgctggccagaacaaacaacattctattaccaagaacacggccaagctggaccgggagacagaggagctgcaccatgacagggtgaccctggaggtgggcaaggtgatccagcaaggtcggcagagcaaggggcttacgcagaaggacctggccacgaaaatcaatgagaagccacaggtgatcgcggactatgagagcggacgggccatacccaataaccaggtgcttggcaaaatcgagcgggccattgatgtgggaaccaggagtgctcgtgtgctgagagcccagtgaggcacgggagcggcgtggccccccttccctgggaagatgttgaagaggggcagcgttggggggaggagggagctggtgctgcagtggccagtggctgtggctcatttcaggcctcaagctccggggaaaggacattggaaagcccatcgagaaggggcctagggcgaaatgaacacaaagcctcgaaatcagtgcgctccagctgatctcgttccgccggttccccttggccgccagttccgttctcctcacgggccgaacggaacaaggggtccagcttgcgggggaccctccccagcccattcctgctgtcaaacaaacaaaaccttgcaaagcgcaacaaggacggatagccacggc

SEQ ID NO: 325500 - DNA, 363 bp, Homo sapiens
  misc_feature (37)..(37): n is a, c, g, or t
  misc_feature (39)..(39): n is a, c, g, or t
  misc_feature (43)..(43): n is a, c, g, or t
  misc_feature (297)..(297): n is a, c, g, or t
tgactctacggatcccttatttgtccggcgccaggcnanatcnaagtagctatcttagcggcacagagacgaggagaagatgtggagacttccaagaaatgggctgctggccagaacaaacaacattctattaccaagaacacggccaagctggaccgggagacagaggagctgcaccatgacagggtgaccctggaggtgggcaaggtgatccagcaaggtcggcagagcaaggggcttacgcagaaggacctggccacgaaaatcaatgagaagccacaggtgatcgcggactantgagagcggcccgggaccaaaattagggggtaacccggaggccttccggaaatttccgtaaaatca

SEQ ID NO: 325501 - DNA, 1903 bp, Homo sapiens
ggacgtagcgtcgccgcgccaggtctctagcagctgccgctgagccgccggacggacgctcgtcttcgcccgccatggccgagagcgactgggacacggtgacggtgctgcgcaagaagggccctacggccgcccaggccaaatccaagcaggctatcttagcggcacagagacgaggagaagatgtggagacttccaagaaatgggctgctggccagaacaaacaacattctattaccaagaacacggccaagctggaccgggagacagaggagctgcaccatgacagggtgaccctggaggtgggcaaggtgatccagcaaggtcggcagagcaaggggcttacgcagaaggacctggccacgaaaatcaatgagaagccacaggtgatcgcggactatgagagcggacgggccatacccaataaccaggtgcttggcaaaatcgagcgggccattggcctcaagctccggggaaaggacattggaaagcccatcgagaaggggcctagggcgaaatgaacacaaagcctcgaaatcagtgcgctccagctgatctcgttccgccggttccccttggccgccagttccgttctcctcacgggccgaacggaacaaggggtccagcttgcgggggaccctccccagcccattcctgctgtcaaacaaacaaaaccttgcaaagcgcaaaaaaaaaaaaaaaaaaaaaaaaaaaaaaaaaaaaaaaaaaaaaaaaaaaaacaaaaaaaaaaaaaaaaaaaaaaaaaaaaaaacaaaacagaagaagagggggcggcgcagagagaaatcgaccaaccagcgaggaggaggacacgcgacgcaccacgacaccattgtatcagataaagagaagagaggggagcacacaccaactagagggagagtcttattataatagacaaaagagacaggcagagagagacgaagcacataaaaaaacaaacaagggcgaagcgagaagagaagagaacacacgagacaaaagaagagagcaaaacatacaaaggcaaaaaagagacacacacaagagaaggacgagggggagaaagaaagcaacgagcgggagcggaagagagaacacatcaaaccagagaagagagaataagacaagcgacgaaagagagagagaggacacacgacacaaacaatcaaggagaagacgggaggcgagaaaggtcagagaagagacgcacgaacaccacgacagacgtgaggcaagagatgttaaggccgaccgtagcggcgcacgagagagaagagaaagctacgggagacagacggcagagcgcagcagagcagacagtagcgataatcgagatgccagtgaaacgagaacgaagcgataagcaataagcaaccacaggaggcggggaccacgaagagtagacagataagaacgaagagaaggtggagcggaagagcacgaaacagcaagaccgagaaacgagcagaaaggagacagaagagcagaacgaagagaaacaaagagaaaggaagaatgagaaggcagagcgaagaaagaagaggaagaaaaacgaggacagacaaaagaggacaacgagaagaggagataagagaaggagaagaggcgaggagaaggagaagagacagggaaggaaaaagaagggagagagagagagaaagcaaggagacaagaggagaggcggagaagagcaagaagacaggcgaagacggcaaggaaaacggaagagaggaggaaacagaaacgacgagaggagaaacgagagagaccggaagaacgcccacacaacagaaagaaaacgagaggcgtgaaggacggacgacgagagacgaggaggagcggcaaaggaaagcaaaaacaacggagagagagcgagacaaagaagaaaacgagaaggaaa

SEQ ID NO: 325502 - DNA, 1296 bp, Homo sapiens
ggacgtagcgtcgccgcgccaggtctctagcagctgccgctgagccgccggacggacgctcgtcttcgcccgccatggccgagagcgactgggacacggtgacggtgctgcgcaagaagggccctacggccgcccaggccaaatccaagcaggctatcttagcggcacagagacgaggagaagatgtggagacttccaagaaatgggctgctggccagaacaaacaacattctattaccaagaacacggccaagctggaccgggagacagaggagctgcaccatgacagggtgaccctggaggtgggcaaggtgatccagcaaggtcggcagagcaaggggcttacgcagaaggacctggccacgaaaatcaatgagaagccacaggtgatcgcggactatgagagcggacgggccatacccaataaccaggtgcttggcaaaatcgagcgggccattggtgagtgtccctccacccttcgccgggtccgctgaacagggaggctacccgctcccagctggggttggtgagagtgggactcgggggaagaagatggccctgggggtcccctgttctctgaattctggagctttgcttctccaggtagtacagactgagggatggtggggtctctgcaggcctcaggaaacccctaagagcaagtggagtccgagtcccttccccttgccagttcccgtcagcctgtgctgttggcgatggttctctgagcctgagcacagcgggtccgggccctgtcagcatggggccggaagccagttccacagaggaccccggctccggttcttccggagaggggtgttcatgctctgctgtctaaggtgatcagactcatcctcttcaaaattagatgtgggaaccaggagtgctcgtgtgctgagagcccagtgaggcacgggagcggcgtggccccccttccctgggaagatgttgaagaggggcagcgttggggggaggagggagctggtgctgcagtggccagtggctgtggctcatttcaggcctcaagctccggggaaaggacattggaaagcccatcgagaaggggcctagggcgaaatgaacacaaagcctcgaaatcagtgcgctccagctgatctcgttccgccggttccccttggccgccagttccgttctcctcacgggccgaacggaacaaggggtccagcttgcgggggaccctccccagcccattcctgctgtcaaacaaacaaaaccttgcaaagcgcaaaaaaaaaaagtcgaccggtttttaatttagtagtagtaggcggccgc

SEQ ID NO: 325503 - DNA, 1117 bp, Homo sapiens
ggacgtagcgtcgccgcgccaggtctctagcagctgccgctgagccgccggacggacgctcgtcttcgcccgccatggccgagagcgactgggacacggtgacggtgctgcgcaagaagggccctacggccgcccaggccaaatccaagcaggctatcttagcggcacagagacgaggagaagatgtggagacttccaagaaatgggctgctggccagaacaaacaacattctattaccaagaacacggccaagctggaccgggagacagaggagctgcaccatgacagggtgaccctggaggtgggcaaggtgatccagcaaggtcggcagagcaaggggcttacgcagaaggacctggccacgaaaatcaatgagaagccacaggtgatcgcggactatgagagcggacgggccatacccaataaccaggtgcttggcaaaatcgagcgggccattggcctcaggaaacccctaagagcaagtggagtccgagtcccttccccttgccagttcccgtcagcctgtgctgttggcgatggttctctgagcctgagcacagcgggtccgggccctgtcagcatggggccggaagccagttccacagaggaccccggctccggttcttccggagaggggtgttcatgctctgctgtctaaggtgatcagactcatcctcttcaaaattagatgtgggaaccaggagtgctcgtgtgctgagagcccagtgaggcacgggagcggcgtggccccccttccctgggaagatgttgaagaggggcagcgttggggggaggagggagctggtgctgcagtggccagtggctgtggctcatttcaggcctcaagctccggggaaaggacattggaaagcccatcgagaaggggcctagggcgaaatgaacacaaagcctcgaaatcagtgcgctccagctgatctcgttccgccggttccccttggccgccagttccgttctcctcacgggccgaacggaacaaggggtccagcttgcgggggaccctccccagcccattcctgctgtcaaacaaacaaaaccttgcaaagcgcaaaaaaaaaaagtcgaccggtttttaatttagtagtagtaggcggccgc

SEQ ID NO: 325504 - DNA, 1324 bp, Homo sapiens
ggacgtagcgtcgccgcgccaggtctctagcagctgccgctgagccgccggacggacgctcgtcttcgcccgccatggccgagagcgactgggacacggtgacggtgctgcgcaagaagggccctacggccgcccaggccaaatccaagcaggctatcttagcggcacagagacgaggagaagatgtggagacttccaagaaatgggctgctggccagaacaaacaacattctattaccaagaacacggccaagctggaccgggagacagaggagctgcaccatgacagggtgaccctggaggtgggcaaggtgatccagcaaggtcggcagagcaaggggcttacgcagaaggacctggccacgaaaatcaatgagaagccacaggtgatcgcggactatgagagcggacgggccatacccaataaccaggtgcttggcaaaatcgagcgggccattggtgagtgtccctccacccttcgccgggtccgctgaacagggaggctacccgctcccagctggggttggtgagagtgggactcgggggaagaagatggccctgggggtcccctgttctctgaattctggagctttgcttctccaggtagtacagactgagggatggtggggtctctgcaggcctcaggaaacccctaagagcaagtggagtccgagtcccttccccttgccagttcccgtcagcctgtgctgttggcgatggttctctgagcctgagcacagcgggtccgggccctgtcagcatggggccggaagccagttccacagaggaccccggctccggttcttccggagaggggtgttcatgctctgctgtctaaggtgatcagactcatcctcttcaaaattagatgtgggaaccaggagtgctcgtgtgctgagagcccagtgaggcacgggagcggcgtggccccccttccctgggaagatgttgaagaggggcagcgttggggggaggagggagctggtgctgcagtggccagtggctgtggctcatttcaggcctcaagctccggggaaaggacattggaaagcccatcgagaaggggcctagggcgaaatgaacacaaagcctcgaaatcagtgcgctccagctgatctcgttccgccggttccccttggccgccagttccgttctcctcacggcgacggacagggtcagttgcggggactccagccattctgtgtcaacaacaacttgcaggaaaaaaaaggggggcaaaatcccgggggcagttcggaccttttgaagggcctaggggtatacagggggggtacagggacgcctggtattgggactgggggag

SEQ ID NO: 325505 - DNA, 1601 bp, Homo sapiens
gcggccgcctactactactaaattcgcggccgcgtcgaccttacgcagaaggacctggccacgaaaatcaatgagaagccacaggtgatcgcggactatgagagcggacgggccatacccaataaccaggtgcttggcaaaatcgagcgggccattggcctcaagctccggggaaaggacattggaaagcccatcgagaaggggcctagggcgaaatgaacacaaagcctcgaaatcagtgcgctccagctgatctcgttccgccggttccccttggccgccagttccgttctcctcacgggccgaacggaacaaggggtccagcttgcgggggaccctccccagcccattcctgctgtcaaacaaacaaaaccttgcaaagcgcaaaaaaaaaaaaaaaaaaaaaaaaaaaaaaaaaaaaaaaaaaaaaaaaaaaaacaaaaaaaaaaaaaaaaaaaaaaaaaaaaaaacaaaacagaagaagagggggcggcgcagagagaaatcgaccaaccagcgaggaggaggacacgcgacgcaccacgacaccattgtatcagataaagagaagagaggggagcacacaccaactagagggagagtcttattataatagacaaaagagacaggcagagagagacgaagcacataaaaaaacaaacaagggcgaagcgagaagagaagagaacacacgagacaaaagaagagagcaaaacatacaaaggcaaaaaagagacacacacaagagaaggacgagggggagaaagaaagcaacgagcgggagcggaagagagaacacatcaaaccagagaagagagaataagacaagcgacgaaagagagagagaggacacacgacacaaacaatcaaggagaagacgggaggcgagaaaggtcagagaagagacgcacgaacaccacgacagacgtgaggcaagagatgttaaggccgaccgtagcggcgcacgagagagaagagaaagctacgggagacagacggcagagcgcagcagagcagacagtagcgataatcgagatgccagtgaaacgagaacgaagcgataagcaataagcaaccacaggaggcggggaccacgaagagtagacagataagaacgaagagaaggtggagcggaagagcacgaaacagcaagaccgagaaacgagcagaaaggagacagaagagcagaacgaagagaaacaaagagaaaggaagaatgagaaggcagagcgaagaaagaagaggaagaaaaacgaggacagacaaaagaggacaacgagaagaggagataagagaaggagaagaggcgaggagaaggagaagagacagggaaggaaaaagaagggagagagagagagaaagcaaggagacaagaggagaggcggagaagagcaagaagacaggcgaagacggcaaggaaaacggaagagaggaggaaacagaaacgacgagaggagaaacgagagagaccggaagaacgcccacacaacagaaagaaaacgagaggcgtgaaggacggacgacgagagacgaggaggagcggcaaaggaaagcaaaaacaacggagagagagcgagacaaagaagaaaacgagaaggaaa

SEQ ID NO: 325506 - DNA, 612 bp, Homo sapiens
ggacgtagcgtcgccgcgccaggtctctagcagctgccgctgagccgccggacggacgctcgtcttcgcccgccatggccgagagcgactgggacacggtgacggtgctgcgcaagaagggccctacggccgcccaggccaaatccaagcaggctatcttagcggcacagagacgaggagaagatgtggagacttccaagaaatgggctgctggccagaacaaacaacattctattaccaagaacacggccaagctggaccgggagacagaggagctgcaccatgacagggtgaccctggaggtgggcaaggtgatccagcaaggtcggcagagcaaggggcttacgcagaaggacctggccacgaaaatcaatgagaagccacaggtgatcgcggactacaaagcctcgaaatcagtgcgctccagctgatctcgttccgccggttccccttggccgccagttccgttctcctcacgggccgaacggaacaaggggtccagcttgcgggggaccctccccagcccattcctgctgtcaaacaaacaaaaccttgcaaagcgcaaaaaaaaaaagtcgaccggtttttaatttagtagtagtaggcggccgc

SEQ ID NO: 325507 - DNA, 789 bp, Homo sapiens
tataaagcacatcttctctttagaaaatcaatgagaagccacaggtgatcgcggactatgagagcggacgggccatacccaataaccaggtgcttggcaaaatcgagcgggccattggtgagtgtccctccacccttcgccgggtccgctgaacagggaggctacccgctcccagctggggttggtgagagtgggactcgggggaagaagatggccctgggggtcccctgttctctgaattctggagctttgcttctccaggtagtacagactgagggatggtggggtctctgcaggcctcaggaaacccctaagagcaagtggagtccgagtcccttccccttgccagttcccgtcagcctgtgctgttggcgatggttctctgagcctgagcacagcgggtccgggccctgtcagcatggggccggaagccagttccacagaggaccccggctccggttcttccggagaggggtgttcatgctctgctgtctaaggtgatcagactcatcctcttcaaaattagatgtgggaaccaggagtgctcgtgtgctgagagcccagtgaggcacgggagcggcgtggccccccttccctgggaagatgttgaagaggggcagcgttggggggaggagggagctggtgctgcagtggccagtggctgtggctcatttcaggcctcaagctccggggaaaggacattggaaagcccatcgagaaggggcctagggcgaaatgaacacaaagcctcgaaatcagtgcgctccagctgatctcgttccgccggtt

SEQ ID NO: 325508 - DNA, 736 bp, Homo sapiens
ggacgtagcgtcgccgcgccaggtctctagcagctgccgctgagccgccggacggacgctcgtcttcgcccgccatggccgagagcgactgggacacggtgacggtgctgcgcaagaagggccctacggccgcccaggccaaatccaagcaggctatcttagcggcacagagacgaggagaagatgtggagacttccaagaaatgggctgctggccagaacaaacaacattctattaccaagaacacggccaagctggaccgggagacagaggagctgcaccatgacagggtgaccctggaggtgggcaaggtgatccagcaaggtcggcagagcaaggggcttacgcagaaggacctggccacgaaaatcaatgagaagccacaggtgatcgcggactatgagagcggacgggccatacccaataaccaggtgcttggcaaaatcgagcgggccattggcctcaagctccggggaaaggacattggaaagcccatcgagaaggggcctagggcgaaatgaacacaaagcctcgaaatcagtgcgctccagctgatctcgttccgccggttccccttggccgccagttccgttctcctcacgggccgaacggaacaaggggtccagcttgcgggggaccctccccagcccattcctgctgtcaaacaaacaaaaccttgcaaagcgcaaaaaaaaaaagtcgaccggtttttaatttagtagtagtaggcggccgc

SEQ ID NO: 325509 - DNA, 1022 bp, Homo sapiens
ggacgtagcgtcgccgcgccaggtctctagcagctgccgctgagccgccggacggacgctcgtcttcgcccgccatggccgagagcgactgggacacggtgacggtgctgcgcaagaagggccctacggccgcccaggccaaatccaagcaggctatcttagcggcacagagacgaggagaagatgtggagacttccaagaaatgggctgctggccagaacaaacaacattctattaccaagaacacggccaagctggaccgggagacagaggagctgcaccatgacagggtgaccctggaggtgggcaaggtgatccagcaaggtcggcagagcaaggggcttacgcagaaggacctggccacgaaaatcaatgagaagccacaggtgatcgcggactatgagagcggacgggccatacccaataaccaggtgcttggcaaaatcgagcgggccattggcctcaagctccggggaaaggacattggaaagcccatcgagaaggggcctagggcgaaatgaacacaaagcctcgaaatcagtgcgctccagctgatctcgttccgccggttccccttggccgccagttccgttctcctcacgggccgaacggaacaaggggtccagcttgcgggggaccctccccagcccattcctgctgtcaaacaaacaaaaccttgcaaagcgcaaaaaaaggaattccggtaaactgaagacttttatttgggaatgaaaaaccttaaaaaaatctcttcatcgttgaactgtgcattttccctgcattttttcccaacaaaattttgttgggggttatgttactgaagaatgaacagatgagtaagtggaggtgttatgtaaaggcatattgtactcgaaatctgaagacctgcagcagatttaaattacaactcttgttataactttttaaaagattgtgaaaatatcaaaatataaatgaatcaagttttaatatactgtatgatgggtggatgaggctgtccattgtaccatttgtttgaattc

SEQ ID NO: 325510 - DNA, 478 bp, Homo sapiens
ggacgtagcgtcgccgcgccaggtctctagcagctgccgctgagccgccggacggacgctcgtcttcgcccgccatggccgagagcgactgggacacggtgacggtgctgcgcaagaagggccctacggccgcccaggccaaatccaagcaggctatcttagcggcacagagacgaggagaagatgtggagacttccaagaaatgggctgctggccagaacaaacaacattctattaccaagaacacggccaagctggaccgggagacagaggagctgcaccatgacagggtgaccctggaggtgggcaaggtgatccagcaaggtcggcagagcaaggggcttacgcagaaggacctggccacgaaaatcaatgagaagccacgccgctcccgtgcctcactgggctctcagcacacgagcactcctggttcccacatcaatggcccgctcgattttgccaagcacctgggtcgtac

SEQ ID NO: 325511 - DNA, 359 bp, Homo sapiens
ggacgtagcgtcgccgcgccaggtctctagcagctgccgctgagccgccggacggacgctcgtcttcgcccgccatggccgagagcgactgggacacggtgacggtgctgcgcaagaagggccctacggccgcccaggccaaatccaagcaggctatcttagcggcacagagacgaggagaagatgtggagacttccaagaaatgggcttcttgccagacaaacaacaatctattacaagacacgccaagctgaccggagacagagagctcacatacaggtacctgagtggcagtgatcacagtcgcagacagggctacgagaggactgcacgaaatataagcaaagtatcgctataac

SEQ ID NO: 325512 - DNA, 638 bp, Homo sapiens
  misc_feature (19)..(20): n is a, c, g, or t
  misc_feature (28)..(29): n is a, c, g, or t
cttaattcgcgaccgcgtnncggccttnnggccgcccaggccaaatccaagcaggctatcttagcggcacagagacgaggagaagatgtggagacttccaagaaatgggctgctggccagaacaaacaacattctattaccaagaacacggccaagctggaccgggagacagaggagctgcaccatgacagggtgaccctggaggtgggcaaggtgatccagcaaggtcggcagagcaaggggcttacgcagaaggacctggccacgaaaatcaatgagaagccacaggtgatcgcggactatgagagcggacgggccatacccaataaccaggtgcttggcaaaatcgagcgggccattggcctcaagctccggggaaaggacattggaaagcccatcgagaaggggcctagggcgaaatgaacacaaagcctcgaaatcagtgcgctccagctgatctcgttccgccggttccccttggccgccagttccgttctcctcacgggccgaacggaacaaggggtccagcttgcgggggaccctccccagcccattcctgctgtcaaacaaacaaaaccttgcaaagcgcaaaaaaaaaaagtcgaccggtttttaatttagtagtagtaggcggccgc

SEQ ID NO: 325513 - DNA, 632 bp, Homo sapiens
  misc_feature (37)..(37): n is a, c, g, or t
  misc_feature (39)..(39): n is a, c, g, or t
  misc_feature (43)..(43): n is a, c, g, or t
tgactctacggatcccttatttgtccggcgccaggcnanatcnaagtagctatcttagcggcacagagacgaggagaagatgtggagacttccaagaaatgggctgctggccagaacaaacaacattctattaccaagaacacggccaagctggaccgggagacagaggagctgcaccatgacagggtgaccctggaggtgggcaaggtgatccagcaaggtcggcagagcaaggggcttacgcagaaggacctggccacgaaaatcaatgagaagccacaggtgatcgcggactatgagagcggacgggccatacccaataaccaggtgcttggcaaaatcgagcgggccattggcctcaagctccggggaaaggacattggaaagcccatcgagaaggggcctagggcgaaatgaacacaaagcctcgaaatcagtgcgctccagctgatctcgttccgccggttccccttggccgccagttccgttctcctcacgggccgaacggaacaaggggtccagcttgcgggggaccctccccagcccattcctgctgtcaaacaaacaaaaccttgcaaagcgcaaaaaaaaaaagtcgaccggtttttaatttagtagtagtaggcggccgc

SEQ ID NO: 325514 - DNA, 793 bp, Homo sapiens
aatctgcatggggctggggctcctgtgctatttgtacaaataaacctgaggcagaagcaggaagcagtgggaatagctttgcgaaaaatgggcgcaatggccaagccagattgtatcatcacttgtgatggtaaaaacctcaccataaaaactgagagcactttgaaaacaacacagttttcttgtaccctggcagaagcaggaagcaggctatcttagcggcacagagacgaggagaagatgtggagacttccaagaaatgggctgctggccagaacaaacaacattctattaccaagaacacggccaagctggaccgggagacagaggagctgcaccatgacagggtgaccctggaggtgggcaaggtgatccagcaaggtcggcagagcaaggggcttacgcagaaggacctggccacgaaaatcaatgagaagccacaggtgatcgcggactatgagagcggacgggccatacccaataaccaggtgcttggcaaaatcgagcgggccattggcctcaagctccggggaaaggacattggaaagcccatcgagaaggggcctagggcgaaatgaacacaaagcctcgaaatcagtgcgctccagctgatctcgttccgccggttccccttggccgccagttccgttctcctcacgggccgaacggaacaaggggtccagcttgcgggggaccctccccagcccattcctgctgtcaaacaaacaaaaccttgcaaagcgcaaaaaaaaaaagtcgaccggtttttaatttagtagtagtaggcggccgc

SEQ ID NO: 325515 - DNA, 409 bp, Homo sapiens
ggacgtagcgtcgccgcgccaggtctctagcagctgccgctgagccgccggacggacgctcgtcttcgcccgccatggccgagagcgactgggacacggtgacggtgctgcgcaagaagggccctacggccgcccaggccaaatccaagcaggctatcttagcggcacagagacgaggagaagatgtggagacttccaagaaatgggctgctggccagaacaaacaacattctattaccaagaacacggccaagctggaccgggagacagaggagctgcaccatgacagggtgaccctggaggtgggcaaggtgatccagcaaggtcggcagagcaaggggcttacgcagaaggacctggccacggcgacaacaagttcacacaggtgatcgcgaagcaatgagagcga

SEQ ID NO: 325516 - DNA, 2301 bp, Homo sapiens
gttggagccggggctgagggtagaccccccagagatttgacatctgtgacacctgtgaaatgggttcgggtgctcatgactccatagctggcggaggagcacagcacagctgttgcaggggcagctaaggtttcctctgaaaatctgtcaggagcaaggactactttggcattaaccatcactgtttgatttcttgacaggtatgtgagatggggagtgatttgatttttttttttttaatagaaaagaggaatagttgttccccaaatgtttcttcctccactgccttccagtactttctttacatgaaagattagtgtaaaagtacaaaatcagcccaggaaacattcagcagccactagttactacatagaatttataaagtggatgttaaatggagagagagttggctcaggtcccctgaaatcttgtaggattaacttctctgaggaaaagaaaaatcaggtttgcattttgtattaatattctgcttttaggaagtaatagaaatacaagttgaagattgtctttacttacaaaattatattttaattttttttgagacatagtcttgctctgtcacccagtctggagtgcagtgctgtgatctcggctcactgtaaccaccatctcccagtctctagtgattctcatggctcagcctccctggttgctcagattacaagtgtatgccaccacacccagctaatttttgtattttttgtagagacagggtttcgccatgttggccaggctggtctcgaactcctggcctcaagtgatccgcctacctcggcttcccaaagtgctgggattataggcgtgagccaccgtgcccaaccacaaaattatatgtatatatatttaaacgtgtcaaacattttgctttctttctccattttaggtaaaatctcagccacagtaattgctttcttctgctttttctttataaaaacctgcttatgaaggccttctgatacagatagttaaatcgctgtagtaggaggctcaggttttctaagggattgcaaatgtgctgcatggtttttctattcctatgtcctggaagcctttgtttaaagtgggctttacaaatgtgtccctgaggtgcgtgagcaagagaacaatctcagccccaatacgggggctgtgttcttgccgtaagaatctgtagctgactggtgtgctgaacccgggcactctttttcctattgtttgccatggaaatttccactttggaccgagtaaggtcaactaggtgttttaaaattgtttttctcctatgtgattgggtgtgaagagggaaagtaggaatacactcagaattattactggattgcataaaagtgatagaagtgtagtggggttcacttcctcaattggtgcttcctagatttttctctcccatctcttcctgctttgtttctttaaagaaaaggctgttgtctctctttttaaatatttaagtctagtgagtttattttgtacgcaattgctttaattttaagggaagtaaatctgaaactatcttgaagcccaaaggatttttagtaagtggattaacagtgatgaggtatttgcgattactttaaatgccaaaatgcttgagaactttgccaggttaaaaattacttaatatattttagaatgtaggttagaaagtagtaggacaaggaatagctttattactcttgagaacacttggataaatgaaaatatagtttgcttccgtgttaagttgtggttgagctatggagtgaccctggagctgccgcatcccacaggcctgagctcagcaagggttcaattcaagagagatgacgtctccacttggataatggcagacagtgtgggtagcggccatgcactaggggaattcacctctgtcaaattaatactctcctgtctactggattcttcttgtgcttcacctggattaaaaagctgtactgcctcttttgaaacagataaaacctttctataagtctcaattaatgagcttgcacaatcttgtatatgtacaggaaacccctcctgtctcctaatgtgattagtactgtaaaatattctataaaactgattaaaaggggagagcagtttgattcacagggttttatgtttctgtcatctattttatattcagaagcatttctgaaaacgtatttgacttccgaatgttctgatgttctccgtgaattcacacacatcttttttatctgaacaataagggtgtttgctaagtatggcacaagaaggaactagaatgacctggcagtaactaacacaatggtgaacatctaa

SEQ ID NO: 325517 - DNA, 786 bp, Homo sapiens
gctggtctcgaactcctgacctcaggtgatctgccggcctcgacctcccaaagtgctgggattacaggtgtgagctaccacggctggcctgttttataatgttaaagcattcagatatgctagccttgtttgaagaccagttggggacaataggattagcttaccagctgttgagtattcataggagttactttttaggaagtggttgatttaataccaggctattccatactctcttgtccagttcacatgttaatcaatagcatactctgtgacattagtgatctagaaccacgttttcatctgtgcacagtgaactggcttatattgggatgaaaatcacaactttgacttaacacttaatctaactagcattaactagtccagacttacacatgtatttgcactgattttattcatgccctggtagctttgtttatctgggtcacaaaagctgaaattgtggtgtgctaagagaatcacaaatgtaacatacctcttatcttctatttagaggccccagacctaaagcaggaggagcgtctgcaagaactggagagctgttctggactgggtagcacatctgatgatacggatgtcagggaggtcagttcccgccccagcacaccaggcctcagtgttgtgtccggcataagtgcaacctctgaggatattcccaataagattgaagacctgagatctgagtgcagctctgattttgggggtaaagattctgtcactagtccagacatggatgaaataactcacggtaagagggggaaatga

SEQ ID NO: 325518 - DNA, 428 bp, Homo sapiens
gcattagtattgggataagaagtaaaaccactctcttctcagcaactagtctcttgatacataattgttgctattgataattcagttaagtatttgaagtttgttttttctttcttttttttccagagaactcttattattagtcaatggtaatttattcttgagttgctctgaatacctactagtgccataatattccaaatgaacctgggtatccgtttcttgggggtgggttttgtttagaggttatgggtgatggtgaaagtgcacatgattctccccgtgacgaagcactgcagaacatctcggctgatgatctcccagaactttaggaggccaagacaggtggatcgctggagcccaggagttggagaccagcttgggcaacatagcaaaatcccatctctataaaaaagaaaaaggaaaaa

SEQ ID NO: 325519 - DNA, 276 bp, Homo sapiens
tgtaagtttattcaatgcaaaagaatcctctccaattttactgaggtggctgaccacgtccacgaccaaatccgtctcaactggaatttggctgctgacccagccccagcctcagctttcttgtcggcactaagtggcacagcactccatctgtaggggtaagtgtactggagagagttggttatacattctaggaatctcaaaggtaaagtatgatttaaaaatatttttttaaaataatttttttaagtttgcctacagctacaaatttttaag

SEQ ID NO: 325520 - DNA, 6998 bp, Homo sapiens
tgcaggacgcagggaagccaacaggcgagtggcgaaggtggcggcagcggcggcgggggcagtcaccggctagggcgacggctccgaggccgagtggcggtccgacagagtcctccgtgtcctcccccgcatgacccccttggggtaagtgtactggagagagttggttatacattctaggaatctcaaagggtctggctctgtcacccaggctggagtgcagtgacacgatctcagctcactgtaacctccgcctcccgggttcaagcgatcctcccatctgaccctcccaagtagctggcattcagtgatcagcctttgagcctttcccacattgaagatggtgaaactagatattcatactctggctcatcacctcaagcaggaacgcttatatgtaaactctgagaaacagctcattcagaggctcaatgcagatgtacttaagacagctgaaaagttgtatcgtacagcatggattgcgaagcaacagagaatcaatttggatcggcttatcataaccagtgctgaagcttcccctgctgaatgttgccaacatgccaaaattttggaagatacacaatttgttgatgggtataagcaattgggatttcaggagactgcttatggagaattcttgagtcgattgagggaaaatcctcgtcttattgcctcctctttggttgctggagagaaacttaatcaggagaacacacaaagtgttatttacacagtttttacctccctgtatggcaattgcatcatgcaagaagatgaaagctacctccttcaggttttgcgatacttgattgaatttgaacttaaagaaagtgacaaccctaggcgacttttgaggagaggaacttgtgccttcagcatcttatttaaacttttttctgaaggactgttttctgccaaacttttcctcacagccactttacatgagccaattatgcaactgcttgttgaagatgaagatcacctggaaacagatccaaacaagctaattgagaggttctctccatctcagcaggaaaaactctttggagagaagggctcagatagattcaggcaaaaagttcaagaaatggtggagtccaatgaagcaaagctagtggctttggtgaacaaatttattggttatctcaaacagaacacatattgttttccacatagtttaaggtggatcgtgtctcagatgtacaaaaccctctcctgtgtagataggctggaagttggggaggtcagggcaatgtgtactgatctcctgttggcctgcttcatttgtcctgcagttgtcaatccagaacaatatggaataatttccgatgctcctattaatgaagtagcacgatttaatctgatgcaggtaggccgccttttgcagcagttagcaatgactggctctgaagagggagatccccgaacaaagagcagccttggaaagtttgacaaaagctgtgttgccgctttccttgatgttgtgattgggggccgtgcagtggagacccctccattgtcttccgtcaatcttctggaaggattgagcagaactgtggtttatataacctacagtcagcttattactctggtgaattttatgaagagtgtgatgtctggagatcaactgagagaagatagaatggctcttgacaatttattggcaaacctacccccggccaagccaggaaaaagtagcagtttagaaatgactccctacaatacacctcagctatctccagcaaccactccagcaaataaaaagaatcgattacctatagcaactcggagcagaagccgcaccaatatgctaatggacctacatatggaccatgaaggatcatctcaagaaaccatccaggaggtgcaaccagaagaggtgttggtcatttccttaggtacaggtccccagcttactccagggatgatgtcagaaaatgaggtcctaaacatgcagctttcggatggaggacaaggagatgtccctgttgatgaaaacaaactccatggtaaacctgataaaaccttgcgcttttccctctgcagtgataatctggaaggaatatctgaaggtccttcaaatcgctccaattcagtgtcctccctagacctagaaggagagtctgtgtcagaacttggagcaggaccttctggcagtaatggagttgaagctctacagctgttagaacatgagcaagctacaacacaggataaccttgatgataagctaaggaagtttgaaattcgtgacatgatgggattaacagatgatagggacatatcagaaacagtgagtgagacctggagtacagacgtcttgggaagtgactttgaccctaatattgatgaagatcgcttgcaagaaattgcaggtgctgcagcagagaacatgttaggcagtttgctgtgcctcccaggttcagggtcagtgcttcttgacccctgcactggttctaccatatcagagacaacaagtgaagcttggagtgtagaggtattgccaagtgactcagaggccccagacctaaagcaggaggagcgtctgcaagaactggagagctgttctggactgggtagcacatctgatgatacggatgtcagggaggtcagttcccgccccagcacaccaggcctcagtgttgtgtccggcataagtgcaacctctgaggatattcccaataagattgaagacctgagatctgagtgcagctctgattttgggggtaaagattctgtcactagtccagacatggatgaaataactcacggtgcccaccagctgacctctcctccttctcagtcagagtctctgctggccatgtttgatccactgtcttcacatgaaggggcttctgctgtggtaaggccaaaggttcactatgctaggccatcgcatccaccaccagatcccccaatcctggaaggagctgtgggaggaaatgaggccaggttgccaaactttggttcccatgttttaactccagctgaaatggaggcattcaagcaaaggcattcttaccctgagagactagttcgaagcaggagctctgatatagtatcttctgtccggagacccatgagtgaccccagctggaaccggcgtccaggaaatgaagagcgagaactccctccagctgcagccattggtgctacttctttggtggctgcacctcattcatcatcttcatccccgagtaaggactcctcaagaggagagactgaagaacgcaaagatagcgatgatgagaaatcagacaggaacagaccttggtggagaaaacgttttgtttcagccatgcctaaagctcctataccatttagaaagaaagaaaaacaagaaaaagacaaagatgatctggggcctgacagattctcaacactcacagatgatcccagccctagactcagtgcacaagctcaggtggctgaggatattctggacaaatacaggaatgccattaaacggaccagccccagtgatggagcaatggcaaactatgaaagtacagaggttatgggtgatggtgaaagtgcacatgattctccccgtgacgaagcactgcagaacatctcggctgatgatctcccagactctgcaagccaagcagcccacccgcaggattcagctttctcttacagagatgcaaaaaagaaactgaggcttgctctttgctctgcggactctgttgccttcccagtgctgacccattcaacaaggaatggtttaccagaccacacagacccagaagacaatgaaattgtatgcttcttaaaagttcaaatagctgaagcaattaatttacaagataagaatctaatggctcaacttcaagaaacaatgcgctgtgtgtgccgttttgataataggacttgtaggaaactgctggcttcgattgctgaggactacagaaaaagagccccatatattgcttatctcactcgttgtcgacaaggactacagaccacacaggctcacctggaaaggctattgcaaagagttttgcgggacaaagaagtggccaatcgatactttaccactgtctgtgtgagattactgcttgagagcaaagaaaagaagatcagggaattcattcaagactttcagaaactcaccgcagctgacgataaaactgctcaggtagaagattttctgcagtttctttatggtgcaatggcccaggatgtcatatggcaaaacgcgagtgaagaacagcttcaagatgcacagctggccattgagcgaagcgtgatgaaccggattttcaagctcgccttctaccctaatcaagatggggacatacttcgcgaccaggttcttcatgaacatatccagagattgtctaaagtagtgactgcaaatcacagagctcttcagataccagaggtttatcttcgagaagcaccatggccatctgcacaatcagaaatcaggacaataagtgcttataaaaccccccgggacaaagtgcagtgcatcctgagaatgtgctctacgattatgaacctcctgagcctggccaatgaggactctgtccctggagcggatgactttgttcctgtgttggtgtttgtgttgataaaggcaaatccaccctgtttgctgtctactgtgcagtatatcagtagcttttatgctagctgtctgtctggagaggagtcctattggtggatgcagttcacagcagcagtagaattcattaaaaccatcgatgaccgaaagtgaccaagaccaaggcccaccaaggcagcagactgttaatcagacaaacagatctctgagaaggtgcatcagctgctttgaaggctgaagattgttttgtatgatactgcacagcatcaggcattttaaagcagatctttactaaacaggttaatgagctaacaagcaggttctctcgtctttgggctctttcctttctgagttgcatattctattttcttgtccccaagtagagactagtactacaaaaagggaccacatttttcaagtatttctaagtataaaaaacaaaacaaaaatctcttaggaaatgtctagacctccattcttggattccctttctttccttttattttaaaaaagaacagtacccctcttttaagatgctgtcttacattaatgagcatctaatggaaagaaggtatgagttgcactgaggattagaatagtggtgcgttagtggcattatctataaatacactcacctaaattgaaagctaagaaggaaatgtaaatataatatatatttatatttgatgtaatatggacatctgcagattctaataaacaaggactattgctgatagtaggctgtgacatactgtcttgtgaaatggtttccttgacaaaatttaagctgagcttaaaagcaaaaaacaaaaagtacacagaaatatttattaaaatgtaatacagtttattgaactttctaggtatggagtttgatggacagggctgcctttaatgagtgtgaaggtcactaagtcacttagacatctcaccgtggaagtttgtgagcctgcattaggagatagactgattaccatacatgacataaaaaggaacagtggatagctcatactttatggtggttcttctcctccgaaataatatactgcagaaatcccagacagagctccttacaaacctttaattgtaatatatttttgatgattattcacattgaatgcacagaccaagaattcagtgaatgtcattttttaaaaaactaatttgtattgtctgctctagtgatacaagttttactagtgataaactattttaatcaaccatactattcttatggaaaaaaatatctattttggcaggtttctgtgcctttatttccctcttctgaaaaaaagtctgtgttttcatagtttggtttgcattgtatatcaataattaatcaggaatgggttttggtgcctgaaaaattggccatggaggcacaccaaagcttcaagcacaagtcttgtacatgggccatcactgtctggtttcacttcgtgtgtttcctaaacacatttagctgcttttttaacaaactcagccccatacttgagtcccttgttgttgggagcatttccaggcatcttttaagggaactgtgacaaacagcctcgggcagatgaacacggaggctctctgttgtctgtctctgagatctttgtgtctgggaatgcctaaagattttatttttttttctttgtttttattttattttattttatttttttgagacagagtctcaccctgttgcccaggctggagtgcaatggtgcgatcttggctcactgcaacctccacctcccagttcaagtgattcccctgcctcagcctcccgagtagctaggactacaggcgcatgtcaccaagcccggctaatttttgtatttttagtagaaacggggtttcaccatgttggccaggatgatcctcaatctcctgacctcgtgatccacccgccttggcctcccaaagtgcgggattacaagcgtgaaccaccctgcccagccagaaactagattttctttatgcctccaccccttcttattcatttactttacaataccaaaataacaaattgcataggagtgtgggatgtggtttctgccttctagagagagatcagaattaaactagtactatgaaatgtccttttgaatgttaggtcaagaaatccatgtacagagtcgtgcacttcattggctgtaactgtcaaacttgccttgtattagaagttaaatcccatcgtaaatacatcacgaggccagctgtgtgatttctgagacctagatgagagtccatttacttcagcctttgattcagtaaatgttaagcagcagaagacttcgaatggttgaaattcattgttacaggatttaactcataaaccaatgagagattttttttttctctgcaatggttgctaagtctattccatgttaacactgtggaaataaatatgaagatgtggacattgcaaaaaaaatct

SEQ ID NO: 325521 - DNA, 6832 bp, Homo sapiens
tgcaggacgcagggaagccaacaggcgagtggcgaaggtggcggcagcggcggcgggggcagtcaccggctagggcgacggctccgaggccgagtggcggtccgacagagtcctccgtgtcctcccccgcatgacccccttgtgatcagcctttgagcctttcccacattgaagatggtgaaactagatattcatactctggctcatcacctcaagcaggaacgcttatatgtaaactctgagaaacagctcattcagaggctcaatgcagatgtacttaagacagctgaaaagttgtatcgtacagcatggattgcgaagcaacagagaatcaatttggatcggcttatcataaccagtgctgaagcttcccctgctgaatgttgccaacatgccaaaattttggaagatacacaatttgttgatgggtataagcaattgggatttcaggagactgcttatggagaattcttgagtcgattgagggaaaatcctcgtcttattgcctcctctttggttgctggagagaaacttaatcaggagaacacacaaagtgttatttacacagtttttacctccctgtatggcaattgcatcatgcaagaagatgaaagctacctccttcaggttttgcgatacttgattgaatttgaacttaaagaaagtgacaaccctaggcgacttttgaggagaggaacttgtgccttcagcatcttatttaaacttttttctgaaggactgttttctgccaaacttttcctcacagccactttacatgagccaattatgcaactgcttgttgaagatgaagatcacctggaaacagatccaaacaagctaattgagaggttctctccatctcagcaggaaaaactctttggagagaagggctcagatagattcaggcaaaaagttcaagaaatggtggagtccaatgaagcaaagctagtggctttggtgaacaaatttattggttatctcaaacagaacacatattgttttccacatagtttaaggtggatcgtgtctcagatgtacaaaaccctctcctgtgtagataggctggaagttggggaggtcagggcaatgtgtactgatctcctgttggcctgcttcatttgtcctgcagttgtcaatccagaacaatatggaataatttccgatgctcctattaatgaagtagcacgatttaatctgatgcaggtaggccgccttttgcagcagttagcaatgactggctctgaagagggagatccccgaacaaagagcagccttggaaagtttgacaaaagctgtgttgccgctttccttgatgttgtgattgggggccgtgcagtggagacccctccattgtcttccgtcaatcttctggaaggattgagcagaactgtggtttatataacctacagtcagcttattactctggtgaattttatgaagagtgtgatgtctggagatcaactgagagaagatagaatggctcttgacaatttattggcaaacctacccccggccaagccaggaaaaagtagcagtttagaaatgactccctacaatacacctcagctatctccagcaaccactccagcaaataaaaagaatcgattacctatagcaactcggagcagaagccgcaccaatatgctaatggacctacatatggaccatgaaggatcatctcaagaaaccatccaggaggtgcaaccagaagaggtgttggtcatttccttaggtacaggtccccagcttactccagggatgatgtcagaaaatgaggtcctaaacatgcagctttcggatggaggacaaggagatgtccctgttgatgaaaacaaactccatggtaaacctgataaaaccttgcgcttttccctctgcagtgataatctggaaggaatatctgaaggtccttcaaatcgctccaattcagtgtcctccctagacctagaaggagagtctgtgtcagaacttggagcaggaccttctggcagtaatggagttgaagctctacagctgttagaacatgagcaagctacaacacaggataaccttgatgataagctaaggaagtttgaaattcgtgacatgatgggattaacagatgatagggacatatcagaaacagtgagtgagacctggagtacagacgtcttgggaagtgactttgaccctaatattgatgaagatcgcttgcaagaaattgcaggtgctgcagcagagaacatgttaggcagtttgctgtgcctcccaggttcagggtcagtgcttcttgacccctgcactggttctaccatatcagagacaacaagtgaagcttggagtgtagaggtattgccaagtgactcagaggccccagacctaaagcaggaggagcgtctgcaagaactggagagctgttctggactgggtagcacatctgatgatacggatgtcagggaggtcagttcccgccccagcacaccaggcctcagtgttgtgtccggcataagtgcaacctctgaggatattcccaataagattgaagacctgagatctgagtgcagctctgattttgggggtaaagattctgtcactagtccagacatggatgaaataactcacggtgcccaccagctgacctctcctccttctcagtcagagtctctgctggccatgtttgatccactgtcttcacatgaaggggcttctgctgtggtaaggccaaaggttcactatgctaggccatcgcatccaccaccagatcccccaatcctggaaggagctgtgggaggaaatgaggccaggttgccaaactttggttcccatgttttaactccagctgaaatggaggcattcaagcaaaggcattcttaccctgagagactagttcgaagcaggagctctgatatagtatcttctgtccggagacccatgagtgaccccagctggaaccggcgtccaggaaatgaagagcgagaactccctccagctgcagccattggtgctacttctttggtggctgcacctcattcatcatcttcatccccgagtaaggactcctcaagaggagagactgaagaacgcaaagatagcgatgatgagaaatcagacaggaacagaccttggtggagaaaacgttttgtttcagccatgcctaaagctcctataccatttagaaagaaagaaaaacaagaaaaagacaaagatgatctggggcctgacagattctcaacactcacagatgatcccagccctagactcagtgcacaagctcaggtggctgaggatattctggacaaatacaggaatgccattaaacggaccagccccagtgatggagcaatggcaaactatgaaagtacagaggttatgggtgatggtgaaagtgcacatgattctccccgtgacgaagcactgcagaacatctcggctgatgatctcccagactctgcaagccaagcagcccacccgcaggattcagctttctcttacagagatgcaaaaaagaaactgaggcttgctctttgctctgcggactctgttgccttcccagtgctgacccattcaacaaggaatggtttaccagaccacacagacccagaagacaatgaaattgtatgcttcttaaaagttcaaatagctgaagcaattaatttacaagataagaatctaatggctcaacttcaagaaacaatgcgctgtgtgtgccgttttgataataggacttgtaggaaactgctggcttcgattgctgaggactacagaaaaagagccccatatattgcttatctcactcgttgtcgacaaggactacagaccacacaggctcacctggaaaggctattgcaaagagttttgcgggacaaagaagtggccaatcgatactttaccactgtctgtgtgagattactgcttgagagcaaagaaaagaagatcagggaattcattcaagactttcagaaactcaccgcagctgacgataaaactgctcaggtagaagattttctgcagtttctttatggtgcaatggcccaggatgtcatatggcaaaacgcgagtgaagaacagcttcaagatgcacagctggccattgagcgaagcgtgatgaaccggattttcaagctcgccttctaccctaatcaagatggggacatacttcgcgaccaggttcttcatgaacatatccagagattgtctaaagtagtgactgcaaatcacagagctcttcagataccagaggtttatcttcgagaagcaccatggccatctgcacaatcagaaatcaggacaataagtgcttataaaaccccccgggacaaagtgcagtgcatcctgagaatgtgctctacgattatgaacctcctgagcctggccaatgaggactctgtccctggagcggatgactttgttcctgtgttggtgtttgtgttgataaaggcaaatccaccctgtttgctgtctactgtgcagtatatcagtagcttttatgctagctgtctgtctggagaggagtcctattggtggatgcagttcacagcagcagtagaattcattaaaaccatcgatgaccgaaagtgaccaagaccaaggcccaccaaggcagcagactgttaatcagacaaacagatctctgagaaggtgcatcagctgctttgaaggctgaagattgttttgtatgatactgcacagcatcaggcattttaaagcagatctttactaaacaggttaatgagctaacaagcaggttctctcgtctttgggctctttcctttctgagttgcatattctattttcttgtccccaagtagagactagtactacaaaaagggaccacatttttcaagtatttctaagtataaaaaacaaaacaaaaatctcttaggaaatgtctagacctccattcttggattccctttctttccttttattttaaaaaagaacagtacccctcttttaagatgctgtcttacattaatgagcatctaatggaaagaaggtatgagttgcactgaggattagaatagtggtgcgttagtggcattatctataaatacactcacctaaattgaaagctaagaaggaaatgtaaatataatatatatttatatttgatgtaatatggacatctgcagattctaataaacaaggactattgctgatagtaggctgtgacatactgtcttgtgaaatggtttccttgacaaaatttaagctgagcttaaaagcaaaaaacaaaaagtacacagaaatatttattaaaatgtaatacagtttattgaactttctaggtatggagtttgatggacagggctgcctttaatgagtgtgaaggtcactaagtcacttagacatctcaccgtggaagtttgtgagcctgcattaggagatagactgattaccatacatgacataaaaaggaacagtggatagctcatactttatggtggttcttctcctccgaaataatatactgcagaaatcccagacagagctccttacaaacctttaattgtaatatatttttgatgattattcacattgaatgcacagaccaagaattcagtgaatgtcattttttaaaaaactaatttgtattgtctgctctagtgatacaagttttactagtgataaactattttaatcaaccatactattcttatggaaaaaaatatctattttggcaggtttctgtgcctttatttccctcttctgaaaaaaagtctgtgttttcatagtttggtttgcattgtatatcaataattaatcaggaatgggttttggtgcctgaaaaattggccatggaggcacaccaaagcttcaagcacaagtcttgtacatgggccatcactgtctggtttcacttcgtgtgtttcctaaacacatttagctgcttttttaacaaactcagccccatacttgagtcccttgttgttgggagcatttccaggcatcttttaagggaactgtgacaaacagcctcgggcagatgaacacggaggctctctgttgtctgtctctgagatctttgtgtctgggaatgcctaaagattttatttttttttctttgtttttattttattttattttatttttttgagacagagtctcaccctgttgcccaggctggagtgcaatggtgcgatcttggctcactgcaacctccacctcccagttcaagtgattcccctgcctcagcctcccgagtagctaggactacaggcgcatgtcaccaagcccggctaatttttgtatttttagtagaaacggggtttcaccatgttggccaggatgatcctcaatctcctgacctcgtgatccacccgccttggcctcccaaagtgcgggattacaagcgtgaaccaccctgcccagccagaaactagattttctttatgcctccaccccttcttattcatttactttacaataccaaaataacaaattgcataggagtgtgggatgtggtttctgccttctagagagagatcagaattaaactagtactatgaaatgtccttttgaatgttaggtcaagaaatccatgtacagagtcgtgcacttcattggctgtaactgtcaaacttgccttgtattagaagttaaatcccatcgtaaatacatcacgaggccagctgtgtgatttctgagacctagatgagagtccatttacttcagcctttgattcagtaaatgttaagcagcagaagacttcgaatggttgaaattcattgttacaggatttaactcataaaccaatgagagattttttttttctctgcaatggttgctaagtctattccatgttaacactgtggaaataaatatgaagatgtggacattgcaaaaaaaatct

SEQ ID NO: 325522 - DNA, 6917 bp, Homo sapiens
tgcaggacgcagggaagccaacaggcgagtggcgaaggtggcggcagcggcggcgggggcagtcaccggctagggcgacggctccgaggccgagtggcggtccgacagagtcctccgtgtcctcccccgcatgacccccttggggtaagtgtactggagagagttggttatacattctaggaatctcaaagggtctggctctgtcacccaggctggagtgcagtgacacgatctcagctcactgtaacctccgcctcccgggttcaagcgatcctcccatctgaccctcccaagtagctggcattcagtgatcagcctttgagcctttcccacattgaagatggtgaaactagatattcatactctggctcatcacctcaagcaggaacgcttatatgtaaactctgagaaacagctcattcagaggctcaatgcagatgtacttaagacagctgaaaagttgtatcgtacagcatggattgcgaagcaacagagaatcaatttggatcggcttatcataaccagtgctgaagcttcccctgctgaatgttgccaacatgccaaaattttggaagatacacaatttgttgatgggtataagcaattgggatttcaggagactgcttatggagaattcttgagtcgattgagggaaaatcctcgtcttattgcctcctctttggttgctggagagaaacttaatcaggagaacacacaaagtgttatttacacagtttttacctccctgtatggcaattgcatcatgcaagaagatgaaagctacctccttcaggttttgcgatacttgattgaatttgaacttaaagaaagtgacaaccctaggcgacttttgaggagaggaacttgtgccttcagcatcttatttaaacttttttctgaaggactgttttctgccaaacttttcctcacagccactttacatgagccaattatgcaactgcttgttgaagatgaagatcacctggaaacagatccaaacaagctaattgagaggttctctccatctcagcaggaaaaactctttggagagaagggctcagatagattcaggcaaaaagttcaagaaatggtggagtccaatgaagcaaagctagtggctttggtgaacaaatttattggttatctcaaacagaacacatattgttttccacatagtttaaggtggatcgtgtctcagatgtacaaaaccctctcctgtgtagataggctggaagttggggaggtcagggcaatgtgtactgatctcctgttggcctgcttcatttgtcctgcagttgtcaatccagaacaatatggaataatttccgatgctcctattaatgaagtagcacgatttaatctgatgcaggtaggccgccttttgcagcagttagcaatgactggctctgaagagggagatccccgaacaaagagcagccttggaaagtttgacaaaagctgtgttgccgctttccttgatgttgtgattgggggccgtgcagtggagacccctccattgtcttccgtcaatcttctggaaggattgagcagaactgtggtttatataacctacagtcagcttattactctggtgaattttatgaagagtgtgatgtctggagatcaactgagagaagatagaatggctcttgacaatttattggcaaacctacccccggccaagccaggaaaaagtagcagtttagaaatgactccctacaatacacctcagctatctccagcaaccactccagcaaataaaaagaatcgattacctatagcaactcggagcagaagccgcaccaatatgctaatggacctacatatggaccatgaaggatcatctcaagaaaccatccaggaggtgcaaccagaagaggtgttggtcatttccttaggtacaggtccccagcttactccagggatgatgtcagaaaatgaggtcctaaacatgcagctttcggatggaggacaaggagatgtccctgttgatgaaaacaaactccatggtaaacctgataaaaccttgcgcttttccctctgcagtgataatctggaaggaatatctgaaggtccttcaaatcgctccaattcagtgtcctccctagacctagaaggagagtctgtgtcagaacttggagcaggaccttctggcagtaatggagttgaagctctacagctgttagaacatgagcaagctacaacacaggataaccttgatgataagctaaggaagtttgaaattcgtgacatgatgggattaacagatgatagggacatatcagaaacagtgagtgagacctggagtacagacgtcttgggaagtgactttgaccctaatattgatgaagatcgcttgcaagaaattgcaggtgctgcagcagagaacatgttaggcagtttgctgtgcctcccaggttcagggtcagtgcttcttgacccctgcactggttctaccatatcagagacaacaagtgaagcttggagtgtagaggtattgccaagtgactcagaggccccagacctaaagcaggaggagcgtctgcaagaactggagagctgttctggactgggtagcacatctgatgatacggatgtcagggaggtcagttcccgccccagcacaccaggcctcagtgttgtgtccggcataagtgcaacctctgaggatattcccaataagattgaagacctgagatctgagtgcagctctgattttgggggtaaagattctgtcactagtccagacatggatgaaataactcacggtgcccaccagctgacctctcctccttctcagtcagagtctctgctggccatgtttgatccactgtcttcacatgaaggggcttctgctgtggtaaggccaaaggttcactatgctaggccatcgcatccaccaccagatcccccaatcctggaaggagctgtgggaggaaatgaggccaggttgccaaactttggttcccatgttttaactccagctgaaatggaggcattcaagcaaaggcattcttaccctgagagactagttcgaagcaggagctctgatatagtatcttctgtccggagacccatgagtgaccccagctggaaccggcgtccaggaaatgaagagcgagaactccctccagctgcagccattggtgctacttctttggtggctgcacctcattcatcatcttcatccccgagtaaggactcctcaagaggagagactgaagaacgcaaagatagcgatgatgagaaatcagacaggaacagaccttggtggagaaaacgttttgtttcagccatgcctaaagatgatcccagccctagactcagtgcacaagctcaggtggctgaggatattctggacaaatacaggaatgccattaaacggaccagccccagtgatggagcaatggcaaactatgaaagtacagaggttatgggtgatggtgaaagtgcacatgattctccccgtgacgaagcactgcagaacatctcggctgatgatctcccagactctgcaagccaagcagcccacccgcaggattcagctttctcttacagagatgcaaaaaagaaactgaggcttgctctttgctctgcggactctgttgccttcccagtgctgacccattcaacaaggaatggtttaccagaccacacagacccagaagacaatgaaattgtatgcttcttaaaagttcaaatagctgaagcaattaatttacaagataagaatctaatggctcaacttcaagaaacaatgcgctgtgtgtgccgttttgataataggacttgtaggaaactgctggcttcgattgctgaggactacagaaaaagagccccatatattgcttatctcactcgttgtcgacaaggactacagaccacacaggctcacctggaaaggctattgcaaagagttttgcgggacaaagaagtggccaatcgatactttaccactgtctgtgtgagattactgcttgagagcaaagaaaagaagatcagggaattcattcaagactttcagaaactcaccgcagctgacgataaaactgctcaggtagaagattttctgcagtttctttatggtgcaatggcccaggatgtcatatggcaaaacgcgagtgaagaacagcttcaagatgcacagctggccattgagcgaagcgtgatgaaccggattttcaagctcgccttctaccctaatcaagatggggacatacttcgcgaccaggttcttcatgaacatatccagagattgtctaaagtagtgactgcaaatcacagagctcttcagataccagaggtttatcttcgagaagcaccatggccatctgcacaatcagaaatcaggacaataagtgcttataaaaccccccgggacaaagtgcagtgcatcctgagaatgtgctctacgattatgaacctcctgagcctggccaatgaggactctgtccctggagcggatgactttgttcctgtgttggtgtttgtgttgataaaggcaaatccaccctgtttgctgtctactgtgcagtatatcagtagcttttatgctagctgtctgtctggagaggagtcctattggtggatgcagttcacagcagcagtagaattcattaaaaccatcgatgaccgaaagtgaccaagaccaaggcccaccaaggcagcagactgttaatcagacaaacagatctctgagaaggtgcatcagctgctttgaaggctgaagattgttttgtatgatactgcacagcatcaggcattttaaagcagatctttactaaacaggttaatgagctaacaagcaggttctctcgtctttgggctctttcctttctgagttgcatattctattttcttgtccccaagtagagactagtactacaaaaagggaccacatttttcaagtatttctaagtataaaaaacaaaacaaaaatctcttaggaaatgtctagacctccattcttggattccctttctttccttttattttaaaaaagaacagtacccctcttttaagatgctgtcttacattaatgagcatctaatggaaagaaggtatgagttgcactgaggattagaatagtggtgcgttagtggcattatctataaatacactcacctaaattgaaagctaagaaggaaatgtaaatataatatatatttatatttgatgtaatatggacatctgcagattctaataaacaaggactattgctgatagtaggctgtgacatactgtcttgtgaaatggtttccttgacaaaatttaagctgagcttaaaagcaaaaaacaaaaagtacacagaaatatttattaaaatgtaatacagtttattgaactttctaggtatggagtttgatggacagggctgcctttaatgagtgtgaaggtcactaagtcacttagacatctcaccgtggaagtttgtgagcctgcattaggagatagactgattaccatacatgacataaaaaggaacagtggatagctcatactttatggtggttcttctcctccgaaataatatactgcagaaatcccagacagagctccttacaaacctttaattgtaatatatttttgatgattattcacattgaatgcacagaccaagaattcagtgaatgtcattttttaaaaaactaatttgtattgtctgctctagtgatacaagttttactagtgataaactattttaatcaaccatactattcttatggaaaaaaatatctattttggcaggtttctgtgcctttatttccctcttctgaaaaaaagtctgtgttttcatagtttggtttgcattgtatatcaataattaatcaggaatgggttttggtgcctgaaaaattggccatggaggcacaccaaagcttcaagcacaagtcttgtacatgggccatcactgtctggtttcacttcgtgtgtttcctaaacacatttagctgcttttttaacaaactcagccccatacttgagtcccttgttgttgggagcatttccaggcatcttttaagggaactgtgacaaacagcctcgggcagatgaacacggaggctctctgttgtctgtctctgagatctttgtgtctgggaatgcctaaagattttatttttttttctttgtttttattttattttattttatttttttgagacagagtctcaccctgttgcccaggctggagtgcaatggtgcgatcttggctcactgcaacctccacctcccagttcaagtgattcccctgcctcagcctcccgagtagctaggactacaggcgcatgtcaccaagcccggctaatttttgtatttttagtagaaacggggtttcaccatgttggccaggatgatcctcaatctcctgacctcgtgatccacccgccttggcctcccaaagtgcgggattacaagcgtgaaccaccctgcccagccagaaactagattttctttatgcctccaccccttcttattcatttactttacaataccaaaataacaaattgcataggagtgtgggatgtggtttctgccttctagagagagatcagaattaaactagtactatgaaatgtccttttgaatgttaggtcaagaaatccatgtacagagtcgtgcacttcattggctgtaactgtcaaacttgccttgtattagaagttaaatcccatcgtaaatacatcacgaggccagctgtgtgatttctgagacctagatgagagtccatttacttcagcctttgattcagtaaatgttaagcagcagaagacttcgaatggttgaaattcattgttacaggatttaactcataaaccaatgagagattttttttttctctgcaatggttgctaagtctattccatgttaacactgtggaaataaatatgaagatgtggacattgcaaaaaaaatct

SEQ ID NO: 325523 - DNA, 6476 bp, Homo sapiens
tgcaggacgcagggaagccaacaggcgagtggcgaaggtggcggcagcggcggcgggggcagtcaccggctagggcgacggctccgaggccgagtggcggtccgacagagtcctccgtgtcctcccccgcatgacccccttggggtaagtgtactggagagagttggttatacattctaggaatctcaaagggtctggctctgtcacccaggctggagtgcagtgacacgatctcagctcactgtaacctccgcctcccgggttcaagcgatcctcccatctgaccctcccaagtagctggcattcagtgatcagcctttgagcctttcccacattgaagatggtgaaactagatattcatactctggctcatcacctcaagcaggaacgcttatatgtaaactctgagaaacagctcattcagaggctcaatgcagatgtacttaagacagctgaaaagttgtatcgtacagcatggattgcgaagcaacagagaatcaatttggatcggcttatcataaccagtgctgaagcttcccctgctgaatgttgccaacatgccaaaattttggaagatacacaatttgttgatgggtataagcaattgggatttcaggagactgcttatggagaattcttgagtcgattgagggaaaatcctcgtcttattgcctcctctttggttgctggagagaaacttaatcaggagaacacacaaagtgttatttacacagtttttacctccctgtatggcaattgcatcatgcaagaagatgaaagctacctccttcaggttttgcgatacttgattgaatttgaacttaaagaaagtgacaaccctaggcgacttttgaggagaggaacttgtgccttcagcatcttatttaaacttttttctgaaggactgttttctgccaaacttttcctcacagccactttacatgagccaattatgcaactgcttgttgaagatgaagatcacctggaaacagatccaaacaagctaattgagaggttctctccatctcagcaggaaaaactctttggagagaagggctcagatagattcaggcaaaaagttcaagaaatggtggagtccaatgaagcaaagctagtggctttggtgaacaaatttattggttatctcaaacagaacacatattgttttccacatagtttaaggtggatcgtgtctcagatgtacaaaaccctctcctgtgtagataggctggaagttggggaggtcagggcaatgtgtactgatctcctgttggcctgcttcatttgtcctgcagttgtcaatccagaacaatatggaataatttccgatgctcctattaatgaagtagcacgatttaatctgatgcaggtaggccgccttttgcagcagttagcaatgactggctctgaagagggagatccccgaacaaagagcagccttggaaagtttgacaaaagctgtgttgccgctttccttgatgttgtgattgggggccgtgcagtggagacccctccattgtcttccgtcaatcttctggaaggattgagcagaactgtggtttatataacctacagtcagcttattactctggtgaattttatgaagagtgtgatgtctggagatcaactgagagaagatagaatggctcttgacaatttattggcaaacctacccccggccaagccaggaaaaagtagcagtttagaaatgactccctacaatacacctcagctatctccagcaaccactccagcaaataaaaagaatcgattacctatagcaactcggagcagaagccgcaccaatatgctaatggacctacatatggaccatgaaggatcatctcaagaaaccatccaggaggtgcaaccagaagaggtgttggtcatttccttaggtacaggtccccagcttactccagggatgatgtcagaaaatgaggtcctaaacatgcagctttcggatggaggacaaggagatgtccctgttgatgaaaacaaactccatggtaaacctgataaaaccttgcgcttttccctctgcagtgataatctggaaggaatatctgaaggtccttcaaatcgctccaattcagtgtcctccctagacctagaaggagagtctgtgtcagaacttggagcaggaccttctggcagtaatggagttgaagctctacagctgttagaacatgagcaagctacaacacaggataaccttgatgataagctaaggaagtttgaaattcgtgacatgatgggattaacagatgatagggacatatcagaaacagtgagtgagacctggagtacagacgtcttgggaagtgactttgaccctaatattgatgaagatcgcttgcaagaaattgcaggtgctgcagcagagaacatgttaggcagtttgctgtgcctcccaggttcagggtcagtgcttcttgacccctgcactggttctaccatatcagagacaacaagtgaagcttggagtgtagaggtattgccaagtgactcagaggccccagacctaaagcaggaggagcgtctgcaagaactggagagctgttctggactgggtagcacatctgatgatacggatgtcagggaggtcagttcccgccccagcacaccaggcctcagtgttgtgtccggcataagtgcaacctctgaggatattcccaataagattgaagacctgagatctgagtgcagctctgattttgggggtaaagattctgtcactagtccagacatggatgaaataactcacgattttctttatatacttcagccaaaacaacattttcaacacattgaagcagaagcagacatgagaatccagctgtcttctagtgcccaccagctgacctctcctccttctcagtcagagtctctgctggccatgtttgatccactgtcttcacatgaaggggcttctgctgtggtaaggccaaaggttcactatgctaggccatcgcatccaccaccagatcccccaatcctggaaggagctgtgggaggaaatgaggccaggttgccaaactttggttcccatgttttaactccagctgaaatggaggcattcaagcaaaggcattcttaccctgagagactagttcgaagcaggagctctgatatagtatcttctgtccggagacccatgagtgaccccagctggaaccggcgtccaggaaatgaagagcgagaactccctccagctgcagccattggtgctacttctttggtggctgcacctcattcatcatcttcatccccgagtaaggactcctcaagaggagagactgaagaacgcaaagatagcgatgatgagaaatcagacaggaacagaccttggtggagaaaacgttttgtttcagccatgcctaaagctcctataccatttagaaagaaagaaaaacaagaaaaagacaaagatgatctggggcctgacagattctcaacactcacagatgatcccagccctagactcagtgcacaagctcaggtggctgaggatattctggacaaatacaggaatgccattaaacggaccagccccagtgatggagcaatggcaaactatgaaagtacagaggttatgggtgatggtgaaagtgcacatgattctccccgtgacgaagcactgcagaacatctcggctgatgatctcccagactctgcaagccaagcagcccacccgcaggattcagctttctcttacagagatgcaaaaaagaaactgaggcttgctctttgctctgcggactctgttgccttcccagtgctgacccattcaacaaggaatggtttaccagaccacacagacccagaagacaatgaaattgtatgcttcttaaaagttcaaatagctgaagcaattaatttacaagataagaatctaatggctcaacttcaagaaacaatgcgctgtgtgtgccgttttgataataggacttgtaggaaactgctggcttcgattgctgaggactacagaaaaagagccccatatattgcttatctcactcgttgtcgacaaggactacagaccacacaggctcacctggaaaggctattgcaaagagttttgcgggacaaagaagtggccaatcgatactttaccactgtctgtgtgagattactgcttgagagcaaagaaaagaagatcagggaattcattcaagactttcagaaactcaccgcagctgacgataaaactgctcaggtagaagattttctgcagtttctttatggtgcaatggcccaggatgtcatatggcaaaacgcgagtgaagaacagcttcaagatgcacagctggccattgagcgaagcgtgatgaaccggattttcaagctcgccttctaccctaatcaagatggggacatacttcgcgaccaggttcttcatgaacatatccagagattgtctaaagtagtgactgcaaatcacagagctcttcagataccagaggtttatcttcgagaagcaccatggccatctgcacaatcagaaatcaggacaataagtgcttataaaaccccccgggacaaagtgcagtgcatcctgagaatgtgctctacgattatgaacctcctgagcctggccaatgaggactctgtccctggagcggatgactttgttcctgtgttggtgtttgtgttgataaaggcaaatccaccctgtttgctgtctactgtgcagtatatcagtagcttttatgctagctgtctgtctggagaggagtcctattggtggatgcagttcacagcagcagtagaattcattaaaaccatcgatgaccgaaagtgaccaagaccaaggcccaccaaggcagcagactgttaatcagacaaacagatctctgagaaggtgcatcagctgctttgaaggctgaagattgttttgtatgatactgcacagcatcaggcattttaaagcagatctttactaaacaggttaatgagctaacaagcaggttctctcgtctttgggctctttcctttctgagttgcatattctattttcttgtccccaagtagagactagtactacaaaaagggaccacatttttcaagtatttctaagtataaaaaacaaaacaaaaatctcttaggaaatgtctagacctccattcttggattccctttctttccttttattttaaaaaagaacagtacccctcttttaagatgctgtcttacattaatgagcatctaatggaaagaaggtatgagttgcactgaggattagaatagtggtgcgttagtggcattatctataaatacactcacctaaattgaaagctaagaaggaaatgtaaatataatatatatttatatttgatgtaatatggacatctgcagattctaataaacaaggactattgctgatagtaggctgtgacatactgtcttgtgaaatggtttccttgacaaaatttaagctgagcttaaaagcaaaaaacaaaaagtacacagaaatatttattaaaatgtaatacagtttattgaactttctaggtatggagtttgatggacagggctgcctttaatgagtgtgaaggtcactaagtcacttagacatctcaccgtggaagtttgtgagcctgcattaggagatagactgattaccatacatgacataaaaaggaacagtggatagctcatactttatggtggttcttctcctccgaaataatatactgcagaaatcccagacagagctccttacaaacctttaattgtaatatatttttgatgattattcacattgaatgcacagaccaagaattcagtgaatgtcattttttaaaaaactaatttgtattgtctgctctagtgatacaagttttactagtgataaactattttaatcaaccatactattcttatggaaaaaaatatctattttggcaggtttctgtgcctttatttccctcttctgaaaaaaagtctgtgttttcatagtttggtttgcattgtatatcaataattaatcaggaatgggttttggtgcctgaaaaattggccatggaggcacaccaaagcttcaagcacaagtcttgtacatgggccatcactgtctggtttcacttcgtgtgtttcctaaacacatttagctgcttttttaacaaactcagccccatacttgagtcccttgttgttgggagcatttccaggcatcttttaagggaactgtgacaaacagcctcgggcagatgaacacggaggctctctgttgtctgtctctgagatctttgtgtctgggaatgcctaaagattttatttttttttctttgtttttattttattttattttatttttttgagacagagtctcaccctgttgccaagatcgcactactgcactccagtctggcgacagagcaagactccatctcaaaaaaaaaaaaggcagttaacaactttaaaacttttaacaaatctagtattggacctgcttaataaattcagggtagagg

SEQ ID NO: 325524 - DNA, 4328 bp, Homo sapiens
  misc_feature (1168)..(1168): n is a, c, g, or t
aagccattcaacaaatctctaggaagttccatactttcccacattttcctgtcttcttctgagccctccaaactgttccatcctctgcctgttacccagttccaaagctgctttcacattttcgggtgtctttttagcagtaccccactctcggtaccaatttactgtatttgtctgttattatgctgctgataaagacatacctgagactgggcaatttaacaaaagaaagaggtttaattggacttaacagttccatgtggctggggaggcctcaaaattatggcggaaggtgaaaggcacatttcacatggcagcagacaagagaagagagcttgtgcagggaaattccgttttttaaaacaatcagatctcttgagacttagtatcacgagaacagcacaggaaagacatgcctccatgattcaattccctcccacaacacatggaaattcaagatgagatgtgggtggggaatacagccaaatcatatcaatttctaagcaacatatttggatatttactctggaaatgtagttacaaatgagcagttccaaatagaagagtgcaatttacttcagctttgcacaaaagcaggtaaagaggtatgcctatattttgaggctagaacaactagaatatcatatttcttttcttagtggtgataggaaagcctactttcctggaccagagaagcagatgtaagtagccttaggaattgctgtgctttttctgctgccagtcccctgctcatgattatggagaaaaatgtaactgagatgcttaggtagtgaggaggcttcaaggcttagggaatgggcactctagtaaatgtgacatttagactataagcaagtaattggtgggggatgtttgtgacctagtgacatataacctgtatttgttgttattgttggtcatctgtagctgtcaatttcctattaagtatgaggtcctatagctccagtataaaatacaccaagtatgcagaggggcttagtaacatttagtgaattaggtaactaagtcttcagccccatagatcctcccaaacaaaatgcaaaatgggtgtctgttctgcagctggcaccatgatcagtctctaccatgtctgcagcctgacatgctactttgtatatgtgctactgaagagagcacagacatgctnctttgtaaaaccagtctgtgcagtaatttttctaaagaaaagttaggacccttattcttcaaagagagtatgcactgaatatatctgatgtcatgcaaagtatttttccttttagaaaaagagccccatatattgcttatctcactcgttgtcgacaaggactacagaccacacaggctcacctggaaaggctattgcaaagagttttgcgggacaaagaagtggccaatcgatactttaccactgtctgtgtgagattactgcttgagagcaaagaaaagaagatcagggaattcattcaagactttcagaaactcaccgcagctgacgataaaactgctcaggtagaagattttctgcagtttctttatggtgcaatggcccaggatgtcatatggcaaaacgcgagtgatgaaccggattttcaagctcgccttctaccctaatcaagatggggacatacttcgcgaccaggttcttcatgaacatatccagagattgtctaaagtagtgactgcaaatcacagagctcttcagataccagaggtttatcttcgagaagcaccatggccatctgcacaatcagaaatcaggacaataagtgcttataaaaccccccgggacaaagtgcagtgcatcctgagaatgtgctctacgattatgaacctcctgagcctggccaatgaggactctgtccctggagcggatgactttgttcctgtgttggtgtttgtgttgataaaggcaaatccaccctgtttgctgtctactgtgcagtatatcagtagcttttatgctagctgtctgtctggagaggagtcctattggtggatgcagttcacagcagcagtagaattcattaaaaccatcgatgaccgaaagtgaccaagaccaaggcccaccaaggcagcagactgttaatcagacaaacagatctctgagaaggtgcatcagctgctttgaaggctgaagattgttttgtatgatactgcacagcatcaggcattttaaagcagatctttactaaacaggttaatgagctaacaagcaggttctctcgtctttgggctctttcctttctgagttgcatattctattttcttgtccccaagtagagactagtactacaaaaagggaccacatttttcaagtatttctaagtataaaaaacaaaacaaaaatctcttaggaaatgtctagacctccattcttggattccctttctttccttttattttaaaaaagaacagtacccctcttttaagatgctgtcttacattaatgagcatctaatggaaagaaggtatgagttgcactgaggattagaatagtggtgcgttagtggcattatctataaatacactcacctaaattgaaagctaagaaggaaatgtaaatataatatatatttatatttgatgtaatatggacatctgcagattctaataaacaaggactattgctgatagtaggctgtgacatactgtcttgtgaaatggtttccttgacaaaatttaagctgagcttaaaagcaaaaaacaaaaagtacacagaaatatttattaaaatgtaatacagtttattgaactttctaggtatggagtttgatggacagggctgcctttaatgagtgtgaaggtcactaagtcacttagacatctcaccgtggaagtttgtgagcctgcattaggagatagactgattaccatacatgacataaaaaggaacagtggatagctcatactttatggtggttcttctcctccgaaataatatactgcagaaatcccagacagagctccttacaaacctttaattgtaatatatttttgatgattattcacattgaatgcacagaccaagaattcagtgaatgtcattttttaaaaaactaatttgtattgtctgctctagtgatacaagttttactagtgataaactattttaatcaaccatactattcttatggaaaaaaatatctattttggcaggtttctgtgcctttatttccctcttctgaaaaaaagtctgtgttttcatagtttggtttgcattgtatatcaataattaatcaggaatgggttttggtgcctgaaaaattggccatggaggcacaccaaagcttcaagcacaagtcttgtacatgggccatcactgtctggtttcacttcgtgtgtttcctaaacacatttagctgcttttttaacaaactcagccccatacttgagtcccttgttgttgggagcatttccaggcatcttttaagggaactgtgacaaacagcctcgggcagatgaacacggaggctctctgttgtctgtctctgagatctttgtgtctgggaatgcctaaagattttatttttttttctttgtttttattttattttattttatttttttgagacagagtctcaccctgttgcccaggctggagtgcaatggtgcgatcttggctcactgcaacctccacctcccagttcaagtgattcccctgcctcagcctcccgagtagctaggactacaggcgcatgtcaccaagcccggctaatttttgtatttttagtagaaacggggtttcaccatgttggccaggatgatcctcaatctcctgacctcgtgatccacccgccttggcctcccaaagtgcgggattacaagcgtgaaccaccctgcccagccagaaactagattttctttatgcctccaccccttcttattcatttactttacaataccaaaataacaaattgcataggagtgtgggatgtggtttctgccttctagagagagatcagaattaaactagtactatgaaatgtccttttgaatgttaggtcaagaaatccatgtacagagtcgtgcacttcattggctgtaactgtcaaacttgccttgtattagaagttaaatcccatcgtaaatacatcacgaggccagctgtgtgatttctgagacctagatgagagtccatttacttcagcctttgattcagtaaatgttaagcagcagaagacttcgaatggttgaaattcattgttacaggatttaactcataaaccaatgagagattttttttttctctgcaatggttgctaagtctattccatgttaacactgtggaaataaatatgaagatgtggacattgcaaaaaaaatct

SEQ ID NO: 325525 - DNA, 5387 bp, Homo sapiens
tgcaggacgcagggaagccaacaggcgagtggcgaaggtggcggcagcggcggcgggggcagtcaccggctagggcgacggctccgaggccgagtggcggtccgacagagtcctccgtgtcctcccccgcatgacccccttggggtaagtgtactggagagagttggttatacattctaggaatctcaaagggtctggctctgtcacccaggctggagtgcagtgacacgatctcagctcactgtaacctccgcctcccgggttcaagcgatcctcccatctgaccctcccaagtagctggcattcagtgatcagcctttgagcctttcccacattgaagatggtgaaactagatattcatactctggctcatcacctcaagcaggaacgcttatatgtaaactctgagaaacagctcattcagaggctcaatgcagatgtacttaagacagctgaaaagttgtatcgtacagcatggattgcgaagcaacagagaatcaatttggatcggcttatcataaccagtgctgaagcttcccctgctgaatgttgccaacatgccaaaattttggaagatacacaatttgttgatgggtataagcaattgggatttcaggagactgcttatggagaattcttgagtcgattgagggaaaatcctcgtcttattgcctcctctttggttgctggagagaaacttaatcaggagaacacacaaagtgttatttacacagtttttacctccctgtatggcaattgcatcatgcaagaagatgaaagctacctccttcaggttttgcgatacttgattgaatttgaacttaaagaaagtgacaaccctaggcgacttttgaggagaggaacttgtgccttcagcatcttatttaaacttttttctgaaggactgttttctgccaaacttttcctcacagccactttacatgagccaattatgcaactgcttgttgaagatgaagatcacctggaaacagatccaaacaagctaattgagaggttctctccatctcagcaggaaaaactctttggagagaagggctcagatagattcaggcaaaaagttcaagaaatggtggagtccaatgaagcaaagctagtggctttggtgaacaaatttattggttatctcaaacagaacacatattgttttccacatagtttaaggtggatcgtgtctcagatgtacaaaaccctctcctgtgtagataggctggaagttggggaggtcagggcaatgtgtactgatctcctgttggcctgcttcatttgtcctgcagttgtcaatccagaacaatatggaataatttccgatgctcctattaatgaagtagcacgatttaatctgatgcaggtaggccgccttttgcagcagttagcaatgactggctctgaagagggagatccccgaacaaagagcagccttggaaagtttgacaaaagctgtgttgccgctttccttgatgttgtgattgggggccgtgcagtggagacccctccattgtcttccgtcaatcttctggaaggattgagcagaactgtggtttatataacctacagtcagcttattactctggtgaattttatgaagagtgtgatgtctggagatcaactgagagaagatagaatggctcttgacaatttattggcaaacctacccccggccaagccaggaaaaagtagcagtttagaaatgactccctacaatacacctcagctatctccagcaaccactccagcaaataaaaagaatcgattacctatagcaactcggagcagaagccgcaccaatatgctaatggacctacatatggaccatgaaggatcatctcaagaaaccatccaggaggtgcaaccagaagaggtgttggtcatttccttaggtacaggtccccagcttactccagggatgatgtcagaaaatgaggtcctaaacatgcagctttcggatggaggacaaggagatgtccctgttgatgaaaacaaactccatggtaaacctgataaaaccttgcgcttttccctctgcagtgataatctggaaggaatatctgaaggtccttcaaatcgctccaattcagtgtcctccctagacctagaaggagagtctgtgtcagaacttggagcaggaccttctggcagtaatggagttgaagctctacagctgttagaacatgagcaagctacaacacaggataaccttgatgataagctaaggaagtttgaaattcgtgacatgatgggattaacagatgatagggacatatcagaaacagtgagtgagacctggagtacagacgtcttgggaagtgactttgaccctaatattgatgaagatcgcttgcaagaaattgcaggtgctgcagcagagaacatgttaggcagtttgctgtgcctcccaggttcagggtcagtgcttcttgacccctgcactggttctaccatatcagagacaacaagtgaagcttggagtgtagaggtattgccaagtgactcagaggccccagacctaaagcaggaggagcgtctgcaagaactggagagctgttctggactgggtagcacatctgatgatacggatgtcagggaggtcagttcccgccccagcacaccaggcctcagtgttgtgtccggcataagtgcaacctctgaggatattcccaataagattgaagacctgagatctgagtgcagctctgattttgggggtaaagattctgtcactagtccagacatggatgaaataactcacgattttctttatatacttcagccaaaacaacattttcaacacattgaagcagaagcagacatgagaatccagctgtcttctagtgcccaccagctgacctctcctccttctcagtcagagtctctgctggccatgtttgatccactgtcttcacatgaaggggcttctgctgtggtaaggccaaaggttcactatgctaggccatcgcatccaccaccagatcccccaatcctggaaggagctgtgggaggaaatgaggccaggttgccaaactttggttcccatgttttaactccagctgaaatggaggcattcaagcaaaggcattcttaccctgagagactagttcgaagcaggagctctgatatagtatcttctgtccggagacccatgagtgaccccagctggaaccggcgtccaggaaatgaagagcgagaactccctccagctgcagccattggtgctacttctttggtggctgcacctcattcatcatcttcatccccgagtaaggactcctcaagaggagagactgaagaacgcaaagatagcgatgatgagaaatcagacaggaacagaccttggtggagaaaacgttttgtttcagccatgcctaaagctcctataccatttagaaagaaagaaaaacaagaaaaagacaaagatgatctggggcctgacagattctcaacactcacagatgatcccagccctagactcagtgcacaagctcaggtggctgaggatattctggacaaatacaggaatgccattaaacggaccagccccagtgatggagcaatggcaaactatgaaagtacagaggttatgggtgatggtgaaagtgcacatgattctccccgtgacgaagcactgcagaacatctcggctgatgatctcccagactctgcaagccaagcagcccacccgcaggattcagctttctcttacagagatgcaaaaaagaaactgaggcttgctctttgctctgcggactctgttgccttcccagtgctgacccattcaacaaggaatggtttaccagaccacacagacccagaagacaatgaaattgtatgcttcttaaaagttcaaatagctgaagcaattaatttacaagataagaatctaatggctcaacttcaagaaacaatgcgctgtgtgtgccgttttgataataggacttgtaggaaactgctggcttcgattgctgaggactacagaaaaagagccccatatattgcttatctcactcgttgtcgacaaggactacagaccacacaggctcacctggaaaggctattgcaaagagttttgcgggacaaagaagtggccaatcgatactttaccactgtctgtgtgagattactgcttgagagcaaagaaaagaagatcagggaattcattcaagactttcagaaactcaccgcagctgacgataaaactgctcaggtagaagattttctgcagtttctttatggtgcaatggcccaggatgtcatatggcaaaacgcgagtgaagaacagcttcaagatgcacagctggccattgagcgaagcgtgatgaaccggattttcaagctcgccttctaccctaatcaagatggggacatacttcgcgaccaggttcttcatgaacatatccagagattgtctaaagtagtgactgcaaatcacagagctcttcagataccagaggtttatcttcgagaagcaccatggccatctgcacaatcagaaatcaggacaataagtgcttataaaaccccccgggacaaagtgcagtgcatcctgagaatgtgctctacgattatgaacctcctgagcctggccaatgaggactctgtccctggagcggatgactttgttcctgtgttggtgtttgtgttgataaaggcaaatccaccctgtttgctgtctactgtgcagtatatcagtagcttttatgctagctgtctgtctggagaggagtcctattggtggatgcagttcacagcagcagtagaattcattaaaaccatcgatgaccgaaagtgaccaagaccaaggcccaccaaggcagcagactgttaatcagacaaacagatctctgagaaggtgcatcagctgctttgaaggctgaagattgttttgtatgatactgcacagcatcaggcattttaaagcagatctttactaaacaggttaatgagctaacaagcaggttctctcgtctttgggctctttcctttctgagttgcatattctattttcttgtccccaagtagagactagtactacaaaaagggaccacatttttcaagtatttctaagtataaaaaacaaaacaaaaatctcttaggaaatgtctagacctccattcttggattccctttctttccttttattttaaaaaagaacagtacccctcttttaagatgctgtcttacattaatgagcatctaatggaaagaaggtatgagttgcactgaggattagaatagtggtgcgttagtggcattatctataaatacactcacctaaattgaaagctaagaaggaaatgtaaatataatatatatttatatttgatgtaatatggacatctgcagattctaataaacaaggactattgctgata

SEQ ID NO: 325526 - DNA, 5225 bp, Homo sapiens
tgcaggacgcagggaagccaacaggcgagtggcgaaggtggcggcagcggcggcgggggcagtcaccggctagggcgacggctccgaggccgagtggcggtccgacagagtcctccgtgtcctcccccgcatgacccccttggggtaagtgtactggagagagttggttatacattctaggaatctcaaagggtctggctctgtcacccaggctggagtgcagtgacacgatctcagctcactgtaacctccgcctcccgggttcaagcgatcctcccatctgaccctcccaagtagctggcattcagtgatcagcctttgagcctttcccacattgaagatggtgaaactagatattcatactctggctcatcacctcaagcaggaacgcttatatgtaaactctgagaaacagctcattcagaggctcaatgcagatgtacttaagacagctgaaaagttgtatcgtacagcatggattgcgaagcaacagagaatcaatttggatcggcttatcataaccagtgctgaagcttcccctgctgaatgttgccaacatgccaaaattttggaagatacacaatttgttgatgggtataagcaattgggatttcaggagactgcttatggagaattcttgagtcgattgagggaaaatcctcgtcttattgcctcctctttggttgctggagagaaacttaatcaggagaacacacaaagtgttatttacacagtttttacctccctgtatggcaattgcatcatgcaagaagatgaaagctacctccttcaggttttgcgatacttgattgaatttgaacttaaagaaagtgacaaccctaggcgacttttgaggagaggaacttgtgccttcagcatcttatttaaacttttttctgaaggactgttttctgccaaacttttcctcacagccactttacatgagccaattatgcaactgcttgttgaagatgaagatcacctggaaacagatccaaacaagctaattgagaggttctctccatctcagcaggaaaaactctttggagagaagggctcagatagattcaggcaaaaagttcaagaaatggtggagtccaatgaagcaaagctagtggctttggtgaacaaatttattggttatctcaaacagaacacatattgttttccacatagtttaaggtggatcgtgtctcagatgtacaaaaccctctcctgtgtagataggctggaagttggggaggtcagggcaatgtgtactgatctcctgttggcctgcttcatttgtcctgcagttgtcaatccagaacaatatggaataatttccgatgctcctattaatgaagtagcacgatttaatctgatgcaggtaggccgccttttgcagcagttagcaatgactggctctgaagagggagatccccgaacaaagagcagccttggaaagtttgacaaaagctgtgttgccgctttccttgatgttgtgattgggggccgtgcagtggagacccctccattgtcttccgtcaatcttctggaaggattgagcagaactgtggtttatataacctacagtcagcttattactctggtgaattttatgaagagtgtgatgtctggagatcaactgagagaagatagaatggctcttgacaatttattggcaaacctacccccggccaagccaggaaaaagtagcagtttagaaatgactccctacaatacacctcagctatctccagcaaccactccagcaaataaaaagaatcgattacctatagcaactcggagcagaagccgcaccaatatgctaatggacctacatatggaccatgaaggatcatctcaagaaaccatccaggaggtgcaaccagaagaggtgttggtcatttccttaggtacaggtccccagcttactccagggatgatgtcagaaaatgaggtcctaaacatgcagctttcggatggaggacaaggagatgtccctgttgatgaaaacaaactccatggtaaacctgataaaaccttgcgcttttccctctgcagtgataatctggaaggaatatctgaaggtccttcaaatcgctccaattcagtgtcctccctagacctagaaggagagtctgtgtcagaacttggagcaggaccttctggcagtaatggagttgaagctctacagctgttagaacatgagcaagctacaacacaggataaccttgatgataagctaaggaagtttgaaattcgtgacatgatgggattaacagatgatagggacatatcagaaacagtgagtgagacctggagtacagacgtcttgggaagtgactttgaccctaatattgatgaagatcgcttgcaagaaattgcaggtgctgcagcagagaacatgttaggcagtttgctgtgcctcccaggttcagggtcagtgcttcttgacccctgcactggttctaccatatcagagacaacaagtgaagcttggagtgtagaggtattgccaagtgactcagaggccccagacctaaagcaggaggagcgtctgcaagaactggagagctgttctggactgggtagcacatctgatgatacggatgtcagggaggtcagttcccgccccagcacaccaggcctcagtgttgtgtccggcataagtgcaacctctgaggatattcccaataagattgaagacctgagatctgagtgcagctctgattttgggggtaaagattctgtcactagtccagacatggatgaaataactcacggtgcccaccagctgacctctcctccttctcagtcagagtctctgctggccatgtttgatccactgtcttcacatgaaggggcttctgctgtggtaaggccaaaggttcactatgctaggccatcgcatccaccaccagatcccccaatcctggaaggagctgtgggaggaaatgaggccaggttgccaaactttggttcccatgttttaactccagctgaaatggaggcattcaagcaaaggcattcttaccctgagagactagttcgaagcaggagctctgatatagtatcttctgtccggagacccatgagtgaccccagctggaaccggcgtccaggaaatgaagagcgagaactccctccagctgcagccattggtgctacttctttggtggctgcacctcattcatcatcttcatccccgagtaaggactcctcaagaggagagactgaagaacgcaaagatagcgatgatgagaaatcagacaggaacagaccttggtggagaaaacgttttgtttcagccatgcctaaagatgatcccagccctagactcagtgcacaagctcaggtggctgaggatattctggacaaatacaggaatgccattaaacggaccagccccagtgatggagcaatggcaaactatgaaagtacagaggttatgggtgatggtgaaagtgcacatgattctccccgtgacgaagcactgcagaacatctcggctgatgatctcccagactctgcaagccaagcagcccacccgcaggattcagctttctcttacagagatgcaaaaaagaaactgaggcttgctctttgctctgcggactctgttgccttcccagtgctgacccattcaacaaggaatggtttaccagaccacacagacccagaagacaatgaaattgtatgcttcttaaaagttcaaatagctgaagcaattaatttacaagataagaatctaatggctcaacttcaagaaacaatgcgctgtgtgtgccgttttgataataggacttgtaggaaactgctggcttcgattgctgaggactacagaaaaagagccccatatattgcttatctcactcgttgtcgacaaggactacagaccacacaggctcacctggaaaggctattgcaaagagttttgcgggacaaagaagtggccaatcgatactttaccactgtctgtgtgagattactgcttgagagcaaagaaaagaagatcagggaattcattcaagactttcagaaactcaccgcagctgacgataaaactgctcaggtagaagattttctgcagtttctttatggtgcaatggcccaggatgtcatatggcaaaacgcgagtgaagaacagcttcaagatgcacagctggccattgagcgaagcgtgatgaaccggattttcaagctcgccttctaccctaatcaagatggggacatacttcgcgaccaggttcttcatgaacatatccagagattgtctaaagtagtgactgcaaatcacagagctcttcagataccagaggtttatcttcgagaagcaccatggccatctgcacaatcagaaatcaggacaataagtgcttataaaaccccccgggacaaagtgcagtgcatcctgagaatgtgctctacgattatgaacctcctgagcctggccaatgaggactctgtccctggagcggatgactttgttcctgtgttggtgtttgtgttgataaaggcaaatccaccctgtttgctgtctactgtgcagtatatcagtagcttttatgctagctgtctgtctggagaggagtcctattggtggatgcagttcacagcagcagtagaattcattaaaaccatcgatgaccgaaagtgaccaagaccaaggcccaccaaggcagcagactgttaatcagacaaacagatctctgagaaggtgcatcagctgctttgaaggctgaagattgttttgtatgatactgcacagcatcaggcattttaaagcagatctttactaaacaggttaatgagctaacaagcaggttctctcgtctttgggctctttcctttctgagttgcatattctattttcttgtccccaagtagagactagtactacaaaaagggaccacatttttcaagtatttctaagtataaaaaacaaaacaaaaatctcttaggaaatgtctagacctccattcttggattccctttctttccttttattttaaaaaagaacagtacccctcttttaagatgctgtcttacattaatgagcatctaatggaaagaaggtatgagttgcactgaggattagaatagtggtgcgttagtggcattatctataaatacactcacctaaattgaaagctaagaaggaaatgtaaatataatatatatttatatttgatgtaatatggacatctgcagattctaataaacaaggactattgctgata

SEQ ID NO: 325527 - DNA, 5053 bp, Homo sapiens
tgcaggacgcagggaagccaacaggcgagtggcgaaggtggcggcagcggcggcgggggcagtcaccggctagggcgacggctccgaggccgagtggcggtccgacagagtcctccgtgtcctcccccgcatgacccccttggggtaagtgtactggagagagttggttatacattctaggaatctcaaagggtctggctctgtcacccaggctggagtgcagtgacacgatctcagctcactgtaacctccgcctcccgggttcaagcgatcctcccatctgaccctcccaagtagctggcattcagtgatcagcctttgagcctttcccacattgaagatggtgaaactagatattcatactctggctcatcacctcaagcaggaacgcttatatgtaaactctgagaaacagctcattcagaggctcaatgcagatgtacttaagacagctgaaaagttgtatcgtacagcatggattgcgaagcaacagagaatcaatttggatcggcttatcataaccagtgctgaagcttcccctgctgaatgttgccaacatgccaaaattttggaagatacacaatttgttgatgggtataagcaattgggatttcaggagactgcttatggagaattcttgagtcgattgagggaaaatcctcgtcttattgcctcctctttggttgctggagagaaacttaatcaggagaacacacaaagtgttatttacacagtttttacctccctgtatggcaattgcatcatgcaagaagatgaaagctacctccttcaggttttgcgatacttgattgaatttgaacttaaagaaagtgacaaccctaggcgacttttgaggagaggaacttgtgccttcagcatcttatttaaacttttttctgaaggactgttttctgccaaacttttcctcacagccactttacatgagccaattatgcaactgcttgttgaagatgaagatcacctggaaacagatccaaacaagctaattgagaggttctctccatctcagcaggaaaaactctttggagagaagggctcagatagattcaggcaaaaagttcaagaaatggtggagtccaatgaagcaaagctagtggctttggtgaacaaatttattggttatctcaaacagaacacatattgttttccacatagtttaaggtggatcgtgtctcagatgtacaaaaccctctcctgtgtagataggctggaagttggggaggtcagggcaatgtgtactgatctcctgttggcctgcttcatttgtcctgcagttgtcaatccagaacaatatggaataatttccgatgctcctattaatgaagtagcacgatttaatctgatgcaggtaggccgccttttgcagcagttagcaatgactggctctgaagagggagatccccgaacaaagagcagccttggaaagtttgacaaaagctgtgttgccgctttccttgatgttgtgattgggggccgtgcagtggagacccctccattgtcttccgtcaatcttctggaaggattgagcagaactgtggtttatataacctacagtcagcttattactctggtgaattttatgaagagtgtgatgtctggagatcaactgagagaagatagaatggctcttgacaatttattggcaaacctacccccggccaagccaggaaaaagtagcagtttagaaatgactccctacaatacacctcagctatctccagcaaccactccagcaaataaaaagaatcgattacctatagcaactcggagcagaagccgcaccaatatgctaatggacctacatatggaccatgaaggatcatctcaagaaaccatccaggaggtgcaaccagaagaggtgttggtcatttccttaggtacaggtccccagcttactccagggatgatgtcagaaaatgaggtcctaaacatgcagctttcggatggaggacaaggagatgtccctgttgatgaaaacaaactccatggtaaacctgataaaaccttgcgcttttccctctgcagtgataatctggaaggaatatctgaaggtccttcaaatcgctccaattcagtgtcctccctagacctagaaggagagtctgtgtcagaacttggagcaggaccttctggcagtaatggagttgaagctctacagctgttagaacatgagcaagctacaacacaggataaccttgatgataagctaaggaagtttgaaattcgtgacatgatgggattaacagatgatagggacatatcagaaacagtgagtgagacctggagtacagacgtcttgggaagtgactttgaccctaatattgatgaagatcgcttgcaagaaattgcaggtgctgcagcagagaacatgttaggcagtttgctgtgcctcccaggttcagggtcagtgcttcttgacccctgcactggttctaccatatcagagacaacaagtgaagcttggagtgtagaggtattgccaagtgactcagaggccccagacctaaagcaggaggagcgtctgcaagaactggagagctgttctggactgggtagcacatctgatgatacggatgtcagggaggtcagttcccgccccagcacaccaggcctcagtgttgtgtccggcataagtgcaacctctgaggatattcccaataagattgaagacctgagatctgagtgcagctctgattttgggggtaaagattctgtcactagtccagacatggatgaaataactcacgattttctttatatacttcagccaaaacaacattttcaacacattgaagcagaagcagacatgagaatccagctgtcttctagtgcccaccagctgacctctcctccttctcagtcagagtctctgctggccatgtttgatccactgtcttcacatgaaggggcttctgctgtggtaaggccaaaggttcactatgctaggccatcgcatccaccaccagatcccccaatcctggaaggagctgtgggaggaaatgaggccaggttgccaaactttggttcccatgttttaactccagctgaaatggaggcattcaagcaaaggcattcttaccctgagagactagttcgaagcaggagctctgatatagtatcttctgtccggagacccatgagtgaccccagctggaaccggcgtccaggaaatgaagagcgagaactccctccagctgcagccattggtgctacttctttggtggctgcacctcattcatcatcttcatccccgagtaaggactcctcaagaggagagactgaagaacgcaaagatagcgatgatgagaaatcagacaggaacagaccttggtggagaaaacgttttgtttcagccatgcctaaagctcctataccatttagaaagaaagaaaaacaagaaaaagacaaagatgatctggggcctgacagattctcaacactcacagatgatcccagccctagactcagtgcacaagctcaggtggctgaggatattctggacaaatacaggaatgccattaaacggaccagccccagtgatggagcaatggcaaactatgaaagtacagaggttatgggtgatggtgaaagtgcacatgattctccccgtgacgaagcactgcagaacatctcggctgatgatctcccagactctgcaagccaagcagcccacccgcaggattcagctttctcttacagagatgcaaaaaagaaactgaggcttgctctttgctctgcggactctgttgccttcccagtgctgacccattcaacaaggaatggtttaccagaccacacagacccagaagacaatgaaattgtatgcttcttaaaagttcaaatagctgaagcaattaatttacaagataagaatctaatggctcaacttcaagaaacaatgcgctgtgtgtgccgttttgataataggacttgtaggaaactgctggcttcgattgctgaggactacagaaaaagagccccatatattgcttatctcactcgttgtcgacaaggactacagaccacacaggctcacctggaaaggctattgcaaagagttttgcgggacaaagaagtggccaatcgatactttaccactgtctgtgtgagattactgcttgagagcaaagaaaagaagatcagggaattcattcaagactttcagaaactcaccgcagctgacgataaaactgctcaggtagaagattttctgcagtttctttatggtgcaatggcccaggatgtcatatggcaaaacgcgagtgaagaacagcttcaagatgcacagctggccattgagcgaagcgtgatgaaccggattttcaagctcgccttctaccctaatcaagatggggacatacttcgcgaccaggttcttcatgaacatatccagagattgtctaaagtagtgactgcaaatcacagagctcttcagataccagaggtttatcttcgagaagcaccatggccatctgcacaatcagaaatcaggacaataagtgcttataaaaccccccgggacaaagtgcagtgcatcctgagaatgtgctctacgattatgaacctcctgagcctggccaatgaggactctgtccctggagcggatgactttgttcctgtgttggtgtttgtgttgataaaggcaaatccaccctgtttgctgtctactgtgcagtatatcagtagcttttatgctagctgtctgtctggagaggagtcctattggtggatgcagttcacagcagcagtagaattcattaaaaccatcgatgaccgaaagtgaccaagaccaaggcccaccaaggcagcagactgttaatcagacaaacagatctctgagaaggtgcatcagctgctttgattcagtaaatgttaagcagcagaagacttcgaatggttgaaattcattgttacaggatttaactcataaaccaatgagagattttttttttctctgcaatggttgctaagtctattccatgttaacactgtggaaataaatatgaagatgtggacattgcaaaaaaaatct

SEQ ID NO: 325528 - DNA, 4477 bp, Homo sapiens
tgcaggacgcagggaagccaacaggcgagtggcgaaggtggcggcagcggcggcgggggcagtcaccggctagggcgacggctccgaggccgagtggcggtccgacagagtcctccgtgtcctcccccgcatgacccccttggggtaagtgtactggagagagttggttatacattctaggaatctcaaagggtctggctctgtcacccaggctggagtgcagtgacacgatctcagctcactgtaacctccgcctcccgggttcaagcgatcctcccatctgaccctcccaagtagctggcattcagtgatcagcctttgagcctttcccacattgaagatggtgaaactagatattcatactctggctcatcacctcaagcaggaacgcttatatgtaaactctgagaaacagctcattcagaggctcaatgcagatgtacttaagacagctgaaaagttgtatcgtacagcatggattgcgaagcaacagagaatcaatttggatcggcttatcataaccagtgctgaagcttcccctgctgaatgttgccaacatgccaaaattttggaagatacacaatttgttgatgggtataagcaattgggatttcaggagactgcttatggagaattcttgagtcgattgagggaaaatcctcgtcttattgcctcctctttggttgctggagagaaacttaatcaggagaacacacaaagtgttatttacacagtttttacctccctgtatggcaattgcatcatgcaagaagatgaaagctacctccttcaggttttgcgatacttgattgaatttgaacttaaagaaagtgacaaccctaggcgacttttgaggagaggaacttgtgccttcagcatcttatttaaacttttttctgaaggactgttttctgccaaacttttcctcacagccactttacatgagccaattatgcaactgcttgttgaagatgaagatcacctggaaacagatccaaacaagctaattgagaggttctctccatctcagcaggaaaaactctttggagagaagggctcagatagattcaggcaaaaagttcaagaaatggtggagtccaatgaagcaaagctagtggctttggtgaacaaatttattggttatctcaaacagaacacatattgttttccacatagtttaaggtggatcgtgtctcagatgtacaaaaccctctcctgtgtagataggctggaagttggggaggtcagggcaatgtgtactgatctcctgttggcctgcttcatttgtcctgcagttgtcaatccagaacaatatggaataatttccgatgctcctattaatgaagtagcacgatttaatctgatgcaggtaggccgccttttgcagcagttagcaatgactggctctgaagagggagatccccgaacaaagagcagccttggaaagtttgacaaaagctgtgttgccgctttccttgatgttgtgattgggggccgtgcagtggagacccctccattgtcttccgtcaatcttctggaaggattgagcagaactgtggtttatataacctacagtcagcttattactctggtgaattttatgaagagtgtgatgtctggagatcaactgagagaagatagaatggctcttgacaatttattggcaaacctacccccggccaagccaggaaaaagtagcagtttagaaatgactccctacaatacacctcagctatctccagcaaccactccagcaaataaaaagaatcgattacctatagcaactcggagcagaagccgcaccaatatgctaatggacctacatatggaccatgaaggatcatctcaagaaaccatccaggaggtgcaaccagaagaggtgttggtcatttccttaggtacaggtccccagcttactccagggatgatgtcagaaaatgaggtcctaaacatgcagctttcggatggaggacaaggagatgtccctgttgatgaaaacaaactccatggtaaacctgataaaaccttgcgcttttccctctgcagtgataatctggaaggaatatctgaaggtccttcaaatcgctccaattcagtgtcctccctagacctagaaggagagtctgtgtcagaacttggagcaggaccttctggcagtaatggagttgaagctctacagctgttagaacatgagcaagctacaacacaggataaccttgatgataagctaaggaagtttgaaattcgtgacatgatgggattaacagatgatagggacatatcagaaacagtgagtgagacctggagtacagacgtcttgggaagtgactttgaccctaatattgatgaagatcgcttgcaagaaattgcaggtgctgcagcagagaacatgttaggcagtttgctgtgcctcccaggttcagggtcagtgcttcttgacccctgcactggttctaccatatcagagacaacaagtgaagcttggagtgtagaggtattgccaagtgactcagaggccccagacctaaagcaggaggagcgtctgcaagaactggagagctgttctggactgggtagcacatctgatgatacggatgtcagggaggtcagttcccgccccagcacaccaggcctcagtgttgtgtccggcataagtgcaacctctgaggatattcccaataagattgaagacctgagatctgagtgcagctctgattttgggggtaaagattctgtcactagtccagacatggatgaaataactcacgattttctttatatacttcagccaaaacaacattttcaacacattgaagcagaagcagacatgagaatccagctgtcttctagtgcccaccagctgacctctcctccttctcagtcagagtctctgctggccatgtttgatccactgtcttcacatgaaggggcttctgctgtggtaaggccaaaggttcactatgctaggccatcgcatccaccaccagatcccccaatcctggaaggagctgtgggaggaaatgaggccaggttgccaaactttggttcccatgttttaactccagctgaaatggaggcattcaagcaaaggcattcttaccctgagagactagttcgaagcaggagctctgatatagtatcttctgtccggagacccatgagtgaccccagctggaaccggcgtccaggaaatgaagagcgagaactccctccagctgcagccattggtgctacttctttggtggctgcacctcattcatcatcttcatccccgagtaaggactcctcaagaggagagactgaagaacgcaaagatagcgatgatgagaaatcagacaggaacagaccttggtggagaaaacgttttgtttcagccatgcctaaagctcctataccatttagaaagaaagaaaaacaagaaaaagacaaagatgatctggggcctgacagattctcaacactcacagatgatcccagccctagactcagtgcacaagctcaggtggctgaggatattctggacaaatacaggaatgccattaaacggaccagccccagtgatggagcaatggcaaactatgaaagtacagaggttatgggtgatggtgaaagtgcacatgattctccccgtgacgaagcactgcagaacatctcggctgatgatctcccagactctgcaagccaagcagcccacccgcaggattcagctttctcttacagagatgcaaaaaagaaactgaggcttgctctttgctctgcggactctgttgccttcccagtgctgacccattcaacaaggaatggtttaccagaccacacagacccagaagacaatgaaattgtatgcttcttaaaagttcaaatagctgaagcaattaatttacaagataagaatctaatggctcaacttcaagaaacaatgcgctgtgtgtgccgttttgataataggacttgtaggaaactgctggcttcgattgctgaggactacagaaaaagagccccatatattgcttatctcactcgttgtcgacaaggactacagaccacacaggctcacctggaaaggctattgcaaagagttttgcgggacaaagaagtggccaatcgatactttaccactgtctgtgtgagattactgcttgagagcaaagaaaagaagatcagggaattcattcaaggtaactcaatacctttagtttaagcatctcttcacctgtaatactgttgggaagatttagaaatactgttttgttttgctagtttgttcaagtatctgcatgccttaaatacccaattattttatggaatcttaataaattaaactttgatgtcaaaccaataaattgcatttttctcctggattgaatatctgtagcttactttttaaattggggacattggtaaatttttggatctatacaaattttctcattttttttaaaaagccaaacatattttttttagaaacttttgagac

SEQ ID NO: 325529 - DNA, 384 bp, Homo sapiens
tacagtcacctcggccgtgattattaacaaagtactatgaaatgtccttttgaatgttaggtcaagaaatccatgtacagagtcgtgcacttcattggctgtaactgtcaaacttgccttgtattagaagttaaatcccatcgtaaatacatcacgaggccagctgtgtgatttctgagacctagatgagagtccatttacttcagcctttgattcagtaaatgttaagcagcagaagacttcgaatggttgaaattcattgttacaggatttaactcataaaccaatgagagattttttttttctctgcaatggttgctaagtctattccatgttaacactgtggaaataaatatgaagatgtggacattgcaaaaaaaatct

SEQ ID NO: 325530 - DNA, 538 bp, Homo sapiens
gtttattttggaaggtagctgtataaaattgtttacttttttggtgaacagcctggcatcatttgagttggcaaaagcatctcttcctgaaagaagagagcatccaggagtaaagctagaaacttcttccaaaggcctcttctcagcacggtggcactcaggaactctggggagagctgctttcacgccatactcaagcgcttgatgaggaggagagaatgaagctaggagttttgaatgtgtttttgagcagaggttaagagtcagtggttttgattttagtcccaatggattcctgttaaattattcttcctatgacagatgactccgaagcaggttctgaaagttcctttaaaaaccttcattactattttaaggacaattatcagtcaacacttggaatttcttagcttttaaacttttcagcctcctttcacttagaaatgttggcacaccagttaacttccgagtagtgcagtatgttatatgtcacactactgactttatttaatttccagctcctataccatttagaaag

SEQ ID NO: 325531 - DNA, 346 bp, Homo sapiens
tgctgggattacaggtgtgagccaccgcgcccagccaggagattttgttagctagtgtttggcttttctccactatcactgcactttcctccaggatctttgttaaccctttgcttcccactggttatacaggtgctgcagcagagaacatgttaggcagtttgctgtgcctcccaggttcagggtcagtgcttcttgacccctgcactggttctaccatatcagagacaacaagtgaagcttggagtgtagaggtattgccaagtgactcaggttagtatgctgtcattgtttgctttttcatttatacagaagttttaattaaatgcaaggtatcccaactctg

SEQ ID NO: 325532 - DNA, 1783 bp, Homo sapiens
tgcaggacgcagggaagccaacaggcgagtggcgaaggtggcggcagcggcggcgggggcagtcaccggctagggcgacggctccgaggccgagtggcggtccgacagagtcctccgtgtcctcccccgcatgacccccttgggtctggctctgtcacccaggctggagtgcagtgacacgatctcactaatttttgtattttttgtagagacagggtttcgccatgttggccaggctggtctcgaactcctggcctcaagtgatccgcctacctcggcttcccaaagtgctgggattataggcgtgagccaccgtgcccaaccacaaaattatatgtatatatatttaaacgtgtcaaacattttgctttctttctccattttaggtaaaatctcagccacagtaattgctttcttctgctttttctttataaaaacctgcttatgaaggccttctgatacagatagttaaatcgctgtagtaggaggctcaggttttctaagggattgcaaatgtgctgcatggtttttctattcctatgtcctggaagcctttgtttaaagtgggctttacaaatgtgtccctgaggtgcgtgagcaagagaacaatctcagccccaatacgggggctgtgttcttgccgtaagaatctgtagctgactggtgtgctgaacccgggcactctttttcctattgtttgccatggaaatttccactttggaccgagtaaggtcaactaggtgttttaaaattgtttttctcctatgtgattgggtgtgaagagggaaagtaggaatacactcagaattattactggattgcataaaagtgatagaagtgtagtggggttcacttcctcaattggtgcttcctagatttttctctcccatctcttcctgctttgtttctttaaagaaaaggctgttgtctctctttttaaatatttaagtctagtgagtttattttgtacgcaattgctttaattttaagggaagtaaatctgaaactatcttgaagcccaaaggatttttagtaagtggattaacagtgatgaggtatttgcgattactttaaatgccaaaatgcttgagaactttgccaggttaaaaattacttaatatattttagaatgtaggttagaaagtagtaggacaaggaatagctttattactcttgagaacacttggataaatgaaaatatagtttgcttccgtgttaagttgtggttgagctatggagtgaccctggagctgccgcatcccacaggcctgagctcagcaagggttcaattcaagagagatgacgtctccacttggataatggcagacagtgtgggtagcggccatgcactaggggaattcacctctgtcaaattaatactctcctgtctactggattcttcttgtgcttcacctggattaaaaagctgtactgcctcttttgaaacagataaaacctttctataagtctcaattaatgagcttgcacaatcttgtatatgtacaggaaacccctcctgtctcctaatgtgattagtactgtaaaatattctataaaactgattaaaaggggagagcagtttgattcacagggttttatgtttctgtcatctattttatattcagaagcatttctgaaaacgtatttgacttccgaatgttctgatgttctccgtgaattcacacacatcttttttatctgaacaataagggtgtttgctaagtatggcacaagaaggaactagaatgacctggcagtaactaacacaatggtgaacatctaa

SEQ ID NO: 325533 - DNA, 7079 bp, Homo sapiens
tgcaggacgcagggaagccaacaggcgagtggcgaaggtggcggcagcggcggcgggggcagtcaccggctagggcgacggctccgaggccgagtggcggtccgacagagtcctccgtgtcctcccccgcatgacccccttggggtaagtgtactggagagagttggttatacattctaggaatctcaaagggtctggctctgtcacccaggctggagtgcagtgacacgatctcagctcactgtaacctccgcctcccgggttcaagcgatcctcccatctgaccctcccaagtagctggcattcagtgatcagcctttgagcctttcccacattgaagatggtgaaactagatattcatactctggctcatcacctcaagcaggaacgcttatatgtaaactctgagaaacagctcattcagaggctcaatgcagatgtacttaagacagctgaaaagttgtatcgtacagcatggattgcgaagcaacagagaatcaatttggatcggcttatcataaccagtgctgaagcttcccctgctgaatgttgccaacatgccaaaattttggaagatacacaatttgttgatgggtataagcaattgggatttcaggagactgcttatggagaattcttgagtcgattgagggaaaatcctcgtcttattgcctcctctttggttgctggagagaaacttaatcaggagaacacacaaagtgttatttacacagtttttacctccctgtatggcaattgcatcatgcaagaagatgaaagctacctccttcaggttttgcgatacttgattgaatttgaacttaaagaaagtgacaaccctaggcgacttttgaggagaggaacttgtgccttcagcatcttatttaaacttttttctgaaggactgttttctgccaaacttttcctcacagccactttacatgagccaattatgcaactgcttgttgaagatgaagatcacctggaaacagatccaaacaagctaattgagaggttctctccatctcagcaggaaaaactctttggagagaagggctcagatagattcaggcaaaaagttcaagaaatggtggagtccaatgaagcaaagctagtggctttggtgaacaaatttattggttatctcaaacagaacacatattgttttccacatagtttaaggtggatcgtgtctcagatgtacaaaaccctctcctgtgtagataggctggaagttggggaggtcagggcaatgtgtactgatctcctgttggcctgcttcatttgtcctgcagttgtcaatccagaacaatatggaataatttccgatgctcctattaatgaagtagcacgatttaatctgatgcaggtaggccgccttttgcagcagttagcaatgactggctctgaagagggagatccccgaacaaagagcagccttggaaagtttgacaaaagctgtgttgccgctttccttgatgttgtgattgggggccgtgcagtggagacccctccattgtcttccgtcaatcttctggaaggattgagcagaactgtggtttatataacctacagtcagcttattactctggtgaattttatgaagagtgtgatgtctggagatcaactgagagaagatagaatggctcttgacaatttattggcaaacctacccccggccaagccaggaaaaagtagcagtttagaaatgactccctacaatacacctcagctatctccagcaaccactccagcaaataaaaagaatcgattacctatagcaactcggagcagaagccgcaccaatatgctaatggacctacatatggaccatgaaggatcatctcaagaaaccatccaggaggtgcaaccagaagaggtgttggtcatttccttaggtacaggtccccagcttactccagggatgatgtcagaaaatgaggtcctaaacatgcagctttcggatggaggacaaggagatgtccctgttgatgaaaacaaactccatggtaaacctgataaaaccttgcgcttttccctctgcagtgataatctggaaggaatatctgaaggtccttcaaatcgctccaattcagtgtcctccctagacctagaaggagagtctgtgtcagaacttggagcaggaccttctggcagtaatggagttgaagctctacagctgttagaacatgagcaagctacaacacaggataaccttgatgataagctaaggaagtttgaaattcgtgacatgatgggattaacagatgatagggacatatcagaaacagtgagtgagacctggagtacagacgtcttgggaagtgactttgaccctaatattgatgaagatcgcttgcaagaaattgcaggtgctgcagcagagaacatgttaggcagtttgctgtgcctcccaggttcagggtcagtgcttcttgacccctgcactggttctaccatatcagagacaacaagtgaagcttggagtgtagaggtattgccaagtgactcagaggccccagacctaaagcaggaggagcgtctgcaagaactggagagctgttctggactgggtagcacatctgatgatacggatgtcagggaggtcagttcccgccccagcacaccaggcctcagtgttgtgtccggcataagtgcaacctctgaggatattcccaataagattgaagacctgagatctgagtgcagctctgattttgggggtaaagattctgtcactagtccagacatggatgaaataactcacgattttctttatatacttcagccaaaacaacattttcaacacattgaagcagaagcagacatgagaatccagctgtcttctagtgcccaccagctgacctctcctccttctcagtcagagtctctgctggccatgtttgatccactgtcttcacatgaaggggcttctgctgtggtaaggccaaaggttcactatgctaggccatcgcatccaccaccagatcccccaatcctggaaggagctgtgggaggaaatgaggccaggttgccaaactttggttcccatgttttaactccagctgaaatggaggcattcaagcaaaggcattcttaccctgagagactagttcgaagcaggagctctgatatagtatcttctgtccggagacccatgagtgaccccagctggaaccggcgtccaggaaatgaagagcgagaactccctccagctgcagccattggtgctacttctttggtggctgcacctcattcatcatcttcatccccgagtaaggactcctcaagaggagagactgaagaacgcaaagatagcgatgatgagaaatcagacaggaacagaccttggtggagaaaacgttttgtttcagccatgcctaaagctcctataccatttagaaagaaagaaaaacaagaaaaagacaaagatgatctggggcctgacagattctcaacactcacagatgatcccagccctagactcagtgcacaagctcaggtggctgaggatattctggacaaatacaggaatgccattaaacggaccagccccagtgatggagcaatggcaaactatgaaagtacagaggttatgggtgatggtgaaagtgcacatgattctccccgtgacgaagcactgcagaacatctcggctgatgatctcccagactctgcaagccaagcagcccacccgcaggattcagctttctcttacagagatgcaaaaaagaaactgaggcttgctctttgctctgcggactctgttgccttcccagtgctgacccattcaacaaggaatggtttaccagaccacacagacccagaagacaatgaaattgtatgcttcttaaaagttcaaatagctgaagcaattaatttacaagataagaatctaatggctcaacttcaagaaacaatgcgctgtgtgtgccgttttgataataggacttgtaggaaactgctggcttcgattgctgaggactacagaaaaagagccccatatattgcttatctcactcgttgtcgacaaggactacagaccacacaggctcacctggaaaggctattgcaaagagttttgcgggacaaagaagtggccaatcgatactttaccactgtctgtgtgagattactgcttgagagcaaagaaaagaagatcagggaattcattcaagactttcagaaactcaccgcagctgacgataaaactgctcaggtagaagattttctgcagtttctttatggtgcaatggcccaggatgtcatatggcaaaacgcgagtgaagaacagcttcaagatgcacagctggccattgagcgaagcgtgatgaaccggattttcaagctcgccttctaccctaatcaagatggggacatacttcgcgaccaggttcttcatgaacatatccagagattgtctaaagtagtgactgcaaatcacagagctcttcagataccagaggtttatcttcgagaagcaccatggccatctgcacaatcagaaatcaggacaataagtgcttataaaaccccccgggacaaagtgcagtgcatcctgagaatgtgctctacgattatgaacctcctgagcctggccaatgaggactctgtccctggagcggatgactttgttcctgtgttggtgtttgtgttgataaaggcaaatccaccctgtttgctgtctactgtgcagtatatcagtagcttttatgctagctgtctgtctggagaggagtcctattggtggatgcagttcacagcagcagtagaattcattaaaaccatcgatgaccgaaagtgaccaagaccaaggcccaccaaggcagcagactgttaatcagacaaacagatctctgagaaggtgcatcagctgctttgaaggctgaagattgttttgtatgatactgcacagcatcaggcattttaaagcagatctttactaaacaggttaatgagctaacaagcaggttctctcgtctttgggctctttcctttctgagttgcatattctattttcttgtccccaagtagagactagtactacaaaaagggaccacatttttcaagtatttctaagtataaaaaacaaaacaaaaatctcttaggaaatgtctagacctccattcttggattccctttctttccttttattttaaaaaagaacagtacccctcttttaagatgctgtcttacattaatgagcatctaatggaaagaaggtatgagttgcactgaggattagaatagtggtgcgttagtggcattatctataaatacactcacctaaattgaaagctaagaaggaaatgtaaatataatatatatttatatttgatgtaatatggacatctgcagattctaataaacaaggactattgctgatagtaggctgtgacatactgtcttgtgaaatggtttccttgacaaaatttaagctgagcttaaaagcaaaaaacaaaaagtacacagaaatatttattaaaatgtaatacagtttattgaactttctaggtatggagtttgatggacagggctgcctttaatgagtgtgaaggtcactaagtcacttagacatctcaccgtggaagtttgtgagcctgcattaggagatagactgattaccatacatgacataaaaaggaacagtggatagctcatactttatggtggttcttctcctccgaaataatatactgcagaaatcccagacagagctccttacaaacctttaattgtaatatatttttgatgattattcacattgaatgcacagaccaagaattcagtgaatgtcattttttaaaaaactaatttgtattgtctgctctagtgatacaagttttactagtgataaactattttaatcaaccatactattcttatggaaaaaaatatctattttggcaggtttctgtgcctttatttccctcttctgaaaaaaagtctgtgttttcatagtttggtttgcattgtatatcaataattaatcaggaatgggttttggtgcctgaaaaattggccatggaggcacaccaaagcttcaagcacaagtcttgtacatgggccatcactgtctggtttcacttcgtgtgtttcctaaacacatttagctgcttttttaacaaactcagccccatacttgagtcccttgttgttgggagcatttccaggcatcttttaagggaactgtgacaaacagcctcgggcagatgaacacggaggctctctgttgtctgtctctgagatctttgtgtctgggaatgcctaaagattttatttttttttctttgtttttattttattttattttatttttttgagacagagtctcaccctgttgcccaggctggagtgcaatggtgcgatcttggctcactgcaacctccacctcccagttcaagtgattcccctgcctcagcctcccgagtagctaggactacaggcgcatgtcaccaagcccggctaatttttgtatttttagtagaaacggggtttcaccatgttggccaggatgatcctcaatctcctgacctcgtgatccacccgccttggcctcccaaagtgcgggattacaagcgtgaaccaccctgcccagccagaaactagattttctttatgcctccaccccttcttattcatttactttacaataccaaaataacaaattgcataggagtgtgggatgtggtttctgccttctagagagagatcagaattaaactagtactatgaaatgtccttttgaatgttaggtcaagaaatccatgtacagagtcgtgcacttcattggctgtaactgtcaaacttgccttgtattagaagttaaatcccatcgtaaatacatcacgaggccagctgtgtgatttctgagacctagatgagagtccatttacttcagcctttgattcagtaaatgttaagcagcagaagacttcgaatggttgaaattcattgttacaggatttaactcataaaccaatgagagattttttttttctctgcaatggttgctaagtctattccatgttaacactgtggaaataaatatgaagatgtggacattgcaaaaaaaatct

SEQ ID NO: 325534 - DNA, 7387 bp, Homo sapiens
tgcaggacgcagggaagccaacaggcgagtggcgaaggtggcggcagcggcggcgggggcagtcaccggctagggcgacggctccgaggccgagtggcggtccgacagagtcctccgtgtcctcccccgcatgacccccttggggtaagtgtactggagagagttggttatacattctaggaatctcaaagggtctggctctgtcacccaggctggagtgcagtgacacgatctcagctcactgtaacctccgcctcccgggttcaagcgatcctcccatctgaccctcccaagtagctggcattcagtgatcagcctttgagcctttcccacattgaagatggtgaaactagatattcatactctggctcatcacctcaagcaggaacgcttatatgtaaactctgagaaacagctcattcagaggctcaatgcagatgtacttaagacagctgaaaagttgtatcgtacagcatggattgcgaagcaacagagaatcaatttggatcggcttatcataaccagtgctgaagcttcccctgctgaatgttgccaacatgccaaaattttggaagatacacaatttgttgatgggtataagcaattgggatttcaggagactgcttatggagaattcttgagtcgattgagggaaaatcctcgtcttattgcctcctctttggttgctggagagaaacttaatcaggagaacacacaaagtgttatttacacagtttttacctccctgtatggcaattgcatcatgcaagaagatgaaagctacctccttcaggttttgcgatacttgattgaatttgaacttaaagaaagtgacaaccctaggcgacttttgaggagaggaacttgtgccttcagcatcttatttaaacttttttctgaaggactgttttctgccaaacttttcctcacagccactttacatgagccaattatgcaactgcttgttgaagatgaagatcacctggaaacagatccaaacaagctaattgagaggttctctccatctcagcaggaaaaactctttggagagaagggctcagatagattcaggcaaaaagttcaagaaatggtggagtccaatgaagcaaagctagtggctttggtgaacaaatttattggttatctcaaacagaacacatattgttttccacatagtttaaggtggatcgtgtctcagatgtacaaaaccctctcctgtgtagataggctggaagttggggaggtcagggcaatgtgtactgatctcctgttggcctgcttcatttgtcctgcagttgtcaatccagaacaatatggaataatttccgatgctcctattaatgaagtagcacgatttaatctgatgcaggtaggccgccttttgcagcagttagcaatgactggctctgaagagggagatccccgaacaaagagcagccttggaaagtttgacaaaagctgtgttgccgctttccttgatgttgtgattgggggccgtgcagtggagacccctccattgtcttccgtcaatcttctggaaggattgagcagaactgtggtttatataacctacagtcagcttattactctggtgaattttatgaagagtgtgatgtctggagatcaactgagagaagatagaatggctcttgacaatttattggcaaacctacccccggccaagccaggaaaaagtagcagtttagaaatgactccctacaatacacctcagctatctccagcaaccactccagcaaataaaaagaatcgattacctatagcaactcggagcagaagccgcaccaatatgctaatggacctacatatggaccatgaaggatcatctcaagaaaccatccaggaggtgcaaccagaagaggtgttggtcatttccttaggtacaggtccccagcttactccagggatgatgtcagaaaatgaggtcctaaacatgcagctttcggatggaggacaaggagatgtccctgttgatgaaaacaaactccatggtaaacctgataaaaccttgcgcttttccctctgcagtgataatctggaaggaatatctgaaggtccttcaaatcgctccaattcagtgtcctccctagacctagaaggagagtctgtgtcagaacttggagcaggaccttctggcagtaatggagttgaagctctacagctgttagaacatgagcaagctacaacacaggataaccttgatgataagctaaggaagtttgaaattcgtgacatgatgggattaacagatgatagggacatatcagaaacagtgagtgagacctggagtacagacgtcttgggaagtgactttgaccctaatattgatgaagatcgcttgcaagaaattgcaggtgctgcagcagagaacatgttaggcagtttgctgtgcctcccaggttcagggtcagtgcttcttgacccctgcactggttctaccatatcagagacaacaagtgaagcttggagtgtagaggtattgccaagtgactcagaggccccagacctaaagcaggaggagcgtctgcaagaactggagagctgttctggactgggtagcacatctgatgatacggatgtcagggaggtcagttcccgccccagcacaccaggcctcagtgttgtgtccggcataagtgcaacctctgaggatattcccaataagattgaagacctgagatctgagtgcagctctgattttgggggtaaagattctgtcactagtccagacatggatgaaataactcacggggcttctgctgtggtaaggccaaaggttcactatgctaggccatcgcatccaccaccagatcccccaatcctggaaggagctgtgggaggaaatgaggccaggttgccaaactttggttcccatgttttaactccagctgaaatggaggcattcaagcaaaggcattcttaccctgagagactagttcgaagcaggagctctgatatagtatcttctgtccggagacccatgagtgaccccagctggaaccggcgtccaggaaatgaagagcgagaactccctccagctgcagccattggtgctacttctttggtggctgcacctcattcatcatcttcatccccgagtaaggactcctcaagaggagagactgaagaacgcaaagatagcgatgatgagaaatcagacaggaacagaccttggtggagaaaacgttttgtttcagccatgcctaaagcctggcatcatttgagttggcaaaagcatctcttcctgaaagaagagagcatccaggagtaaagctagaaacttcttccaaaggcctcttctcagcacggtggcactcaggaactctggggagagctgctttcacgccatactcaagcgcttgatgaggaggagagaatgaagctaggagttttgaatgtgtttttgagcagaggttaagagtcagtggttttgattttagtcccaatggattcctgttaaattattcttcctatgacagatgactccgaagcaggttctgaaagttcctttaaaaaccttcattactattttaaggacaattatcagtcaacacttggaatttcttagcttttaaacttttcagcctcctttcacttagaaatgttggcacaccagttaacttccgagtagtgcagtatgttatatgtcacactactgactttatttaatttccagctcctataccatttagaaagaaagaaaaacaagaaaaagacaaagatgatctggggcctgacagattctcaacactcacagatgatcccagccctagactcagtgcacaagctcaggtggctgaggatattctggacaaatacaggaatgccattaaacggaccagccccagtgatggagcaatggcaaactatgaaagtacagaggttatgggtgatggtgaaagtgcacatgattctccccgtgacgaagcactgcagaacatctcggctgatgatctcccagactctgcaagccaagcagcccacccgcaggattcagctttctcttacagagatgcaaaaaagaaactgaggcttgctctttgctctgcggactctgttgccttcccagtgctgacccattcaacaaggaatggtttaccagaccacacagacccagaagacaatgaaattgtatgcttcttaaaagttcaaatagctgaagcaattaatttacaagataagaatctaatggctcaacttcaagaaacaatgcgctgtgtgtgccgttttgataataggacttgtaggaaactgctggcttcgattgctgaggactacagaaaaagagccccatatattgcttatctcactcgttgtcgacaaggactacagaccacacaggctcacctggaaaggctattgcaaagagttttgcgggacaaagaagtggccaatcgatactttaccactgtctgtgtgagattactgcttgagagcaaagaaaagaagatcagggaattcattcaagactttcagaaactcaccgcagctgacgataaaactgctcaggtagaagattttctgcagtttctttatggtgcaatggcccaggatgtcatatggcaaaacgcgagtgaagaacagcttcaagatgcacagctggccattgagcgaagcgtgatgaaccggattttcaagctcgccttctaccctaatcaagatggggacatacttcgcgaccaggttcttcatgaacatatccagagattgtctaaagtagtgactgcaaatcacagagctcttcagataccagaggtttatcttcgagaagcaccatggccatctgcacaatcagaaatcaggacaataagtgcttataaaaccccccgggacaaagtgcagtgcatcctgagaatgtgctctacgattatgaacctcctgagcctggccaatgaggactctgtccctggagcggatgactttgttcctgtgttggtgtttgtgttgataaaggcaaatccaccctgtttgctgtctactgtgcagtatatcagtagcttttatgctagctgtctgtctggagaggagtcctattggtggatgcagttcacagcagcagtagaattcattaaaaccatcgatgaccgaaagtgaccaagaccaaggcccaccaaggcagcagactgttaatcagacaaacagatctctgagaaggtgcatcagctgctttgaaggctgaagattgttttgtatgatactgcacagcatcaggcattttaaagcagatctttactaaacaggttaatgagctaacaagcaggttctctcgtctttgggctctttcctttctgagttgcatattctattttcttgtccccaagtagagactagtactacaaaaagggaccacatttttcaagtatttctaagtataaaaaacaaaacaaaaatctcttaggaaatgtctagacctccattcttggattccctttctttccttttattttaaaaaagaacagtacccctcttttaagatgctgtcttacattaatgagcatctaatggaaagaaggtatgagttgcactgaggattagaatagtggtgcgttagtggcattatctataaatacactcacctaaattgaaagctaagaaggaaatgtaaatataatatatatttatatttgatgtaatatggacatctgcagattctaataaacaaggactattgctgatagtaggctgtgacatactgtcttgtgaaatggtttccttgacaaaatttaagctgagcttaaaagcaaaaaacaaaaagtacacagaaatatttattaaaatgtaatacagtttattgaactttctaggtatggagtttgatggacagggctgcctttaatgagtgtgaaggtcactaagtcacttagacatctcaccgtggaagtttgtgagcctgcattaggagatagactgattaccatacatgacataaaaaggaacagtggatagctcatactttatggtggttcttctcctccgaaataatatactgcagaaatcccagacagagctccttacaaacctttaattgtaatatatttttgatgattattcacattgaatgcacagaccaagaattcagtgaatgtcattttttaaaaaactaatttgtattgtctgctctagtgatacaagttttactagtgataaactattttaatcaaccatactattcttatggaaaaaaatatctattttggcaggtttctgtgcctttatttccctcttctgaaaaaaagtctgtgttttcatagtttggtttgcattgtatatcaataattaatcaggaatgggttttggtgcctgaaaaattggccatggaggcacaccaaagcttcaagcacaagtcttgtacatgggccatcactgtctggtttcacttcgtgtgtttcctaaacacatttagctgcttttttaacaaactcagccccatacttgagtcccttgttgttgggagcatttccaggcatcttttaagggaactgtgacaaacagcctcgggcagatgaacacggaggctctctgttgtctgtctctgagatctttgtgtctgggaatgcctaaagattttatttttttttctttgtttttattttattttattttatttttttgagacagagtctcaccctgttgcccaggctggagtgcaatggtgcgatcttggctcactgcaacctccacctcccagttcaagtgattcccctgcctcagcctcccgagtagctaggactacaggcgcatgtcaccaagcccggctaatttttgtatttttagtagaaacggggtttcaccatgttggccaggatgatcctcaatctcctgacctcgtgatccacccgccttggcctcccaaagtgcgggattacaagcgtgaaccaccctgcccagccagaaactagattttctttatgcctccaccccttcttattcatttactttacaataccaaaataacaaattgcataggagtgtgggatgtggtttctgccttctagagagagatcagaattaaactagtactatgaaatgtccttttgaatgttaggtcaagaaatccatgtacagagtcgtgcacttcattggctgtaactgtcaaacttgccttgtattagaagttaaatcccatcgtaaatacatcacgaggccagctgtgtgatttctgagacctagatgagagtccatttacttcagcctttgattcagtaaatgttaagcagcagaagacttcgaatggttgaaattcattgttacaggatttaactcataaaccaatgagagattttttttttctctgcaatggttgctaagtctattccatgttaacactgtggaaataaatatgaagatgtggacattgcaaaaaaaatct

SEQ ID NO: 325535 - DNA, 5850 bp, Homo sapiens
tgcaggacgcagggaagccaacaggcgagtggcgaaggtggcggcagcggcggcgggggcagtcaccggctagggcgacggctccgaggccgagtggcggtccgacagagtcctccgtgtcctcccccgcatgacccccttggggtaagtgtactggagagagttggttatacattctaggaatctcaaagggtctggctctgtcacccaggctggagtgcagtgacacgatctcagctcactgtaacctccgcctcccgggttcaagcgatcctcccatctgaccctcccaagtagctggcattcagtgatcagcctttgagcctttcccacattgaagatggtgaaactagatattcatactctggctcatcacctcaagcaggaacgcttatatgtaaactctgagaaacagctcattcagaggctcaatgcagatgtacttaagacagctgaaaagttgtatcgtacagcatggattgcgaagcaacagagaatcaatttggatcggcttatcataaccagtgctgaagcttcccctgctgaatgttgccaacatgccaaaattttggaagatacacaatttgttgatgggtataagcaattgggatttcaggagactgcttatggagaattcttgagtcgattgagggaaaatcctcgtcttattgcctcctctttggttgctggagagaaacttaatcaggagaacacacaaagtgttatttacacagtttttacctccctgtatggcaattgcatcatgcaagaagatgaaagctacctccttcaggttttgcgatacttgattgaatttgaacttaaagaaagtgacaaccctaggcgacttttgaggagaggaacttgtgccttcagcatcttatttaaacttttttctgaaggactgttttctgccaaacttttcctcacagccactttacatgagccaattatgcaactgcttgttgaagatgaagatcacctggaaacagatccaaacaagctaattgagaggttctctccatctcagcaggaaaaactctttggagagaagggctcagatagattcaggcaaaaagttcaagaaatggtggagtccaatgaagcaaagctagtggctttggtgaacaaatttattggttatctcaaacagaacacatattgttttccacatagtttaaggtggatcgtgtctcagatgtacaaaaccctctcctgtgtagataggctggaagttggggaggtcagggcaatgtgtactgatctcctgttggcctgcttcatttgtcctgcagttgtcaatccagaacaatatggaataatttccgatgctcctattaatgaagtagcacgatttaatctgatgcaggtaggccgccttttgcagcagttagcaatgactggctctgaagagggagatccccgaacaaagagcagccttggaaagtttgacaaaagctgtgttgccgctttccttgatgttgtgattgggggccgtgcagtggagacccctccattgtcttccgtcaatcttctggaaggattgagcagaactgtggtttatataacctacagtcagcttattactctggtgaattttatgaagagtgtgatgtctggagatcaactgagagaagatagaatggctcttgacaatttattggcaaacctacccccggccaagccaggaaaaagtagcagtttagaaatgactccctacaatacacctcagctatctccagcaaccactccagcaaataaaaagaatcgattacctatagcaactcggagcagaagccgcaccaatatgctaatggacctacatatggaccatgaaggatcatctcaagaaaccatccaggaggtgcaaccagaagaggtgttggtcatttccttaggtacaggtccccagcttactccagggatgatgtcagaaaatgaggtcctaaacatgcagctttcggatggaggacaaggagatgtccctgttgatgaaaacaaactccatggtaaacctgataaaaccttgcgcttttccctctgcagtgataatctggaaggaatatctgaaggtccttcaaatcgctccaattcagtgtcctccctagacctagaaggagagtctgtgtcagaacttggagcaggaccttctggcagtaatggagttgaagctctacagctgttagaacatgagcaagctacaacacaggataaccttgatgataagctaaggaagtttgaaattcgtgacatgatgggattaacagatgatagggacatatcagaaacagtgagtgagacctggagtacagacgtcttgggaagtgactttgaccctaatattgatgaagatcgcttgcaagaaattgcaggtgctgcagcagagaacatgttaggcagtttgctgtgcctcccaggttcagggtcagtgcttcttgacccctgcactggttctaccatatcagagacaacaagtgaagcttggagtgtagaggtattgccaagtgactcagaggccccagacctaaagcaggaggagcgtctgcaagaactggagagctgttctggactgggtagcacatctgatgatacggatgtcagggaggtcagttcccgccccagcacaccaggcctcagtgttgtgtccggcataagtgcaacctctgaggatattcccaataagattgaagacctgagatctgagtgcagctctgattttgggggtaaagattctgtcactagtccagacatggatgaaataactcacgattttctttatatacttcagccaaaacaacattttcaacacattgaagcagaagcagacatgagaatccagctgtcttctagtgcccaccagctgacctctcctccttctcagtcagagtctctgctggccatgtttgatccactgtcttcacatgaaggggcttctgctgtggtaaggccaaaggttcactatgctaggccatcgcatccaccaccagatcccccaatcctggaaggagctgtgggaggaaatgaggccaggttgccaaactttggttcccatgttttaactccagctgaaatggaggcattcaagcaaaggcattcttaccctgagagactagttcgaagcaggagctctgatatagtatcttctgtccggagacccatgagtgaccccagctggaaccggcgtccaggaaatgaagagcgagaactccctccagctgcagccattggtgctacttctttggtggctgcacctcattcatcatcttcatccccgagtaaggactcctcaagaggagagactgaagaacgcaaagatagcgatgatgagaaatcagacaggaacagaccttggtggagaaaacgttttgtttcagccatgcctaaagctcctataccatttagaaagaaagaaaaacaagaaaaagacaaagatgatctggggcctgacagattctcaacactcacagatgatcccagccctagactcagtgcacaagctcaggtggctgaggatattctggacaaatacaggaatgccattaaacggaccagccccagtgatggagcaatggcaaactatgaaagtacagaggttatgggtgatggtgaaagtgcacatgattctccccgtgacgaagcactgcagaacatctcggctgatgatctcccagactctgcaagccaagcagcccacccgcaggattcagctttctcttacagagatgcaaaaaagaaactgaggcttgctctttgctctgcggactctgttgccttcccagtgctgacccattcaacaaggaatggtttaccagaccacacagacccagaagacaatgaaattgtatgcttcttaaaagttcaaatagctgaagcaattaatttacaagataagaatctaatggctcaacttcaagaaacaatgcgctgtgtgtgccgttttgataataggacttgtaggaaactgctggcttcgattgctgaggactacagaaaaagagccccatatattgcttatctcactcgttgtcgacaaggactacagaccacacaggctcacctggaaaggctattgcaaagagttttgcgggacaaagaagtggccaatcgatactttaccactgtctgtgtgagattactgcttgagagcaaagaaaagaagatcagggaattcattcaagactttcagaaactcaccgcagctgacgataaaactgctcaggtagaagattttctgcagtttctttatggtgcaatggcccaggatgtcatatggcaaaacgcgagtgaagaacagcttcaagatgcacagctggccattgagcgaagcgtgatgaaccggattttcaagctcgccttctaccctaatcaagatggggacatacttcgcgaccaggttcttcatgaacatatccagagattgtctaaagtagtgactgcaaatcacagagctcttcagataccagaggtttatcttcgagaagcaccatggccatctgcacaatcagaaatcaggacaataagtgcttataaaaccccccgggacaaagtgcagtgcatcctgagaatgtgctctacgattatgaacctcctgagcctggccaatgaggactctgtccctggagcggatgactttgttcctgtgttggtgtttgtgttgataaaggcaaatccaccctgtttgctgtctactgtgcagtatatcagtagcttttatgctagctgtctgtctggagaggagtcctattggtggatgcagttcacagcagcagtagaattcattaaaaccatcgatgaccgaaagtgaccaagaccaaggcccaccaaggcagcagactgttaatcagacaaacagatctctgagaaggtgcatcagctgctttgaaggctgaagattgttttgtatgatactgcacagcatcaggcattttaaagcagatctttactaaacaggttaatgagctaacaagcaggttctctcgtctttgggctctttcctttctgagttgcatattctattttcttgtccccaagtagagactagtactacaaaaagggaccacatttttcaagtatttctaagtataaaaaacaaaacaaaaatctcttaggaaatgtctagacctccattcttggattccctttctttccttttattttaaaaaagaacagtacccctcttttaagatgctgtcttacattaatgagcatctaatggaaagaaggtatgagttgcactgaggattagaatagtggtgcgttagtggcattatctataaatacactcacctaaattgaaagctaagaaggaaatgtaaatataatatatatttatatttgatgtaatatggacatctgcagattctaataaacaaggactattgctgataaaaaaaaaaaaaaaaaaaaaaaaaaaaaaaaaaaaaaaaaaaaaaaaaaacaacaaaaaaaaaaaaaaaaaaaaaacaaagaaaacaaaaaaaagaacaaaagaaaaaaagaaagaacaaaaagaagagaaccaaagcaaaaaagagcggggggcgccgcgaagacccgccgagcagaaccccacacaagaatcaacaaacacacaccaacgtcaatacaaaagaaagacaccaaccccaaacgaagcgatggcagaaaacaaacacagcccatcgagcggcgcggcaaacaaaaacaaaacgcactgagcagaaggacaagaaccgagcagccgcccacgaagagaagacacacccatcgagggagcggacacaagcaaaggagaacacaacccgcagagaaggaaccacaaccagacgaggaagtaacaagagcgcaagaacacgactaacacacgaaata

SEQ ID NO: 325536 - DNA, 4999 bp, Homo sapiens
gctggtctcgaactcctgacctcaggtgatctgccggcctcgacctcccaaagtgctgggattacaggtgtgagctaccacggctggcctgttttataatgttaaagcattcagatatgctagccttgtttgaagaccagttggggacaataggattagcttaccagctgttgagtattcataggagttactttttaggaagtggttgatttaataccaggctattccatactctcttgtccagttcacatgttaatcaatagcatactctgtgacattagtgatctagaaccacgttttcatctgtgcacagtgaactggcttatattgggatgaaaatcacaactttgacttaacacttaatctaactagcattaactagtccagacttacacatgtatttgcactgattttattcatgccctggtagctttgtttatctgggtcacaaaagctgaaattgtggtgtgctaagagaatcacaaatgtaacatacctcttatcttctatttagaggccccagacctaaagcaggaggagcgtctgcaagaactggagagctgttctggactgggtagcacatctgatgatacggatgtcagggaggtcagttcccgccccagcacaccaggcctcagtgttgtgtccggcataagtgcaacctctgaggatattcccaataagattgaagacctgagatctgagtgcagctctgattttgggggtaaagattctgtcactagtccagacatggatgaaataactcacggtgcccaccagctgacctctcctccttctcagtcagagtctctgctggccatgtttgatccactgtcttcacatgaaggggcttctgctgtggtaaggccaaaggttcactatgctaggccatcgcatccaccaccagatcccccaatcctggaaggagctgtgggaggaaatgaggccaggttgccaaactttggttcccatgttttaactccagctgaaatggaggcattcaagcaaaggcattcttaccctgagagactagttcgaagcaggagctctgatatagtatcttctgtccggagacccatgagtgaccccagctggaaccggcgtccaggaaatgaagagcgagaactccctccagctgcagccattggtgctacttctttggtggctgcacctcattcatcatcttcatccccgagtaaggactcctcaagaggagagactgaagaacgcaaagatagcgatgatgagaaatcagacaggaacagaccttggtggagaaaacgttttgtttcagccatgcctaaagctcctataccatttagaaagaaagaaaaacaagaaaaagacaaagatgatctggggcctgacagattctcaacactcacagatgatcccagccctagactcagtgcacaagctcaggtggctgaggatattctggacaaatacaggaatgccattaaacggaccagccccagtgatggagcaatggcaaactatgaaagtacagaggttatgggtgatggtgaaagtgcacatgattctccccgtgacgaagcactgcagaacatctcggctgatgatctcccagactctgcaagccaagcagcccacccgcaggattcagctttctcttacagagatgcaaaaaagaaactgaggcttgctctttgctctgcggactctgttgccttcccagtgctgacccattcaacaaggaatggtttaccagaccacacagacccagaagacaatgaaattgtatgcttcttaaaagttcaaatagctgaagcaattaatttacaagataagaatctaatggctcaacttcaagaaacaatgcgctgtgtgtgccgttttgataataggacttgtaggaaactgctggcttcgattgctgaggactacagaaaaagagccccatatattgcttatctcactcgttgtcgacaaggactacagaccacacaggctcacctggaaaggctattgcaaagagttttgcgggacaaagaagtggccaatcgatactttaccactgtctgtgtgagattactgcttgagagcaaagaaaagaagatcagggaattcattcaagactttcagaaactcaccgcagctgacgataaaactgctcaggtagaagattttctgcagtttctttatggtgcaatggcccaggatgtcatatggcaaaacgcgagtgaagaacagcttcaagatgcacagctggccattgagcgaagcgtgatgaaccggattttcaagctcgccttctaccctaatcaagatggggacatacttcgcgaccaggttcttcatgaacatatccagagattgtctaaagtagtgactgcaaatcacagagctcttcagataccagaggtttatcttcgagaagcaccatggccatctgcacaatcagaaatcaggacaataagtgcttataaaaccccccgggacaaagtgcagtgcatcctgagaatgtgctctacgattatgaacctcctgagcctggccaatgaggactctgtccctggagcggatgactttgttcctgtgttggtgtttgtgttgataaaggcaaatccaccctgtttgctgtctactgtgcagtatatcagtagcttttatgctagctgtctgtctggagaggagtcctattggtggatgcagttcacagcagcagtagaattcattaaaaccatcgatgaccgaaagtgaccaagaccaaggcccaccaaggcagcagactgttaatcagacaaacagatctctgagaaggtgcatcagctgctttgaaggctgaagattgttttgtatgatactgcacagcatcaggcattttaaagcagatctttactaaacaggttaatgagctaacaagcaggttctctcgtctttgggctctttcctttctgagttgcatattctattttcttgtccccaagtagagactagtactacaaaaagggaccacatttttcaagtatttctaagtataaaaaacaaaacaaaaatctcttaggaaatgtctagacctccattcttggattccctttctttccttttattttaaaaaagaacagtacccctcttttaagatgctgtcttacattaatgagcatctaatggaaagaaggtatgagttgcactgaggattagaatagtggtgcgttagtggcattatctataaatacactcacctaaattgaaagctaagaaggaaatgtaaatataatatatatttatatttgatgtaatatggacatctgcagattctaataaacaaggactattgctgatagtaggctgtgacatactgtcttgtgaaatggtttccttgacaaaatttaagctgagcttaaaagcaaaaaacaaaaagtacacagaaatatttattaaaatgtaatacagtttattgaactttctaggtatggagtttgatggacagggctgcctttaatgagtgtgaaggtcactaagtcacttagacatctcaccgtggaagtttgtgagcctgcattaggagatagactgattaccatacatgacataaaaaggaacagtggatagctcatactttatggtggttcttctcctccgaaataatatactgcagaaatcccagacagagctccttacaaacctttaattgtaatatatttttgatgattattcacattgaatgcacagaccaagaattcagtgaatgtcattttttaaaaaactaatttgtattgtctgctctagtgatacaagttttactagtgataaactattttaatcaaccatactattcttatggaaaaaaatatctattttggcaggtttctgtgcctttatttccctcttctgaaaaaaagtctgtgttttcatagtttggtttgcattgtatatcaataattaatcaggaatgggttttggtgcctgaaaaattggccatggaggcacaccaaagcttcaagcacaagtcttgtacatgggccatcactgtctggtttcacttcgtgtgtttcctaaacacatttagctgcttttttaacaaactcagccccatacttgagtcccttgttgttgggagcatttccaggcatcttttaagggaactgtgacaaacagcctcgggcagatgaacacggaggctctctgttgtctgtctctgagatctttgtgtctgggaatgcctaaagattttatttttttttctttgtttttattttattttattttatttttttgagacagagtctcaccctgttgcccaggctggagtgcaatggtgcgatcttggctcactgcaacctccacctcccagttcaagtgattcccctgcctcagcctcccgagtagctaggactacaggcgcatgtcaccaagcccggctaatttttgtatttttagtagaaacggggtttcaccatgttggccaggatgatcctcaatctcctgacctcgtgatccacccgccttggcctcccaaagtgcgggattacaagcgtgaaccaccctgcccagccagaaactagattttctttatgcctccaccccttcttattcatttactttacaataccaaaataacaaattgcataggagtgtgggatgtggtttctgccttctagagagagatcagaattaaactagtactatgaaatgtccttttgaatgttaggtcaagaaatccatgtacagagtcgtgcacttcattggctgtaactgtcaaacttgccttgtattagaagttaaatcccatcgtaaatacatcacgaggccagctgtgtgatttctgagacctagatgagagtccatttacttcagcctttgattcagtaaatgttaagcagcagaagacttcgaatggttgaaattcattgttacaggatttaactcataaaccaatgagagattttttttttctctgcaatggttgctaagtctattccatgttaacactgtggaaataaatatgaagatgtggacattgcaaaaaaaatct

SEQ ID NO: 325537 - DNA, 4125 bp, Homo sapiens
tagaatatgaatattgttagttttcaaatgcgtggagagagattcataaaggaagaatggaaaaagacatttgttattatttaaaggggtttaagtctaaatttgaatagttttttttcctccttcagcatagagatgtctgaataaatgaagtctgcatgtaaaaatgcactgttggaagttctgttagcatgaattgctgataacagtgatttgagtgcaaacactttagaaatccgtcatccattcagtctgccctgaactttgacactgtcattctggtgatgatgagaaggtggagctactcttcccaatttcctgctttggcaaggctctcagacctagaaatgggatgagtaggcagctgcatggtgcctcttaacattgagatatgtgctctttttaagtcttacctcctaatctgcctttgggattatgctactggtgtcatactaacatcagaggtggtacaaacccaaggggctaattctctcactctcctttcccttgcagatgatcccagccctagactcagtgcacaagctcaggtggctgaggatattctggacaaatacaggaatgccattaaacggaccagccccagtgatggagcaatggcaaactatgaaagtacagaggttatgggtgatggtgaaagtgcacatgattctccccgtgacgaagcactgcagaacatctcggctgatgatctcccagactctgcaagccaagcagcccacccgcaggattcagctttctcttacagagatgcaaaaaagaaactgaggcttgctctttgctctgcggactctgttgccttcccagtgctgacccattcaacaaggaatggtttaccagaccacacagacccagaagacaatgaaattgtatgcttcttaaaagttcaaatagctgaagcaattaatttacaagataagaatctaatggctcaacttcaagaaacaatgcgctgtgtgtgccgttttgataataggacttgtaggaaactgctggcttcgattgctgaggactacagaaaaagagccccatatattgcttatctcactcgttgtcgacaaggactacagaccacacaggctcacctggaaaggctattgcaaagagttttgcgggacaaagaagtggccaatcgatactttaccactgtctgtgtgagattactgcttgagagcaaagaaaagaagatcagggaattcattcaagactttcagaaactcaccgcagctgacgataaaactgctcaggtagaagattttctgcagtttctttatggtgcaatggcccaggatgtcatatggcaaaacgcgagtgaagaacagcttcaagatgcacagctggccattgagcgaagcgtgatgaaccggattttcaagctcgccttctaccctaatcaagatggggacatacttcgcgaccaggttcttcatgaacatatccagagattgtctaaagtagtgactgcaaatcacagagctcttcagataccagaggtttatcttcgagaagcaccatggccatctgcacaatcagaaatcaggacaataagtgcttataaaaccccccgggacaaagtgcagtgcatcctgagaatgtgctctacgattatgaacctcctgagcctggccaatgaggactctgtccctggagcggatgactttgttcctgtgttggtgtttgtgttgataaaggcaaatccaccctgtttgctgtctactgtgcagtatatcagtagcttttatgctagctgtctgtctggagaggagtcctattggtggatgcagttcacagcagcagtagaattcattaaaaccatcgatgaccgaaagtgaccaagaccaaggcccaccaaggcagcagactgttaatcagacaaacagatctctgagaaggtgcatcagctgctttgaaggctgaagattgttttgtatgatactgcacagcatcaggcattttaaagcagatctttactaaacaggttaatgagctaacaagcaggttctctcgtctttgggctctttcctttctgagttgcatattctattttcttgtccccaagtagagactagtactacaaaaagggaccacatttttcaagtatttctaagtataaaaaacaaaacaaaaatctcttaggaaatgtctagacctccattcttggattccctttctttccttttattttaaaaaagaacagtacccctcttttaagatgctgtcttacattaatgagcatctaatggaaagaaggtatgagttgcactgaggattagaatagtggtgcgttagtggcattatctataaatacactcacctaaattgaaagctaagaaggaaatgtaaatataatatatatttatatttgatgtaatatggacatctgcagattctaataaacaaggactattgctgatagtaggctgtgacatactgtcttgtgaaatggtttccttgacaaaatttaagctgagcttaaaagcaaaaaacaaaaagtacacagaaatatttattaaaatgtaatacagtttattgaactttctaggtatggagtttgatggacagggctgcctttaatgagtgtgaaggtcactaagtcacttagacatctcaccgtggaagtttgtgagcctgcattaggagatagactgattaccatacatgacataaaaaggaacagtggatagctcatactttatggtggttcttctcctccgaaataatatactgcagaaatcccagacagagctccttacaaacctttaattgtaatatatttttgatgattattcacattgaatgcacagaccaagaattcagtgaatgtcattttttaaaaaactaatttgtattgtctgctctagtgatacaagttttactagtgataaactattttaatcaaccatactattcttatggaaaaaaatatctattttggcaggtttctgtgcctttatttccctcttctgaaaaaaagtctgtgttttcatagtttggtttgcattgtatatcaataattaatcaggaatgggttttggtgcctgaaaaattggccatggaggcacaccaaagcttcaagcacaagtcttgtacatgggccatcactgtctggtttcacttcgtgtgtttcctaaacacatttagctgcttttttaacaaactcagccccatacttgagtcccttgttgttgggagcatttccaggcatcttttaagggaactgtgacaaacagcctcgggcagatgaacacggaggctctctgttgtctgtctctgagatctttgtgtctgggaatgcctaaagattttatttttttttctttgtttttattttattttattttatttttttgagacagagtctcaccctgttgcccaggctggagtgcaatggtgcgatcttggctcactgcaacctccacctcccagttcaagtgattcccctgcctcagcctcccgagtagctaggactacaggcgcatgtcaccaagcccggctaatttttgtatttttagtagaaacggggtttcaccatgttggccaggatgatcctcaatctcctgacctcgtgatccacccgccttggcctcccaaagtgcgggattacaagcgtgaaccaccctgcccagccagaaactagattttctttatgcctccaccccttcttattcatttactttacaataccaaaataacaaattgcataggagtgtgggatgtggtttctgccttctagagagagatcagaattaaactagtactatgaaatgtccttttgaatgttaggtcaagaaatccatgtacagagtcgtgcacttcattggctgtaactgtcaaacttgccttgtattagaagttaaatcccatcgtaaatacatcacgaggccagctgtgtgatttctgagacctagatgagagtccatttacttcagcctttgattcagtaaatgttaagcagcagaagacttcgaatggttgaaattcattgttacaggatttaactcataaaccaatgagagattttttttttctctgcaatggttgctaagtctattccatgttaacactgtggaaataaatatgaagatgtggacattgcaaaaaaaatct

SEQ ID NO: 325538 - DNA, 3077 bp, Homo sapiens
ctgatttaattatatggctacatattgtcctaaaataaactacactgaaacacttttggctttaagatcatggtgtctgcatagctagtgattaaaattatttctatgatttcctttttaaaattatttagatagtttttattaaactatttaaaaattattattttgctttggagactttcagaaactcaccgcagctgacgataaaactgctcaggtagaagattttctgcagtttctttatggtgcaatggcccaggatgtcatatggcaaaacgcgagtgaagaacagcttcaagatgcacagctggccattgagcgaagcgtgatgaaccggattttcaagctcgccttctaccctaatcaagatggggacatacttcgcgaccaggttcttcatgaacatatccagagattgtctaaagtagtgactgcaaatcacagagctcttcagataccagaggtttatcttcgagaagcaccatggccatctgcacaatcagaaatcaggacaataagtgcttataaaaccccccgggacaaagtgcagtgcatcctgagaatgtgctctacgattatgaacctcctgagcctggccaatgaggactctgtccctggagcggatgactttgttcctgtgttggtgtttgtgttgataaaggcaaatccaccctgtttgctgtctactgtgcagtatatcagtagcttttatgctagctgtctgtctggagaggagtcctattggtggatgcagttcacagcagcagtagaattcattaaaaccatcgatgaccgaaagtgaccaagaccaaggcccaccaaggcagcagactgttaatcagacaaacagatctctgagaaggtgcatcagctgctttgaaggctgaagattgttttgtatgatactgcacagcatcaggcattttaaagcagatctttactaaacaggttaatgagctaacaagcaggttctctcgtctttgggctctttcctttctgagttgcatattctattttcttgtccccaagtagagactagtactacaaaaagggaccacatttttcaagtatttctaagtataaaaaacaaaacaaaaatctcttaggaaatgtctagacctccattcttggattccctttctttccttttattttaaaaaagaacagtacccctcttttaagatgctgtcttacattaatgagcatctaatggaaagaaggtatgagttgcactgaggattagaatagtggtgcgttagtggcattatctataaatacactcacctaaattgaaagctaagaaggaaatgtaaatataatatatatttatatttgatgtaatatggacatctgcagattctaataaacaaggactattgctgatagtaggctgtgacatactgtcttgtgaaatggtttccttgacaaaatttaagctgagcttaaaagcaaaaaacaaaaagtacacagaaatatttattaaaatgtaatacagtttattgaactttctaggtatggagtttgatggacagggctgcctttaatgagtgtgaaggtcactaagtcacttagacatctcaccgtggaagtttgtgagcctgcattaggagatagactgattaccatacatgacataaaaaggaacagtggatagctcatactttatggtggttcttctcctccgaaataatatactgcagaaatcccagacagagctccttacaaacctttaattgtaatatatttttgatgattattcacattgaatgcacagaccaagaattcagtgaatgtcattttttaaaaaactaatttgtattgtctgctctagtgatacaagttttactagtgataaactattttaatcaaccatactattcttatggaaaaaaatatctattttggcaggtttctgtgcctttatttccctcttctgaaaaaaagtctgtgttttcatagtttggtttgcattgtatatcaataattaatcaggaatgggttttggtgcctgaaaaattggccatggaggcacaccaaagcttcaagcacaagtcttgtacatgggccatcactgtctggtttcacttcgtgtgtttcctaaacacatttagctgcttttttaacaaactcagccccatacttgagtcccttgttgttgggagcatttccaggcatcttttaagggaactgtgacaaacagcctcgggcagatgaacacggaggctctctgttgtctgtctctgagatctttgtgtctgggaatgcctaaagattttatttttttttctttgtttttattttattttattttatttttttgagacagagtctcaccctgttgcccaggctggagtgcaatggtgcgatcttggctcactgcaacctccacctcccagttcaagtgattcccctgcctcagcctcccgagtagctaggactacaggcgcatgtcaccaagcccggctaatttttgtatttttagtagaaacggggtttcaccatgttggccaggatgatcctcaatctcctgacctcgtgatccacccgccttggcctcccaaagtgcgggattacaagcgtgaaccaccctgcccagccagaaactagattttctttatgcctccaccccttcttattcatttactttacaataccaaaataacaaattgcataggagtgtgggatgtggtttctgccttctagagagagatcagaattaaactagtactatgaaatgtccttttgaatgttaggtcaagaaatccatgtacagagtcgtgcacttcattggctgtaactgtcaaacttgccttgtattagaagttaaatcccatcgtaaatacatcacgaggccagctgtgtgatttctgagacctagatgagagtccatttacttcagcctttgattcagtaaatgttaagcagcagaagacttcgaatggttgaaattcattgttacaggatttaactcataaaccaatgagagattttttttttctctgcaatggttgctaagtctattccatgttaacactgtggaaataaatatgaagatgtggacattgcaaaaaaaatct

SEQ ID NO: 325539 - DNA, 4469 bp, Homo sapiens
tgcaggacgcagggaagccaacaggcgagtggcgaaggtggcggcagcggcggcgggggcagtcaccggctagggcgacggctccgaggccgagtggcggtccgacagagtcctccgtgtcctcccccgcatgacccccttggggtaagtgtactggagagagttggttatacattctaggaatctcaaagggtctggctctgtcacccaggctggagtgcagtgacacgatctcagctcactgtaacctccgcctcccgggttcaagcgatcctcccatctgaccctcccaagtagctggcattcagtgatcagcctttgagcctttcccacattgaagatggtgaaactagatattcatactctggctcatcacctcaagcaggaacgcttatatgtaaactctgagaaacagctcattcagaggctcaatgcagatgtacttaagacagctgaaaagttgtatcgtacagcatggattgcgaagcaacagagaatcaatttggatcggcttatcataaccagtgctgaagcttcccctgctgaatgttgccaacatgccaaaattttggaagatacacaatttgttgatgggtataagcaattgggatttcaggagactgcttatggagaattcttgagtcgattgagggaaaatcctcgtcttattgcctcctctttggttgctggagagaaacttaatcaggagaacacacaaagtgttatttacacagtttttacctccctgtatggcaattgcatcatgcaagaagatgaaagctacctccttcaggttttgcgatacttgattgaatttgaacttaaagaaagtgacaaccctaggcgacttttgaggagaggaacttgtgccttcagcatcttatttaaacttttttctgaaggactgttttctgccaaacttttcctcacagccactttacatgagccaattatgcaactgcttgttgaagatgaagatcacctggaaacagatccaaacaagctaattgagaggttctctccatctcagcaggaaaaactctttggagagaagggctcagatagattcaggcaaaaagttcaagaaatggtggagtccaatgaagcaaagctagtggctttggtgaacaaatttattggttatctcaaacagaacacatattgttttccacatagtttaaggtggatcgtgtctcagatgtacaaaaccctctcctgtgtagataggctggaagttggggaggtcagggcaatgtgtactgatctcctgttggcctgcttcatttgtcctgcagttgtcaatccagaacaatatggaataatttccgatgctcctattaatgaagtagcacgatttaatctgatgcaggtaggccgccttttgcagcagttagcaatgactggctctgaagagggagatccccgaacaaagagcagccttggaaagtttgacaaaagctgtgttgccgctttccttgatgttgtgattgggggccgtgcagtggagacccctccattgtcttccgtcaatcttctggaaggattgagcagaactgtggtttatataacctacagtcagcttattactctggtgaattttatgaagagtgtgatgtctggagatcaactgagagaagatagaatggctcttgacaatttattggcaaacctacccccggccaagccaggaaaaagtagcagtttagaaatgactccctacaatacacctcagctatctccagcaaccactccagcaaataaaaagaatcgattacctatagcaactcggagcagaagccgcaccaatatgctaatggacctacatatggaccatgaaggatcatctcaagaaaccatccaggaggtgcaaccagaagaggtgttggtcatttccttaggtacaggtccccagcttactccagggatgatgtcagaaaatgaggtcctaaacatgcagctttcggatggaggacaaggagatgtccctgttgatgaaaacaaactccatggtaaacctgataaaaccttgcgcttttccctctgcagtgataatctggaaggaatatctgaaggtccttcaaatcgctccaattcagtgtcctccctagacctagaaggagagtctgtgtcagaacttggagcaggaccttctggcagtaatggagttgaagctctacagctgttagaacatgagcaagctacaacacaggataaccttgatgataagctaaggaagtttgaaattcgtgacatgatgggattaacagatgatagggacatatcagaaacagtgagtgagacctggagtacagacgtcttgggaagtgactttgaccctaatattgatgaagatcgcttgcaagaaattgcaggtgctgcagcagagaacatgttaggcagtttgctgtgcctcccaggttcagggtcagtgcttcttgacccctgcactggttctaccatatcagagacaacaagtgaagcttggagtgtagaggtattgccaagtgactcagaggccccagacctaaagcaggaggagcgtctgcaagaactggagagctgttctggactgggtagcacatctgatgatacggatgtcagggaggtcagttcccgccccagcacaccaggcctcagtgttgtgtccggcataagtgcaacctctgaggatattcccaataagattgaagacctgagatctgagtgcagctctgattttgggggtaaagattctgtcactagtccagacatggatgaaataactcacgattttctttatatacttcagccaaaacaacattttcaacacattgaagcagaagcagacatgagaatccagctgtcttctagtgcccaccagctgacctctcctccttctcagtcagagtctctgctggccatgtttgatccactgtcttcacatgaaggggcttctgctgtggtaaggccaaaggttcactatgctaggccatcgcatccaccaccagatcccccaatcctggaaggagctgtgggaggaaatgaggccaggttgccaaactttggttcccatgttttaactccagctgaaatggaggcattcaagcaaaggcattcttaccctgagagactagttcgaagcaggagctctgatatagtatcttctgtccggagacccatgagtgaccccagctggaaccggcgtccaggaaatgaagagcgagaactccctccagctgcagccattggtgctacttctttggtggctgcacctcattcatcatcttcatccccgagtaaggactcctcaagaggagagactgaagaacgcaaagatagcgatgatgagaaatcagacaggaacagaccttggtggagaaaacgttttgtttcagccatgcctaaagctcctataccatttagaaagaaagaaaaacaagaaaaagacaaagatgatctggggcctgacagattctcaacactcacagatgatcccagccctagactcagtgcacaagctcaggtggctgaggatattctggacaaatacaggaatgccattaaacggaccagccccagtgatggagcaatggcaaactatgaaagtacagaggttatgggtgatggtgaaagtgcacatgattctccccgtgacgaagcactgcagaacatctcggctgatgatctcccagactctgcaagccaagcagcccacccgcaggattcagctttctcttacagagatgcaaaaaagaaactgaggcttgctctttgctctgcggactctgttgccttcccagtgctgacccattcaacaaggaatggtttaccagaccacacagacccagaagacaatgaaattgtatgcttcttaaaagttcaaatagctgaagcaattaatttacaagataagaatctaatggctcaacttcaagaaacaatgcgctgtgtgtgccgttttgataataggacttgtaggaaactgctggcttcgattgctgaggactacagaaaaagagccccatatattgcttatctcactcgttgtcgacaaggactacagaccacacaggctcacctggaaaggctattgcaaagagttttgcgggacaaagaagtggccaatcgatactttaccactgtctgtgtgagattactgcttgagagcaaagaaaagaagatcagggaattcattcaagactttcagaaactcaccgcagctgacgataaaactgctcagagtttctttatggtgcaatggcccaggatgtcatatggcaaaacgcgagtgaagaacagcttcaagatatgagagtccatttacttcagcctttgattcagtaaatgttaagcagcagaagacttcgaatggttgaaattcattgttacaggatttaactcataaactttctctgcaatggttgctaagtctattccatgttaacactgtggaaataaatatgaagatgtggacattgcaaaaaaaatct

SEQ ID NO: 325540 - DNA, 482 bp, Homo sapiens
gccaaatttttacaattcataagagcaaataatataaaggtttatctgtctaatatctatgttttatataataactaaaccaatgttgcatcccagatgtctctcaaagttttctttctccacttcttccattggaaaaatttataatttgagtaaatttcatttctatgtctatttggaggtaataataataataaaacagccctttgtgaattaatataaatggaaataacagaaactccagtttggaataacatgatttatgtgtgcaattctttaatatcctgtcaatttgaatagtgatgtttttatattcacagtcagttgaagatgccaataacagcggcatgaatctattggaccagtctgtcattaaaaaaggtatggataattccccccaaaaagtaagcaaagttctctcatgcattaacgtctttatgatgaattttcactttgggggaattcattatttgacaagacat

SEQ ID NO: 325541 - DNA, 543 bp, Homo sapiens
ctgcatctggagccccgaagaacggcagaagaaaagaggccaaaaagacagcaaagagacagatgaatagttctgtctgtgtgtgacaggcatcgccaatcttgttggggtggggggcgggtgtaattttttttttttttttttgatggcttgtcctggaaacacatcaagctcagctcctgtgtccagctcgcttctctgctggactccttgattttttttttaatcattgtttgattttgagcagtaaccaggcttttttttccagatgttagtccacacctattcatccatggtgagtttggattcacgtgttaccagaattgcatgctccctcctctcactgtctctctgtctctgcgtctctgtgtgtgtgtgtgtctcacactctctgtctctctctgtcttcctttgagcgcctttggcttggtaatttagcaccataattggacgaggctgcagctgcttctctctgcattgtgtgttctccgtctgagctccatgagtcagctgggaggggagaggccgaaaagaaaaactttt

SEQ ID NO: 325542 - DNA, 2019 bp, Homo sapiens
ctgcatctggagccccgaagaacggcagaagaaaagaggccaaaaagacagcaaagagacagatgaatagttctgtctgtgtgtgacaggcatcgccaatcttgttggggtggggggcgggtgtaattttttttttttttttttgatggcttgtcctggaaacacatcaagctcagctcctgtgtccagctcgcttctctgctggactccttgattttttttttaatcattgtttgattttgagcagtaaccaggcttttttttccagatgttagtccacacctattcatccatggaccggcacgatggtgtcccgagccacagctcgcggctctcccagctgggctcggtgtcccaaggaccctactcgagcgccccgccgctgtcccacaccccgtcgtcggacttccagccgccctacttcccacccccctaccagccgctcccctaccaccagagccaggacccctactcccacgtcaacgacccctactccctgaacccactgcaccagccccagcaacatccctgggggcaacggcagcggcaagaagtgggttcggaagccggctctctcctgccccagcctcgggccgccttgccccagctctcgggccttgacccccggagggactaccactcggtccgccggccggacgtgctgctgcattcggcgcaccacggcctggacgcgggcatgggtgacagcctctcgctgcacggcctcggccatcccggaatggaagacgtccagtcagttgaagatgccaataacagcggcatgaatctattggaccagtctgtcattaaaaaagttccagttcctcccaaatcggtgacttctctaatgatgaataaagacggcttcctgggaggcatgtctgtcaacaccggcgaggtgttttgctccgtcccaggccgtttgtctctgctcagttcaacttcgaagtacaaagtaactgtgggagaagttcagagacggctgtcgccccctgaatgcctcaatgcatctctcctcggcggagtcctcagaagagccaaatcgaaaaatggggggagatctttgcgagaaaggctagaaaaaatcggtttgaatttacccgcgggcaggcgcaaagcagcaaatgtcacgttactcacctccctggtggaaggagaagctgttcacttagctagggattttgggtacatttgcgaaacggagtttcccgccaaagccgtctctgagtatttgaaccggcagcacacagacccgagtgacctgcactcccgaaagaatatgctgttggccaccaagcaactttgtaaagaatttacggatctactggcgcaggaccggacaccgatagggaacagccgacccagccccatcctggagccggggatccagagctgcctcacgcacttcagcctcatcacgcacggcttcggcgccccggccatttgcgccgcgctcacggccctgcagaactatctcaccgaggcgctcaaaggcatggacaagatgttcttgaacaacaccaccactaacaggcacacgtctggggaaggcccaggtagtaaaactggcgacaaggaggagaaacacaggaaatgaaaaatttttaaaaaaagaaggaaaaatgttttaaatacaaaaggaaaaacagacaaaaatttaattttagctttaaaatattggattggctttggaagaattatattaggtagaatacacatacaatcaaaattttaaaaaaaaaagctaaataacttaaaaaaaaactgaggcgtacaacggagcaacaatatcggttctcagtgtctatttcaagatacatttggagacaaccgtccggattttccacttcggttctttcgagtttagtaatactgataataaaagaaaaccatgatttccccttccctttggaaaataaacataagactaaacatgagaaaaacgctaacttattggaagaaaatcggagaaacgttggtgtcaatgctttgagagctggttgactgagacgcacgaac

SEQ ID NO: 325543 - DNA, 2085 bp, Homo sapiens
attaaggcatttagaatctccctccatacacactgttcctgtacccctgccttttgcctgctttgcactccccaaaaagcggctaaaatgttatagttaagtgggtgattcctttcccattttctccccaagcctggggtttgaaattgctgaaatcatgtggccctctgagtcaacttgggggtctaagtttcagatccttgcttcccttgtcccgggaagagcgtacaaaagccgggcttctccatttgtcacttgtattttttttcttcctctctgtactctctgtctctctctgcctctatctctctttctctgtctccttctctggctctcttccccttcctctctccgctcccaggaccggcacgatggtgtcccgagccacagctcgcggctctcccagctgggctcggtgtcccaaggaccctactcgagcgccccgccgctgtcccacaccccgtcgtcggacttccagccgccctacttcccacccccctaccagccgctcccctaccaccagagccaggacccctactcccacgtcaacgacccctactccctgaacccactgcaccagccccagcaacatccctgggggcaacggcagcggcaagaagtgggttcggaagccggctctctcctgccccagcctcgggccgccttgccccagctctcgggccttgacccccggagggactaccactcggtccgccggccggacgtgctgctgcattcggcgcaccacggcctggacgcgggcatgggtgacagcctctcgctgcacggcctcggccatcccggaatggaagacgtccagtcagttgaagatgccaataacagcggcatgaatctattggaccagtctgtcattaaaaaagttccagttcctcccaaatcggtgacttctctaatgatgaataaagacggcttcctgggaggcatgtctgtcaacaccggcgaggtgttttgctccgtcccaggccgtttgtctctgctcagttcaacttcgaagtacaaagtaactgtgggagaagttcagagacggctgtcgccccctgaatgcctcaatgcatctctcctcggcggagtcctcagaagagccaaatcgaaaaatggggggagatctttgcgagaaaggctagaaaaaatcggtttgaatttacccgcgggcaggcgcaaagcagcaaatgtcacgttactcacctccctggtggaaggagaagctgttcacttagctagggattttgggtacatttgcgaaacggagtttcccgccaaagccgtctctgagtatttgaaccggcagcacacagacccgagtgacctgcactcccgaaagaatatgctgttggccaccaagcaactttgtaaagaatttacggatctactggcgcaggaccggacaccgatagggaacagccgacccagccccatcctggagccggggatccagagctgcctcacgcacttcagcctcatcacgcacggcttcggcgccccggccatttgcgccgcgctcacggccctgcagaactatctcaccgaggcgctcaaaggcatggacaagatgttcttgaacaacaccaccactaacaggcacacgtctggggaaggcccaggtagtaaaactggcgacaaggaggagaaacacaggaaatgaaaaatttttaaaaaaagaaggaaaaatgttttaaatacaaaaggaaaaacagacaaaaatttaattttagctttaaaatattggattggctttggaagaattatattaggtagaatacacatacaatcaaaattttaaaaaaaaaagctaaataacttaaaaaaaaactgaggcgtacaacggagcaacaatatcggttctcagtgtctatttcaagatacatttggagacaaccgtccggattttccacttcggttctttcgagtttagtaatactgataataaaagaaaaccatgatttccccttccctttggaaaataaacataagactaaacatgagaaaaacgctaacttattggaagaaaatcggagaaacgttggtgtcaatgctttgagagctggttgactgagacgcacgaac

SEQ ID NO: 325544 - DNA, 1170 bp, Homo sapiens
ttctctttgctgaggcttacttgtccagcctattgtttgagacaacagatataagttgcgatgggagaggagcgtcggatttggtgtgtatcccccatttccaattatagatggatcattacagacagcggagtcctgagaagccagacatctgctcctcacatgaatgcactcacctcctagagaccaggctgccatcatgctctggaagcttgtggagaatgtcaagtacgaagatatctatgaggaccggcacgatggtgtcccgagccacagctcgcggctctcccagctgggctcggtgtcccaaggaccctactcgagcgccccgccgctgtcccacaccccgtcgtcggacttccagccgccctacttcccacccccctaccagccgctcccctaccaccagagccaggacccctactcccacgtcaacgacccctactccctgaacccactgcaccagccccagcaacatccctgggggcaacggcagcggcaagaagtgggttcggaagccggctctctcctgccccagcctcgggccgccttgccccagctctcgggccttgacccccggagggactaccactcggtccgccggccggacgtgctgctgcattcggcgcaccacggcctggacgcgggcatgggtgacagcctctcgctgcacggcctcggccatcccggaatggaagacgtccagtcagttgaagatgccaataacagcggcatgaatctattggaccagtctgtcattaaaaaagttccagttcctcccaaatcggtgacttctctaatgatgaataaagacggcttcctgggaggcatgtctgtcaacaccggcgaggtgttttgctccgtcccaggccgtttgtctctgctcagttcaacttcgaagtacaaagtaactgtgggagaagttcagagacggctgtcgccccctgaatgcctcaatgcatctctcctcggcggagtcctcagaaggtaaccccaccacgaaaaacaaaaacaaaaacaaaaaaacaaacaaaaacccaccagtttttatttattggacagtgaggagaaggttccagcaaaacccaatctgcagtctgacgcagttgcctagcaaccgggtggccggagcaattctattccgcagcgcttgggaggatccgcggccgc

SEQ ID NO: 325545 - DNA, 506 bp, Homo sapiens
acttggtgtctgtcctgtggcctcacacagagacacattctatcagccggtcatcaggatcgaaacttggtcacctttatggcaattttttctctctttctagttccagttcctcccaaatcggtgacttctctaatgatgaataaagacggcttcctgggaggcatgtctgtcaacaccggcgaggtgttttgctccgtcccaggccgtttgtctctgctcagttcaacttcgaagtacaaagtaactgtgggagaagttcagagacggctgtcgccccctgaatgcctcaatgcatctctcctcggcggagtcctcagaaggtaaccccaccacgaaaaacaaaaacaaaaacaaaaaaacaaacaaaaacccaccagtttttatttattggacagtgaggagaaggttccagcaaaacccaatctgcagtctgacgcagttgcctagcaaccgggtggccggagcaattctattccgcagcgcttgggaggatccgcggccgc

SEQ ID NO: 325546 - DNA, 1971 bp, Homo sapiens
ttctctttgctgaggcttacttgtccagcctattgtttgagacaacagatataagttgcgatgggagaggagcgtcggatttggtgtgtatcccccatttccaattatagatggatcattacagacagcggagtcctgagaagccagacatctgctcctcacatgaatgcactcacctcctagagaccaggctgccatcatgctctggaagcttgtggagaatgtcaagtacgaagatatctatgaggaccggcacgatggtgtcccgagccacagctcgcggctctcccagctgggctcggtgtcccaaggaccctactcgagcgccccgccgctgtcccacaccccgtcgtcggacttccagccgccctacttcccacccccctaccagccgctcccctaccaccagagccaggacccctactcccacgtcaacgacccctactccctgaacccactgcaccagccccagcaacatccctgggggcaacggcagcggcaagaagtgggttcggaagccggctctctcctgccccagcctcgggccgccttgccccagctctcgggccttgacccccggagggactaccactcggtccgccggccggacgtgctgctgcattcggcgcaccacggcctggacgcgggcatgggtgacagcctctcgctgcacggcctcggccatcccggaatggaagacgtccagtcagttgaagatgccaataacagcggcatgaatctattggaccagtctgtcattaaaaaagttccagttcctcccaaatcggtgacttctctaatgatgaataaagacggcttcctgggaggcatgtctgtcaacaccggcgaggtgttttgctccgtcccaggccgtttgtctctgctcagttcaacttcgaagtacaaagtaactgtgggagaagttcagagacggctgtcgccccctgaatgcctcaatgcatctctcctcggcggagtcctcagaagagccaaatcgaaaaatggggggagatctttgcgagaaaggctagaaaaaatcggtttgaatttacccgcgggcaggcgcaaagcagcaaatgtcacgttactcacctccctggtggaaggagaagctgttcacttagctagggattttgggtacatttgcgaaacggagtttcccgccaaagccgtctctgagtatttgaaccggcagcacacagacccgagtgacctgcactcccgaaagaatatgctgttggccaccaagcaactttgtaaagaatttacggatctactggcgcaggaccggacaccgatagggaacagccgacccagccccatcctggagccggggatccagagctgcctcacgcacttcagcctcatcacgcacggcttcggcgccccggccatttgcgccgcgctcacggccctgcagaactatctcaccgaggcgctcaaaggcatggacaagatgttcttgaacaacaccaccactaacaggcacacgtctggggaaggcccaggtagtaaaactggcgacaaggaggagaaacacaggaaatgaaaaatttttaaaaaaagaaggaaaaatgttttaaatacaaaaggaaaaacagacaaaaatttaattttagctttaaaatattggattggctttggaagaattatattaggtagaatacacatacaatcaaaattttaaaaaaaaaagctaaataacttaaaaaaaaactgaggcgtacaacggagcaacaatatcggttctcagtgtctatttcaagatacatttggagacaaccgtccggattttccacttcggttctttcgagtttagtaatactgataataaaagaaaaccatgatttccccttccctttggaaaataaacataagactaaacatgagaaaaacgctaacttattggaagaaaatcggagaaacgttggtgtcaatgctttgagagctggttgactgagacgcacgaac

SEQ ID NO: 325547 - DNA, 1998 bp, Homo sapiens
ttctctttgctgaggcttacttgtccagcctattgtttgagacaacagatataagttgcgatgggagaggagcgtcggatttggtgtgtatcccccatttccaattatagatggatcattacagacagcggagtcctgagaagccagacatctgctcctcacatgaatgcactcacctcctagagaccaggctgccatcatgctctggaagcttgtggagaatgtcaagtacgaagatatctatgagatgttagtccacacctattcatccatggaccggcacgatggtgtcccgagccacagctcgcggctctcccagctgggctcggtgtcccaaggaccctactcgagcgccccgccgctgtcccacaccccgtcgtcggacttccagccgccctacttcccacccccctaccagccgctcccctaccaccagagccaggacccctactcccacgtcaacgacccctactccctgaacccactgcaccagccccagcaacatccctgggggcaacggcagcggcaagaagtgggttcggaagccggctctctcctgccccagcctcgggccgccttgccccagctctcgggccttgacccccggagggactaccactcggtccgccggccggacgtgctgctgcattcggcgcaccacggcctggacgcgggcatgggtgacagcctctcgctgcacggcctcggccatcccggaatggaagacgtccagtcagttgaagatgccaataacagcggcatgaatctattggaccagtctgtcattaaaaaagttccagttcctcccaaatcggtgacttctctaatgatgaataaagacggcttcctgggaggcatgtctgtcaacaccggcgaggtgttttgctccgtcccaggccgtttgtctctgctcagttcaacttcgaagtacaaagtaactgtgggagaagttcagagacggctgtcgccccctgaatgcctcaatgcatctctcctcggcggagtcctcagaagagccaaatcgaaaaatggggggagatctttgcgagaaaggctagaaaaaatcggtttgaatttacccgcgggcaggcgcaaagcagcaaatgtcacgttactcacctccctggtggaaggagaagctgttcacttagctagggattttgggtacatttgcgaaacggagtttcccgccaaagccgtctctgagtatttgaaccggcagcacacagacccgagtgacctgcactcccgaaagaatatgctgttggccaccaagcaactttgtaaagaatttacggatctactggcgcaggaccggacaccgatagggaacagccgacccagccccatcctggagccggggatccagagctgcctcacgcacttcagcctcatcacgcacggcttcggcgccccggccatttgcgccgcgctcacggccctgcagaactatctcaccgaggcgctcaaaggcatggacaagatgttcttgaacaacaccaccactaacaggcacacgtctggggaaggcccaggtagtaaaactggcgacaaggaggagaaacacaggaaatgaaaaatttttaaaaaaagaaggaaaaatgttttaaatacaaaaggaaaaacagacaaaaatttaattttagctttaaaatattggattggctttggaagaattatattaggtagaatacacatacaatcaaaattttaaaaaaaaaagctaaataacttaaaaaaaaactgaggcgtacaacggagcaacaatatcggttctcagtgtctatttcaagatacatttggagacaaccgtccggattttccacttcggttctttcgagtttagtaatactgataataaaagaaaaccatgatttccccttccctttggaaaataaacataagactaaacatgagaaaaacgctaacttattggaagaaaatcggagaaacgttggtgtcaatgctttgagagctggttgactgagacgcacgaac

SEQ ID NO: 325548 - DNA, 1307 bp, Homo sapiens
acttggtgtctgtcctgtggcctcacacagagacacattctatcagccggtcatcaggatcgaaacttggtcacctttatggcaattttttctctctttctagttccagttcctcccaaatcggtgacttctctaatgatgaataaagacggcttcctgggaggcatgtctgtcaacaccggcgaggtgttttgctccgtcccaggccgtttgtctctgctcagttcaacttcgaagtacaaagtaactgtgggagaagttcagagacggctgtcgccccctgaatgcctcaatgcatctctcctcggcggagtcctcagaagagccaaatcgaaaaatggggggagatctttgcgagaaaggctagaaaaaatcggtttgaatttacccgcgggcaggcgcaaagcagcaaatgtcacgttactcacctccctggtggaaggagaagctgttcacttagctagggattttgggtacatttgcgaaacggagtttcccgccaaagccgtctctgagtatttgaaccggcagcacacagacccgagtgacctgcactcccgaaagaatatgctgttggccaccaagcaactttgtaaagaatttacggatctactggcgcaggaccggacaccgatagggaacagccgacccagccccatcctggagccggggatccagagctgcctcacgcacttcagcctcatcacgcacggcttcggcgccccggccatttgcgccgcgctcacggccctgcagaactatctcaccgaggcgctcaaaggcatggacaagatgttcttgaacaacaccaccactaacaggcacacgtctggggaaggcccaggtagtaaaactggcgacaaggaggagaaacacaggaaatgaaaaatttttaaaaaaagaaggaaaaatgttttaaatacaaaaggaaaaacagacaaaaatttaattttagctttaaaatattggattggctttggaagaattatattaggtagaatacacatacaatcaaaattttaaaaaaaaaagctaaataacttaaaaaaaaactgaggcgtacaacggagcaacaatatcggttctcagtgtctatttcaagatacatttggagacaaccgtccggattttccacttcggttctttcgagtttagtaatactgataataaaagaaaaccatgatttccccttccctttggaaaataaacataagactaaacatgagaaaaacgctaacttattggaagaaaatcggagaaacgttggtgtcaatgctttgagagctggttgactgagacgcacgaac

SEQ ID NO: 325549 - DNA, 4001 bp, Homo sapiens
tgcttgtatctctgggtgatcacagacccctgctctccaaggtgggttgtgaactctggagcactaccaagattggctaagagctgaaggagagtcccaaaggagcttcaattctgcagaactatacagccttctttaccttaccttgaccaggtgcttagagtttggaaagtcagggataagaattgaaattcctccaggtaagaagacccccctcttaggaaatggactcctccaattttctcacatgatttttcaggcactttcgcttttccatatataggagtcgctcaggagcaagctgtggcaagctggagggagggacacatcccgtgttccatccactccctcccttctcagcagtcctcgcctgttctcacgtgctcacaggcagttaggcagaagtgatccccgtggctctgccaaagacaagcctgttgggttgaaagaagaagaagaagaagaagaagaaaaaaaaactcaggcaaagtcacagcctcaaaattgttcactgaaagaagcgtgagtggagaagtgtgagaagatgaatggaccggtggatggcttgtgtgaccactctctaagtgaaggagtcttcatgttcacatcggagtctgtgggagagggacacccggataagatctgtgaccagatcagtgatgcagtgctggatgcccatctcaagcaagaccccaatgccaaggtggcctgtgagacagtgtgcaagaccggcatggtgctgctgtgtggtgagatcacctcaatggccatggtggactaccagcgggtggtgagggacaccatcaagcacatcggctacgatgactcagccaagggctttgacttcaagacttgcaacgtgctggtggctttggagcagcaatccccagatattgcccagtgcgtccatctggacagaaatgaggaggatgtgggggcaggagatcagggtttgatgttcggctatgccaccgacgagacagaggagtgcatgcccctcaccatcatccttgctcacaagctcaacgcccggatggcagacctcaggcgctccggcctcctcccctggctgcggcctgactctaagactcaggtgacagttcagtacatgcaggacaatggcgcagtcatccctgtgcgcatccacaccatcgtcatctctgtgcagcacaacgaagacatcacgctggaggagatgcgcagggccctgaaggagcaagtcatcagggccgtggtgccggccaagtacctggacgaagacaccgtctaccacctgcagcccagtgggcggtttgtcatcggaggtccccagggggatgcgggtgtcactggccgtaagattattgtggacacctatggcggctggggggctcatggtggtggggccttctctgggaaggactacaccaaggtggaccgctcagccgcatatgctgcccgctgggtggccaagtctctggtgaaagcagggctctgccggagagtgcttgtccaggtttcctatgccattggtgtggccgagccgctgtccatttccatcttcacctacggaacctctcagaagacagagcgagagctgctggatgtggtgcataagaacttcgacctccggccgggcgtcattgtcagggatttggacttgaagaagcccatctaccagaagacagcatgctacggccatttcggaagaagcgagttcccatgggaggttcccaggaagcttgtattttagagccagggggagctgggcctggtctcaccctggaggcacctggtggccatgctcctcttccccagacgcctggctgctgatcgccttccccacccaccaaccctcagggcaaagccaggtccctctcatttagcctgtcctgtcatcatcatggccagctggaggcaggggcttcctggtgctggaggttggatcttgatgtaaggatgggcatggtgttctcctgctgctccctcagactggggcaatgttaatttagtggaaaaggcacccccgtcaagagtgaattccctcactcgtctcccccaacagctggaccctgaccagctccccctccctccccttgcctgtgccaggtgaggtcagcacatctcaacaggcctcagggctccttgtgggcctgggctcctggacccccctttcacaggcagccagtgccctgagccagggtctccagaaagccccacccaggccaggcatgtggcaggggttagagcaggactgatgtctcctaagcacctgtaatgtgcgagggacccagctaataactgatctcgttttttcttcactgcaacatgatgaggtagtaccttttatatcccatttatagatgggggaaagcaaagcacagagagtctggataacttccacagggtcccacagccacgtgtttagacctagatgtataactaggagctttgactcaggagcctgtgacataccccctcccccaccgttgtctcatgccagtaacaggctcaaacaatgacaaagcagattcagaaatgaggccatggactctgtcctgaaggcctgaggttactggaaattaggggattaacccactagctcttgttgagccgtgggcaattgtctgaaaagtgaagacagaaccacagggctattttgtttgcttcatgtgtcccagaagatgactgagggtgagttggcttacctggcccatcagggtaggctggagttagggactgaccagcagctttagaatcccagccccctgaccactcagagacatgcagagattgggtttttggacttctggggtaagtggtctaagtccagtccagtcctatctgggcttcctggagcagaagcagcaacttgtcctagcacagatggccagccccttagacagaggccctcaagtctttctctttccctggtcccttgtatcccctgcaggctgagtgcatttggagggagtgagtggccctttcggatccagggaggctggtcctatggcctcatgttaaataggcggggcttgccttctggtgtcggacaagcttctgagacgtcatgaggagattctgcctttgccaggtgactgtctggggagcgggtctgctcccaaggggcctgagcagtccttggcctgctaaggtcttggaacttgcctgcctttccatccatggccagcagcacctgccctacctgccccacttgtccttagcctggacctctgacagcagcatctctaccttctccccagctcccaggaccacaggctcaggcaggggcctccatgggccccaggggaacactggggacttggcctctctctagggtacatggtgctggttcaggctgggagaggcagcccaggaagtctcatctggggagcaggcagccagcatctgggccttggcctggagcacaaagaccctggctttcattttctctcaggtgaaaggaaattaaggcaacaaaagaagcccggctcctggtcacctaggaagcctcagattccttcccatggagggagggagtggtttgcaggtggccaagttcctctaacttggctcacactcgacatgaaaattcagaattttatactttccctaccctctagagaaataagatcttttttgtcagtttgtttgtatgaaactaaagcctttatttgttaatagttcctgctaaaacaatgaataaaaactcaaggagcaactaaaaaaaaaaaaaaaactcgagttttttttttttttttttcaacgtacaaaagttttaatgagacaaatgtcaaacaagcacattaacttcttaaaaaacaaagataatctgaaagtttaatgacaaaaaacactttattcagaaaacttggcgtttcaacaattccaaacacatgttcacaaattttttctaaaaacagtcagaaattaaataccttggctccctttccctaaccggtttttggttttaattaaaaaaaaaaaactgtgttcactgaatgcaccactttttcttgcct

SEQ ID NO: 325550 - DNA, 3950 bp, Homo sapiens
tgcttgtatctctgggtgatcacagacccctgctctccaaggtgggttgtgaactctggagcactaccaagattggctaagagctgaaggagagtcccaaaggagcttcaattctgcagaactatacagccttctttaccttaccttgaccaggtgcttagagtttggaaagtcagggataagaattgaaattcctccaggtaagaagacccccctcttaggaaatggactcctccaattttctcacatgatttttcaggcactttcgcttttccatatataggagtcgctcaggagcaagctgtggcaagctggagggagggacacatcccgtgttccatccactccctcccttctcagcagtcctcgcctgttctcacgtgctcacaggcagttaggcagaagtgatccccgtggctctgccaaagacaagcctgttgggttgaaagaagaagaagaagaagaagaagaaaaaaaaactcaggcaaagtcacagcctcaaaattgttcactgaaagaagcgtgagtggagaagtgtgagaagatgaatggaccggtggatggcttgtgtgaccactctctaagtgaaggagtcttcatgttcacatcggagtctgtgggagagggacacccggataagatctgtgaccagatcagtgatgcagtgctggatgcccatctcaagcaagaccccaatgccaaggtggcctgtgagacagtgtgcaagaccggcatggtgctgctgtgtggtgagatcacctcaatggccatggtggactaccagcgggtggtgagggacaccatcaagcacatcggctacgatgactcagccaagggctttgacttcaagacttgcaacgtgctggtggctttggagcagcaatccccagatattgcccagtgcgtccatctggacagaaatgaggaggatgtgggggcaggagatcagggtttgatgttcggctatgccaccgacgagacagaggagtgcatgcccctcaccatcatccttgctcacaagctcaacgcccggatggcagacctcaggcgctccggcctcctcccctggctgcggcctgactctaagactcaggtgacagttcagtacatgcaggacaatggcgcagtcatccctgtgcgcatccacaccatcgtcatctctgtgcagcacaacgaagacatcacgctggaggagatgcgcagggccctgaaggagcaagtcatcagggccgtggtgccggccaagtacctggacgaagacaccgtctaccacctgcagcccagtgggcggtttgtcatcggaggtccccagggggatgcgggtgtcactggccgtaagattattgtggacacctatggcggctggggggctcatggtggtggggccttctctgggaaggactacaccaaggtggaccgctcagccgcatatgctgcccgctgggtggccaagtctctggtgaaagcagggctctgccggagagtgcttgtccaggtttcctatgccattggtgtggccgagccgctgtccatttccatcttcacctacggaacctctcagaagacagagcgagagctgctggatgtggtgcataagaacttcgacctccggccgggcgtcattgtcagggatttggacttgaagaagcccatctaccagaagacagcatgctacggccatttcggaagaagcgagttcccatgggaggttcccaggaagcttgtattttagagccagggggagctgggcctggtctcaccctggaggcacctggtggccatgctcctcttccccagacgcctggctgctgatcgccttccccacccaccaaccctcagggcaaagccaggtccctctcatttagcctgtcctgtcatcatcatggccagctggaggcaggggcttcctggtgctggaggttggatcttgatgtaaggatgggcatggtgttctcctgctgctccctcagactggggcaatgttaatttagtggaaaaggcacccccgtcaagagtgaattccctcactcgtctcccccaacagctggaccctgaccagctccccctccctccccttgcctgtgccaggtgaggtcagcacatctcaacaggcctcagggctccttgtgggcctgggctcctggacccccctttcacaggcagccagtgccctgagccagggtctccagaaagccccacccaggccaggcatgtggcaggggttagagcaggactgatgtctcctaagcacctgtaatgtgcgagggacccagctaataactgatctcgttttttcttcactgcaacatgatgaggtagtaccttttatatcccatttatagatgggggaaagcaaagcacagagagtctggataacttccacagggtcccacagccacgtgtttagacctagatgtataactaggagctttgactcaggagcctgtgacataccccctcccccaccgttgtctcatgccagtaacaggctcaaacaatgacaaagcagattcagaaatgaggccatggactctgtcctgaaggcctgaggttactggaaattaggggattaacccactagctcttgttgagccgtgggcaattgtctgaaaagtgaagacagaaccacagggctattttgtttgcttcatgtgtcccagaagatgactgagggtgagttggcttacctggcccatcagggtaggctggagttagggactgaccagcagctttagaatcccagccccctgaccactcagagacatgcagagattgggtttttggacttctggggtaagtggtctaagtccagtccagtcctatctgggcttcctggagcagaagcagcaacttgtcctagcacagatggccagccccttagacagaggccctcaagtctttctctttccctggtcccttgtatcccctgcaggctgagtgcatttggagggagtgagtggccctttcggatccagggaggctggtcctatggcctcatgttaaataggcggggcttgccttctggtgtcggacaagcttctgagacgtcatgaggagattctgcctttgccaggtgactgtctggggagcgggtctgctcccaaggggcctgagcagtccttggcctgctaaggtcttggaacttgcctgcctttccatccatggccagcagcacctgccctacctgccccacttgtccttagcctggacctctgacagcagcatctctaccttctccccagctcccaggaccacaggctcaggcaggggcctccatgggccccaggggaacactggggacttggcctctctctagggtacatggtgctggttcaggctgggagaggcagcccaggaagtctcatctggggagcaggcagccagcatctgggccttggcctggagcacaaagaccctggctttcattttctctcaggtgaaaggaaattaaggcaacaaaagaagcccggctcctggtcacctaggaagcctcagattccttcccatggagggagggagtggtttgcaggtggccaagttcctctaacttggctcacactcgacatgaaaattcagaattttatactttccctaccctctagagaaataagatcttttttgtcagtttgtttgtatgaaactaaagcctttatttgttaatagttcctgctaaaacaatgaataaaaactcaaggagcaactaaaaaaaacaaaaaaagacataactaaagaaagttgcaaaaccactgagctaaagtggtctatgagttgctataaaggaagctctcagtgaccaaaagaaaaaaacttctgggggggcccgggacccaattcggccttataggaggcggtttaacatttaatggcccggtgttttcaacgcgtttgaatgggaaaaccctggggttacccaaatttaatcctttgggactttccaaactgtggcctac

SEQ ID NO: 325551 - DNA, 2247 bp, Homo sapiens
acagaggcttcaatccctgacgctgcaccttgctggaaggtttcctatgccattggtgtggccgagccgctgtccatttccatcttcacctacggaacctctcagaagacagagcgagagctgctggatgtggtgcataagaacttcgacctccggccgggcgtcattgtcagggatttggacttgaagaagcccatctaccagaagacagcatgctacggccatttcggaagaagcgagttcccatgggaggttcccaggaagcttgtattttagagccagggggagctgggcctggtctcaccctggaggcacctggtggccatgctcctcttccccagacgcctggctgctgatcgccttccccacccaccaaccctcagggcaaagccaggtccctctcatttagcctgtcctgtcatcatcatggccagctggaggcaggggcttcctggtgctggaggttggatcttgatgtaaggatgggcatggtgttctcctgctgctccctcagactggggcaatgttaatttagtggaaaaggcacccccgtcaagagtgaattccctcactcgtctcccccaacagctggaccctgaccagctccccctccctccccttgcctgtgccaggtgaggtcagcacatctcaacaggcctcagggctccttgtgggcctgggctcctggacccccctttcacaggcagccagtgccctgagccagggtctccagaaagccccacccaggccaggcatgtggcaggggttagagcaggactgatgtctcctaagcacctgtaatgtgcgagggacccagctaataactgatctcgttttttcttcactgcaacatgatgaggtagtaccttttatatcccatttatagatgggggaaagcaaagcacagagagtctggataacttccacagggtcccacagccacgtgtttagacctagatgtataactaggagctttgactcaggagcctgtgacataccccctcccccaccgttgtctcatgccagtaacaggctcaaacaatgacaaagcagattcagaaatgaggccatggactctgtcctgaaggcctgaggttactggaaattaggggattaacccactagctcttgttgagccgtgggcaattgtctgaaaagtgaagacagaaccacagggctattttgtttgcttcatgtgtcccagaagatgactgagggtgagttggcttacctggcccatcagggtaggctggagttagggactgaccagcagctttagaatcccagccccctgaccactcagagacatgcagagattgggtttttggacttctggggtaagtggtctaagtccagtccagtcctatctgggcttcctggagcagaagcagcaacttgtcctagcacagatggccagccccttagacagaggccctcaagtctttctctttccctggtcccttgtatcccctgcaggctgagtgcatttggagggagtgagtggccctttcggatccagggaggctggtcctatggcctcatgttaaataggcggggcttgccttctggtgtcggacaagcttctgagacgtcatgaggagattctgcctttgccaggtgactgtctggggagcgggtctgctcccaaggggcctgagcagtccttggcctgctaaggtcttggaacttgcctgcctttccatccatggccagcagcacctgccctacctgccccacttgtccttagcctggacctctgacagcagcatctctaccttctccccagctcccaggaccacaggctcaggcaggggcctccatgggccccaggggaacactggggacttggcctctctctagggtacatggtgctggttcaggctgggagaggcagcccaggaagtctcatctggggagcaggcagccagcatctgggccttggcctggagcacaaagaccctggctttcattttctctcaggtgaaaggaaattaaggcaacaaaagaagcccggctcctggtcacctaggaagcctcagattccttcccatggagggagggagtggtttgcaggtggccaagttcctctaacttggctcacactcgacatgaaaattcagaattttatactttccctaccctctagagaaataagatcttttttgtcagtttgtttgtatgaaactaaagcctttatttgttaatagttcctgctaaaacaatgaataaaaactcaaggagcaacta

SEQ ID NO: 325552 - DNA, 1034 bp, Homo sapiens
tgagaactcactatgttgctgtggaggaaaagttaaatattaaatttgaattcaattgaacatggacacaaacaatggtcaccaagtcccagaataggttgtgtgagccccttgaggcattcatccagcactgtttcggagaaatctctacttcaatctattccgatacattagttattgaaaaacaatagacaatcacaaaaacaggttgacctttttgtgttccttgagcccagtcatgaagaaccctcgtgacggggcctcatgccaacaacttgttacaaaaagagttagggtcccagactgcctcgtgccgaattcggcacgtggggacttggcctctctctagggtacatggtgctggttcaggctgggagaggcagcccaggaagtctcatctggggagcaggcagccagcatctgggccttggcctggagcacaaagaccctggctttcattttctctcaggtgaaaggaaattaaggcaacaaaagaagcccggctcctggtcacctaggaagcctcagattccttcccatggagggagggagtggtttgcaggtggccaagttcctctaacttggctcacactcgacatgaaaattcagaattttatactttccctaccctctagagaaataagatcttttttgtcagtttgtttgtatgaaactaaagcctttatttgttaatagttcctgctaaaacaatgaataaaaactcaaggagcaactaaaaaaaaaaaaaaaactcgagttttttttttttttttttcaacgtacaaaagttttaatgagacaaatgtcaaacaagcacattaacttcttaaaaaacaaagataatctgaaagtttaatgacaaaaaacactttattcagaaaacttggcgtttcaacaattccaaacacatgttcacaaattttttctaaaaacagtcagaaattaaataccttggctccctttccctaaccggtttttggttttaattaaaaaaaaaaaactgtgttcactgaatgcaccactttttcttgcct

SEQ ID NO: 325553 - DNA, 2671 bp, Homo sapiens
  misc_feature (86)..(86): n is a, c, g, or t
caaaggcattagggagtggctgtgaccccagagaacccctggcccaccttctgcacttgctaatgaagctttggcaggttacctgntttcaatatgttgtcagtgactgagctgggagtggagtccagagttctgggctaaggggtcttaggaaaatgtctgtgggcagccccaggacatccttcctgagttgcagttcagctgccatcacagtacttcagccccctccagcatctaggggctggctctgcttcttatcttgatttctctccctctgcagggggatgcgggtgtcactggccgtaagattattgtggacacctatggcggctggggggctcatggtggtggggccttctctgggaaggactacaccaaggtggaccgctcagccgcatatgctgcccgctgggtggccaagtctctggtgaaagcagggctctgccggagagtgcttgtccaggtttcctatgccattggtgtggccgagccgctgtccatttccatcttcacctacggaacctctcagaagacagagcgagagctgctggatgtggtgcataagaacttcgacctccggccgggcgtcattgtcagggatttggacttgaagaagcccatctaccagaagacagcatgctacggccatttcggaagaagcgagttcccatgggaggttcccaggaagcttgtattttagagccagggggagctgggcctggtctcaccctggaggcacctggtggccatgctcctcttccccagacgcctggctgctgatcgccttccccacccaccaaccctcagggcaaagccaggtccctctcatttagcctgtcctgtcatcatcatggccagctggaggcaggggcttcctggtgctggaggttggatcttgatgtaaggatgggcatggtgttctcctgctgctccctcagactggggcaatgttaatttagtggaaaaggcacccccgtcaagagtgaattccctcactcgtctcccccaacagctggaccctgaccagctccccctccctccccttgcctgtgccaggtgaggtcagcacatctcaacaggcctcagggctccttgtgggcctgggctcctggacccccctttcacaggcagccagtgccctgagccagggtctccagaaagccccacccaggccaggcatgtggcaggggttagagcaggactgatgtctcctaagcacctgtaatgtgcgagggacccagctaataactgatctcgttttttcttcactgcaacatgatgaggtagtaccttttatatcccatttatagatgggggaaagcaaagcacagagagtctggataacttccacagggtcccacagccacgtgtttagacctagatgtataactaggagctttgactcaggagcctgtgacataccccctcccccaccgttgtctcatgccagtaacaggctcaaacaatgacaaagcagattcagaaatgaggccatggactctgtcctgaaggcctgaggttactggaaattaggggattaacccactagctcttgttgagccgtgggcaattgtctgaaaagtgaagacagaaccacagggctattttgtttgcttcatgtgtcccagaagatgactgagggtgagttggcttacctggcccatcagggtaggctggagttagggactgaccagcagctttagaatcccagccccctgaccactcagagacatgcagagattgggtttttggacttctggggtaagtggtctaagtccagtccagtcctatctgggcttcctggagcagaagcagcaacttgtcctagcacagatggccagccccttagacagaggccctcaagtctttctctttccctggtcccttgtatcccctgcaggctgagtgcatttggagggagtgagtggccctttcggatccagggaggctggtcctatggcctcatgttaaataggcggggcttgccttctggtgtcggacaagcttctgagacgtcatgaggagattctgcctttgccaggtgactgtctggggagcgggtctgctcccaaggggcctgagcagtccttggcctgctaaggtcttggaacttgcctgcctttccatccatggccagcagcacctgccctacctgccccacttgtccttagcctggacctctgacagcagcatctctaccttctccccagctcccaggaccacaggctcaggcaggggcctccatgggccccaggggaacactggggacttggcctctctctagggtacatggtgctggttcaggctgggagaggcagcccaggaagtctcatctggggagcaggcagccagcatctgggccttggcctggagcacaaagaccctggctttcattttctctcaggtgaaaggaaattaaggcaacaaaagaagcccggctcctggtcacctaggaagcctcagattccttcccatggagggagggagtggtttgcaggtggccaagttcctctaacttggctcacactcgacatgaaaattcagaattttatactttccctaccctctagagaaataagatcttttttgtcagtttgtttgtatgaaactaaagcctttatttgttaatagttcctgctaaaacaatgaataaaaactcaaggagcaacta

SEQ ID NO: 325554 - DNA, 3649 bp, Homo sapiens
tgcttgtatctctgggtgatcacagacccctgctctccaaggtgggttgtgaactctggagcactaccaagattggctaagagctgaaggagagtcccaaaggagcttcaattctgcagaactatacagccttctttaccttaccttgaccaggtgcttagagtttggaaagtcagggataagaattgaaattcctccaggtaagaagacccccctcttaggaaatggactcctccaattttctcacatgatttttcaggcactttcgcttttccatatataggagtcgctcaggagcaagctgtggcaagctggagggagggacacatcccgtgttccatccactccctcccttctcagcagtcctcgcctgttctcacgtgctcacaggcagttaggcagaagtgatccccgtggctctgccaaagacaagcctgttgggttgaaagaagaagaagaagaagaagaagaaaaaaaaactcaggcaaagtcacagcctcaaaattgttcactgaaagaagcgtgagtggagaagtgtgagaagatgaatggaccggtggatggcttgtgtgaccactctctaagtgaaggagtcttcatgttcacatcggagtctgtgggagagggacacccggataagatctgtgaccagatcagtgatgcagtgctggatgcccatctcaagcaagaccccaatgccaaggtggcctgtgagacagtgtgcaagaccggcatggtgctgctgtgtggtgagatcacctcaatggccatggtggactaccagcgggtggtgagggacaccatcaagcacatcggctacgatgactcagccaagggctttgacttcaagacttgcaacgtgctggtggctttggagcagcaatccccagatattgcccagtgcgtccatctggacagaaatgaggaggatgtgggggcaggagatcagggtttgatgttcggctatgccaccgacgagacagaggagtgcatgcccctcaccatcatccttgctcacaagctcaacgcccggatggcagacctcaggcgctccggcctcctcccctggctgcggcctgactctaagactcaggtgacagttcagtacatgcaggacaatggcgcagtcatccctgtgcgcatccacaccatcgtcatctctgtgcagcacaacgaagacatcacgctggaggagatgcgcagggccctgaaggagcaagtcatcagggccgtggtgccggccaagtacctggacgaagacaccgtctaccacctgcagcccagtgggcggtttgtcatcggaggtccccagggggatgcgggtgtcactggccgtaagattattgtggacacctatggcggctggggggctcatggtggtggggccttctctgggaaggactacaccaaggtggaccgctcagccgcatatgctgcccgctgggtggccaagtctctggtgaaagcagggctctgccggagagtgcttgtccaggtttcctatgccattggtgtggccgagccgctgtccatttccatcttcacctacggaacctctcagaagacagagcgagagctgctggatgtggtgcataagaacttcgacctccggccgggcgtcattgtcagggatttggacttgaagaagcccatctaccagaagacagcatgctacggccatttcggaagaagcgagttcccatgggaggttcccaggaagcttgtattttagagccagggggagctgggcctggtctcaccctggaggcacctggtggccatgctcctcttccccagacgcctggctgctgatcgccttccccacccaccaaccctcagggcaaagccaggtccctctcatttagcctgtcctgtcatcatcatggccagctggaggcaggggcttcctggtgctggaggttggatcttgatgtaaggatgggcatggtgttctcctgctgctccctcagactggggcaatgttaatttagtggaaaaggcacccccgtcaagagtgaattccctcactcgtctcccccaacagctggaccctgaccagctccccctccctccccttgcctgtgccaggtgaggtcagcacatctcaacaggcctcagggctccttgtgggcctgggctcctggacccccctttcacaggcagccagtgccctgagccagggtctccagaaagccccacccaggccaggcatgtggcaggggttagagcaggactgatgtctcctaagcacctgtaatgtgcgagggacccagctaataactgatctcgttttttcttcactgcaacatgatgaggtagtaccttttatatcccatttatagatgggggaaagcaaagcacagagagtctggataacttccacagggtcccacagccacgtgtttagacctagatgtataactaggagctttgactcaggagcctgtgacataccccctcccccaccgttgtctcatgccagtaacaggctcaaacaatgacaaagcagattcagaaatgaggccatggactctgtcctgaaggcctgaggttactggaaattaggggattaacccactagctcttgttgagccgtgggcaattgtctgatgactgagggtgagttggcttacctggcccatcagggtaggctggagttagggactgaccagcagctttagaatcccagccccctgaccactcagagacatgcagagattgggtttttggacttctggggtaagtggtctaagtccagtccagtcctatctgggcttcctggagcagaagcagcaacttgtcctagcacagatggccagccccttagacagaggccctcaagtctttctctttccctggtcccttgtatcccctgcaggctgagtgcatttggagggagtgagtggccctttcggatccagggaggctggtcctatggcctcatgttaaataggcggggcttgccttctggtgtcggacaagcttctgagacgtcatgaggagattctgcctttgccaggtgactgtctggggagcgggtctgctcccaaggggcctgagcagtccttggcctgctaaggtcttggaacttgcctgcctttccatccatggccagcagcacctgccctacctgccccacttgtccttagcctggacctctgacagcagcatctctaccttctccccagctcccaggaccacaggctcaggcaggggcctccatgggccccaggggaacactggggacttggcctctctctagggtacatggtgctggttcaggctgggagaggcagcccaggaagtctcatctggggagcaggcagccagcatctgggccttggcctggagcacaaagaccctggctttcattttctctcaggtgaaaggaaattaaggcaacaaaagaagcccggctcctggtcacctaggaagcctcagattccttcccatggagggagggagtggtttgcaggtggccaagttcctctaacttggctcacactcgacatgaaaattcagaattttatactttccctaccctctagagaaataagatcttttttgtcagtttgtttgtatgaaactaaagcctttatttgttaatagttcctgctaaaacaatgaataaaaactcaaggagcaacta

SEQ ID NO: 325555 - DNA, 2468 bp, Homo sapiens
caaaggcattagggagtggctgtgaccccagagaacccctggcccaccttctgcacttgctaatgaagctttggcagggggatgcgggtgtcactggccgtaagattattgtggacacctatggcggctggggggctcatggtggtggggccttctctgggaaggactacaccaaggtggaccgctcagccgcatatgctgcccgctgggtggccaagtctctggtgaaagcagggctctgccggagagtgcttgtccaggtttcctatgccattggtgtggccgagccgctgtccatttccatcttcacctacggaacctctcagaagacagagcgagagctgctggatgtggtgcataagaacttcgacctccggccgggcgtcattgtcagggatttggacttgaagaagcccatctaccagaagacagcatgctacggccatttcggaagaagcgagttcccatgggaggttcccaggaagcttgtattttagagccagggggagctgggcctggtctcaccctggaggcacctggtggccatgctcctcttccccagacgcctggctgctgatcgccttccccacccaccaaccctcagggcaaagccaggtccctctcatttagcctgtcctgtcatcatcatggccagctggaggcaggggcttcctggtgctggaggttggatcttgatgtaaggatgggcatggtgttctcctgctgctccctcagactggggcaatgttaatttagtggaaaaggcacccccgtcaagagtgaattccctcactcgtctcccccaacagctggaccctgaccagctccccctccctccccttgcctgtgccaggtgaggtcagcacatctcaacaggcctcagggctccttgtgggcctgggctcctggacccccctttcacaggcagccagtgccctgagccagggtctccagaaagccccacccaggccaggcatgtggcaggggttagagcaggactgatgtctcctaagcacctgtaatgtgcgagggacccagctaataactgatctcgttttttcttcactgcaacatgatgaggtagtaccttttatatcccatttatagatgggggaaagcaaagcacagagagtctggataacttccacagggtcccacagccacgtgtttagacctagatgtataactaggagctttgactcaggagcctgtgacataccccctcccccaccgttgtctcatgccagtaacaggctcaaacaatgacaaagcagattcagaaatgaggccatggactctgtcctgaaggcctgaggttactggaaattaggggattaacccactagctcttgttgagccgtgggcaattgtctgaaaagtgaagacagaaccacagggctattttgtttgcttcatgtgtcccagaagatgactgagggtgagttggcttacctggcccatcagggtaggctggagttagggactgaccagcagctttagaatcccagccccctgaccactcagagacatgcagagattgggtttttggacttctggggtaagtggtctaagtccagtccagtcctatctgggcttcctggagcagaagcagcaacttgtcctagcacagatggccagccccttagacagaggccctcaagtctttctctttccctggtcccttgtatcccctgcaggctgagtgcatttggagggagtgagtggccctttcggatccagggaggctggtcctatggcctcatgttaaataggcggggcttgccttctggtgtcggacaagcttctgagacgtcatgaggagattctgcctttgccaggtgactgtctggggagcgggtctgctcccaaggggcctgagcagtccttggcctgctaaggtcttggaacttgcctgcctttccatccatggccagcagcacctgccctacctgccccacttgtccttagcctggacctctgacagcagcatctctaccttctccccagctcccaggaccacaggctcaggcaggggcctccatgggccccaggggaacactggggacttggcctctctctagggtacatggtgctggttcaggctgggagaggcagcccaggaagtctcatctggggagcaggcagccagcatctgggccttggcctggagcacaaagaccctggctttcattttctctcaggtgaaaggaaattaaggcaacaaaagaagcccggctcctggtcacctaggaagcctcagattccttcccatggagggagggagtggtttgcaggtggccaagttcctctaacttggctcacactcgacatgaaaattcagaattttatactttccctaccctctagagaaataagatcttttttgtcagtttgtttgtatgaaactaaagcctttatttgttaatagttcctgctaaaacaatgaataaaaactcaaggagcaacta

SEQ ID NO: 325556 - DNA, 3646 bp, Homo sapiens
tgcttgtatctctgggtgatcacagacccctgctctccaaggtgggttgtgaactctggagcactaccaagattggctaagagctgaaggagagtcccaaaggagcttcaattctgcagaactatacagccttctttaccttaccttgaccaggtgcttagagtttggaaagtcagggataagaattgaaattcctccaggtaagaagacccccctcttaggaaatggactcctccaattttctcacatgatttttcaggcactttcgcttttccatatataggagtcgctcaggagcaagctgtggcaagctggagggagggacacatcccgtgttccatccactccctcccttctcagcagtcctcgcctgttctcacgtgctcacaggcagttaggcagaagtgatccccgtggctctgccaaagacaagcctgttgggttgaaagaagaagaagaagaagaagaagaaaaaaaaactcaggcaaagtcacagcctcaaaattgttcactgaaagaagcgtgagtggagaagtgtgagaagatgaatggaccggtggatggcttgtgtgaccactctctaagtgaaggagtcttcatgttcacatcggagtctgtgggagagggacacccggataagatctgtgaccagatcagtgatgcagtgctggatgcccatctcaagcaagaccccaatgccaaggtggcctgtgagacagtgtgcaagaccggcatggtgctgctgtgtggtgagatcacctcaatggccatggtggactaccagcgggtggtgagggacaccatcaagcacatcggctacgatgactcagccaagggctttgacttcaagacttgcaacgtgctggtggctttggagcagcaatccccagatattgcccagtgcgtccatctggacagaaatgaggaggatgtgggggcaggagatcagggtttgatgttcggctatgccaccgacgagacagaggagtgcatgcccctcaccatcatccttgctcacaagctcaacgcccggatggcagacctcaggcgctccggcctcctcccctggctgcggcctgactctaagactcaggtgacagttcagtacatgcaggacaatggcgcagtcatccctgtgcgcatccacaccatcgtcatctctgtgcagcacaacgaagacatcacgctggaggagatgcgcagggccctgaaggagcaagtcatcagggccgtggtgccggccaagtacctggacgaagacaccgtctaccacctgcagcccagtgggcggtttgtcatcggaggtccccagggggatgcgggtgtcactggccgtaagattattgtggacacctatggcggctggggggctcatggtggtggggccttctctgggaaggactacaccaaggtggaccgctcagccgcatatgctgcccgctgggtggccaagtctctggtgaaagcagggctctgccggagagtgcttgtccaggtttcctatgccattggtgtggccgagccgctgtccatttccatcttcacctacggaacctctcagaagacagagcgagagctgctggatgtggtgcataagaacttcgacctccggccgggcgtcattgtcagggatttggacttgaagaagcccatctaccagaagacagcatgctacggccatttcggaagaagcgagttcccatgggaggttcccaggaagcttgtattttagagccagggggagctgggcctggtctcaccctggaggcacctggtggccatgctcctcttccccagacgcctggctgctgatcgccttccccacccaccaaccctcagggcaaagccaggtccctctcatttagcctgtcctgtcatcatcatggccagctggaggcaggggcttcctggtgctggaggttggatcttgatgtaaggatgggcatggtgttctcctgctgctccctcagactggggcaatgttaatttagtggaaaaggcacccccgtcaagagtgaattccctcactcgtctcccccaacagctggaccctgaccagctccccctccctccccttgcctgtgccaggtgaggtcagcacatctcaacaggcctcagggctccttgtgggcctgggctcctggacccccctttcacaggcagccagtgccctgagccagggtctccagaaagccccacccaggccaggcatgtggcaggggttagagcaggactgatgtctcctaagcacctgtaatgtgcgagggacccagctaataactgatctcgttttttcttcactgcaacatgatgaggtagtaccttttatatcccatttatagatgggggaaagcaaagcacagagagtctggataacttccacagggtcccacagccacgtgtttagacctagatgtataactaggagctttgactcaggagcctgtgacataccccctcccccaccgttgtctcatgccagtaacaggctcaaacaatgacaaagcagattcagaaatgaggccatggactctgtcctgaaggcctgaggttactggaaattaggggattaacccactagctcttgttgagccgtgggcaattgtctgaaaagtgaagacagaaccacagggctattttgtttgcttcatgtgtcccagaagatgactgagggtgagttggcttacctggcccatcagggtaggctggagttagggactgaccagcagctttagaatcccagccccctgaccactcagagacatgcagagattgggtttttggacttctggggtaagtggtctaagtccagtccagtcctatctgggcttcctggagcagaagcagcaacttgtcctagcacagatggccagccccttagacagaggccctcaagtctttctctttccctggtcccttgtatcccctgcaggctgagtgcatttggagggagtgagtggccctttcggatccagggaggctggtcctatggcctcatgttaaataggcggggcttgccttctggtgtcggacaagcttctgagacgtcatgaggagattctgcctttgccaggtgactgtctggggagcgggtctgctcccaaggggcctgagcagtccttggcctgctaaggtcttggaacttgcctgcctttccatccatggccagcagcacctgccctacctgccccacttgtccttagcctggacctctgacagcagcatctctaccttctccccagctcccaggaccacaggctcaggcaggggcctccatgggccccaggggaacactggggacttggcctctctctagggtacatggtgctggttcaggctgggagaggcagcccaggaagtctcatctggggagcatcaggtgaaaggaaattaaggcaacaaaagaagcccggctcctggtcacctaggaagcctcagattccttcccatggagggagggagtggtttgcaggtggccaagttcctctaacttggctcacactcgacatgaaaattcagaattttatactttccctaccctctagagaaataagatcttttttgtcagtttgtttgtatgaaactaaagcctttatttgttaatagttcctgctaaaacaatgaataaaaactcaaggagcaacta

SEQ ID NO: 325557 - DNA, 2344 bp, Homo sapiens
tgcttgtatctctgggtgatcacagacccctgctctccaaggtgggttgtgaactctggagcactaccaagattggctaagagctgaaggagagtcccaaaggagcttcaattctgcagaactatacagccttctttaccttaccttgaccaggtgcttagagtttggaaagtcagggataagaattgaaattcctccaggtaagaagacccccctcttaggaaatggactcctccaattttctcacatgatttttcaggcactttcgcttttccatatataggagtcgctcaggagcaagctgtggcaagctggagggagggacacatcccgtgttccatccactccctcccttctcagcagtcctcgcctgttctcacgtgctcacaggcagttaggcagaagtgatccccgtggctctgccaaagacaagcctgttgggttgaaagaagaagaagaagaagaagaagaaaaaaaaactcaggcaaagtcacagcctcaaaattgttcactgaaagaagcgtgagtggagaagtgtgagaagatgaatggaccggtggatggcttgtgtgaccactctctaagtgaaggagtcttcatgttcacatcggagtctgtgggagagggacacccggataagatctgtgaccagatcagtgatgcagtgctggatgcccatctcaagcaagaccccaatgccaaggtggcctgtgagacagtgtgcaagaccggcatggtgctgctgtgtggtgagatcacctcaatggccatggtggactaccagcgggtggtgagggacaccatcaagcacatcggctacgatgactcagccaagggctttgacttcaagacttgcaacgtgctggtggctttggagcagcaatccccagatattgcccagtgcgtccatctggacagaaatgaggaggatgtgggggcaggagatcagggtttgatgttcggctatgccaccgacgagacagaggagtgcatgcccctcaccatcatccttgctcacaagctcaacgcccggatggcagacctcaggcgctccggcctcctcccctggctgcggcctgactctaagactcaggtgacagttcagtacatgcaggacaatggcgcagtcatccctgtgcgcatccacaccatcgtcatctctgtgcagcacaacgaagacatcacgctggaggagatgcgcagggccctgaaggagcaagtcatcagggccgtggtgccggccaagtacctggacgaagacaccgtctaccacctgcagcccagtgggcggtttgtcatcggaggtccccagggggatgcgggtgtcactggccgtaagattattgtggacacctatggcggctggggggctcatggtggtggggccttctctgggaaggactacaccaaggtggaccgctcagccgcatatgctgcccgctgggtggccaagtctctggtgaaagcagggctctgccggagagtgcttgtccaggtttcctatgccattggtgtggccgagccgctgtccatttccatcttcacctacggaacctctcagaagacagagcgagagctgctggatgtggtgcataagaacttcgacctccggccgggcgtcattgtcagggatttggacttgaagaagcccatctaccagaagacagcatgctacggccatttcggaagaagcgagttcccatgggaggttcccaggaagcttgtattttagagccagggggagctgggcctggtctcaccctggaggcacctggtggccatgctcctcttccccagacgcctggctgctgatcgccttccccacccaccaaccctcagggcaaagccaggtccctctcatttagcctgtcctgtcatcatcatggccagctggaggcaggggcttcctggtgctggaggttggatcttgatgctgagtgcatttggagggagtgagtggccctttcggatccagggaggctggtcctatggcctcatgttaaataggcggggcttgccttctggtgtcggacaagcttctgagacgtcatgaggagattctgcctttgccagtcaggtgaaaggaaattaaggcaacaaaagaagcccggctcctggtcacctaggaagcctcagattccttcccatggagggagggagtggtttgcaggtggccaagttcctctaacttggctcacactcgacatgaaaattcagaattttatactttccctaccctctagagaaataagatcttttttgtcagtttgtttgtatgaaactaaagcctttatttgttaatagttcctgctaaaacaatgaataaaaactcaaggagcaacta

SEQ ID NO: 325558 - DNA, 827 bp, Homo sapiens
ttgcttcaaatgttttccaaactctgcgctttatttccagctcatatctcctgcaaagacatttctggcatgtcctatgcctgcattttcttgaataaacatggaaatacagaactgctgtactttccaacagatttccaaacagtaaaaaggaagctgacttgtatggagagttctggaccaatctgtttgggctacaattaccttggaaattttatacctatgttggtatgggtgagaggccaagaatcagatgcagatgatgactctgtattctaagaagtgatgtactttttcctaaaggttttgatttttttattggaacaaagctgtcaactcattagaaaatatactaaagaattcttttcatagctgtgtatgaacatgaggaagactggccaatataaactcctcatactgtagaatctgagtgaccacaaattctttgcagcaacttccatctcgtgaaatctacttcccactccttgcatctgggttggtcatgtgactgactttggctgattagcaaaccaagacttgaaatgtacttgcctactggagtttgccctctgtagctgctagaactcttttgccatcatatgaacaagtctgggttggcctcctggaagatgaaatactacctggatacaggccaaagctagcccagacatctcagctgacccagcagagtccccagacacgtgagtgaggccatccttgaccatcaagcccaaaaaggactgtcctagactggaagaaccacccagccaagtcacagattcctgagaaataataaacatgttttaggctaacttctgggtaggttt

SEQ ID NO: 325559 - DNA, 4823 bp, Homo sapiens
  misc_feature (127)..(127): n is a, c, g, or t
cgaaaacccggagcagctgcgtacgctcatggacagtcctccgaggggcgaagccgggcagctgggcatgctcagtagctgggggaggtttgggtggagagtagaaagctgtggctctgcctctcancccctcccgctggcccccgccccccttgcccctacccagccagtagtagttccccagcgtgcgcccggggagaccgggaacatggcgctgggagcgctgtagcagctgagaaggggctgaggcaccgccgcttcgctgacagccggccaccaggtttctgtctcccagtataatcatatccagccccatggctcttactggggcctctgaaatgtttatcaccaaatctgtgtctgcagttccaacctcttccctgagcatcaaagctgtatttccaactttcgctggatgcttctatctggaaatacactgtggtgaaatgcttccacctcttgctaaaatgaacactgagaaaaaatgaagaagactgacaagcaccagcgaaaagttgcagaatagaaatagccacactcctctggagtctttaattcatccacagccatcatataaaggttttggcatcatgtttgggaagaaaaagaaaaagattgaaatatctggcccgtccaactttgaacacagggttcatactgggtttgatccacaagagcagaagtttaccggccttccccagcagtggcacagcctgttagcagatacggccaacaggccaaagcctatggtggacccttcatgcatcacacccatccagctggctcctatgaagacaatcgttagaggaaacaaaccctgcaaggaaacctccatcaacggcctgctagaggattttgacaacatctcggtgactcgctccaactccctaaggaaagaaagcccacccaccccagatcagggagcctccagccacggtccaggccacgcggaagaaaatggcttcatcaccttctcccagtattccagcgaatccgatactactgctgactacacgaccgaaaagtacagggagaagagtctctatggagatgatctggatccgtattatagaggcagccacgcagccaagcaaaatgggcacgtaatgaaaatgaagcacggggaggcctactattctgaggtgaagcctttgaaatccgattttgccagattttctgccgattatcactcacatttggactcactgagcaaaccaagtgaatacagtgacctcaagtgggagtatcagagagcctcgagtagctcccctctggattattcattccaattcacaccttctagaactgcagggaccagcgggtgctccaaggagagcctggcgtacagtgaaagtgaatggggacccagcctggatgactatgacaggaggccaaagtcttcgtacctgaatcagacaagccctcagcccaccatgcggcagaggtccaggtcaggctcgggactccaggaaccgatgatgccatttggagcaagtgcatttaaaacccatccccaaggacactcctacaactcctacacctaccctcgcttgtccgagcccacaatgtgcattccaaaggtggattacgatcgagcacagatggtcctcagccctccactgtcagggtctgacacctaccccaggggccctgccaaactacctcaaagtcaaagcaaatcgggctattcctcaagcagtcaccagtacccgtctgggtaccacaaagccaccttgtaccatcacccctccctgcagagcagttcgcagtacatctccacggcttcctacctgagctccctcagcctctcatccagcacctacccgccgcccagctggggctcctcctccgaccagcagccctccagggtgtcccatgaacagtttcgggcggccctgcagctggtggtcagcccaggagaccccagggaatacttggccaactttatcaaaatcggggaaggctcaaccggcatcgtatgcatcgccaccgagaaacacacagggaaacaagttgcagtgaagaaaatggacctccggaagcaacagagacgagaactgcttttcaatgaggtcgtgatcatgcgggattaccaccatgacaatgtggttgacatgtacagcagctaccttgtcggcgatgagctctgggtggtcatggagtttctagaaggtggtgccttgacagacattgtgactcacaccagaatgaatgaagaacagatagctactgtctgcctgtcagttctgagagctctctcctaccttcataaccaaggagtgattcacagggacataaaaagtgactccatcctcctgacaagcgatggccggataaagttgtctgattttggtttctgtgctcaagtttccaaagaggtgccgaagaggaaatcattggttggcactccctactggatggcccctgaggtgatttctaggctaccttatgggacagaggtggacatctggtccctcgggatcatggtgatagaaatgattgatggcgagcccccctacttcaatgagcctcccctccaggcgatgcggaggatccgggacagtttacctccaagagtgaaggacctacacaaggtttcttcagtgctccggggattcctagacttgatgttggtgagggagccctctcagagagcaacagcccaggaactcctcggacatccattcttaaaactagcaggtccaccgtcttgcatcgtccccctcatgagacaatacaggcatcactgagcagaggattcgtgtaggtggcaaagctagatgaggacatgagaataattcaggagaacaaaaggaaacacagaacatgcaaaaggcctgtgcattctagaccagccaattggtgggacagcgtgatgaccggcagggttcaacagaccagggcatcttcttgtgtcttaaacaggcatctctccactgacagccggtgtggtcacttggagcacggctttaataagtcattattatatttttcagcccttcatccagcaaatcagaaggactcagtacaaactccgttatgatatatcctagccacatgcagggtaacatgtaggattttctatattgaaagaatacttttctggcaaaaaaaaaaaaaaaagaaagaaaggaaaacaaaaagcacttttttcttaatggtagcagtataatgtattttgcaacgaatttgtaatttttctgtacgatagttttgataatttatagtactttgatgtcatgtagccattgtatcagttgaagtaatacttgtttactagaggagtttgaacaaagcctttcctacttttttatccctttaagagaaccaatgattctttaggaactttgaatactgaatgactctcaatcaccgtcagctttagtaaaatctctttcttatcctaacaagtgtcttatttggtggaagaagaattaagagtgatggtgatggtgtgcacgtttcattaatccaaccaaaaataatgaaataaaatttgagccacagtataccactccttgggataaagttaaatatttttaaagatcacattttccatgaacgcctctagtagcaaaccattcttttgcacaccacaatgtttccctcagtgccctttctcaaatgggtacaatgttcccttgtggccaaatttccctcccagggagcaatttcagtgctaggatcattggattcagttcccaaaatagaatgtttcagtgagaccatgagaattccaggctcacaaagggagaggagagaacagggcaagacgtttggtttcatttgtcaccatttttaaaactctgtatgctagcacaccaaactcttgtctatatttacctttgtaccacagtattaatcgctattgttcatgtatcgtgctggaagtctgaactgactctagaggatgaattagcaagagggtattttaccaggtatgatctgacttcagttgtgcccatgttataatgtgtttccgacataggagagtcgtgctgctgtctagatcttcttgaatgttgataaaaatgaatgactactacaatacattttgtgttgcttgttggatgaatttgcatgttaactgtaggccaatatagatttgcctttaaaactctggaagagctacatagtcatcattagtttctattaattatgcatcagacaaaagccatttgttaccaaactgggaaaacagaggcttttcttaactatttcacatactgtaacaaatatgaatttaaatttgtgatagcgctctggttgctctaagcataattaagaatttttgtaattaataggttgctaattatttatcactgctaaaaaggaaaaaaggcataaaatgaccttctactgattagattttcagttttctttcaaactggaaatgcctccataaatatgatctatgattttgcttcataaaacagcaaatcaatgttttatgtaaaatattaaagcattaatataaatatgtgagaataaaaacaatctaaatccagaaaatggcagtcctaaatgttcatgagacagattgtattaatttaaccaggactatgtagaagtagaaagaaaagaaaaagaaaatcttttttaaaccagaataaacattaaaaactattgcagaaaatagtggattttggattccaaacattttcgacagtgtaatggaaatttttctgtaattttcttaccatcgggtattttttaaagtattcattgagtttaccaaaagttactgtagcttaaaaggttttgtgagcactaactattggcagaaactgcatttgcaaataaaaataaatgtttgccttttc

SEQ ID NO: 325560 - DNA, 4768 bp, Homo sapiens
  misc_feature (127)..(127): n is a, c, g, or t
cgaaaacccggagcagctgcgtacgctcatggacagtcctccgaggggcgaagccgggcagctgggcatgctcagtagctgggggaggtttgggtggagagtagaaagctgtggctctgcctctcancccctcccgctggcccccgccccccttgcccctacccagccagtagtagttccccagcgtgcgcccggggagaccgggaacatggcgctgggagcgctgtagcagctgagaaggggctgaggcaccgccgcttcgctgacagccggccaccaggtttctgtctcccagtataatcatatccagccccatggctcttactggggcctctgaaatgtttatcaccaaatctgtgtctgcagttccaacctcttccctgagcatcaaagctgtatttccaactttcgctggatgcttctatctggaaatacactgtggtgaaatgcttccacctcttgctaaaatgaacactgagaaaaaatgaagaagactgacaagcaccagcgaaaagttgcagaatagaaatagccacactcctctggagtctttaattcatccacagccatcatataaaggttttggcatcatgtttgggaagaaaaagaaaaagattgaaatatctggcccgtccaactttgaacacagggttcatactgggtttgatccacaagagcagaagtttaccggccttccccagcagtggcacagcctgttagcagatacggccaacaggccaaagcctatggtggacccttcatgcatcacacccatccagctggctcctatgaagacaatcgttagaggaaacaaaccctgcaaggaaacctccatcaacggcctgctagaggattttgacaacatctcggtgactcgctccaactccctaaggaaagaaagcccacccaccccagatcagggagcctccagccacggtccaggccacgcggaagaaaatggcttcatcaccttctcccagtattccagcgaatccgatactactgctgactacacgaccgaaaagtacagggagaagagtctctatggagatgatctggatccgtattatagaggcagccacgcagccaagcaaaatgggcacgtaatgaaaatgaagcacggggaggcctactattctgaggtgaagcctttgaaatccgattttgccagattttctgccgattatcactcacatttggactcactgagcaaaccaagtgaatacagtgacctcaagtgggagtatcagagagcctcgagtagctcccctctggattattcattccaattcacaccttctagaactgcagggaccagcgggtgctccaaggagagcctggcgtacagtgaaagtgaatggggacccagcctggatgactatgacaggaggccaaagtcttcgtacctgaatcagacaagccctcagcccaccatgcggcagaggtccaggtcaggctcgggactccaggaaccgatgatgccatttggagcaagtgcatttaaaacccatccccaaggacactcctacaactcctacacctaccctcgcttgtccgagcccacaatgtgcattccaaaggtggattacgatcgagcacagatggtcctcagccctccactgtcagggtctgacacctaccccaggggccctgccaaactacctcaaagtcaaagcaaatcgggctattcctcaagcagtcaccagtacccgtctgggtaccacaaagccaccttgtaccatcacccctccctgcagagcagttcgcagtacatctccacggcttcctacctgagctccctcagcctctcatccagcacctacccgccgcccagctggggctcctcctccgaccagcagccctccagggtgtcccatgaacagtttcgggcggccctgcagctggtggtcagcccaggagaccccagggaatacttggccaactttatcaaaatcggggaaggctcaaccggcatcgtatgcatcgccaccgagaaacacacagggaaacaagttgcagtgaagaaaatggacctccggaagcaacagagacgagaactgcttttcaatgaggtcgtgatcatgcgggattaccaccatgacaatgtggttgacatgtacagcagctaccttgtcggcgatgagctctgggtggtcatggagtttctagaaggtggtgccttgacagacattgtgactcacaccagaatgaatgaagaacagatagctactgtctgcctgtcagttctgagagctctctcctaccttcataaccaaggagtgattcacagggacataaaaagtgactccatcctcctgacaagcgatggccggataaagttgtctgattttggtttctgtgctcaagtttccaaagaggtgccgaagaggaaatcattggttggcactccctactggatggcccctgaggtgatttctaggctaccttatgggacagaggtggacatctggtccctcgggatcatggtgatagaaatgattgatggcgagcccccctacttcaatgagcctcccctccaggcgatgcggaggatccgggacagtttacctccaagagtgaaggacctacacaaggtttcttcagtgctccggggattcctagacttgatgttggtgagggagccctctcagagagcaacagcccaggaactcctcggacatccattcttaaaactagcaggtccaccgtcttgcatcgtccccctcatgagacaatacaggcatcactgagcagaggattcgtgtaggtggcaaagctagatgaggacatgagaataattcaggagaacaaaaggaaacacagaacatgcaaaaggcctgtgcattctagaccagccaattggtgggacagcgtgatgaccggcagggttcaacagaccagggcatcttcttgtgtcttaaacaggcatctctccactgacagccggtgtggtcacttggagcacggctttaataagtcattattatatttttcagcccttcatccagcaaatcagaaggactcagtacaaactccgttatgatatatcctagccacatgcagggtaacatgtaggattttctatattgaaagaatacttttctggcaaaaaaaaaaaaaaaagaaagaaaggaaaacaaaaagcacttttttcttaatggtagcagtataatgtattttgcaacgaatttgtaatttttctgtacgatagttttgataatttatagtactttgatgtcatgtagccattgtatcagttgaagtaatacttgtttactagaggagtttgaacaaagcctttcctacttttttatccctttaagagaaccaatgattctttaggaactttgaatactgaatgactctcaatcaccgtcagctttagtaaaatctctttcttatcctaacaagtgtcttatttggtggaagaagaattaagagtgatggtgatggtgtgcacgtttcattaatccaaccaaaaataatgaaataaaatttgagccacagtataccactccttgggataaagttaaatatttttaaagatcacattttccatgaacgcctctagtagcaaaccattcttttgcacaccacaatgtttccctcagtgccctttctcaaatgggtacaatgttcccttttcccaaaatagaatgtttcagtgagaccatgagaattccaggctcacaaagggagaggagagaacagggcaagacgtttggtttcatttgtcaccatttttaaaactctgtatgctagcacaccaaactcttgtctatatttacctttgtaccacagtattaatcgctattgttcatgtatcgtgctggaagtctgaactgactctagaggatgaattagcaagagggtattttaccaggtatgatctgacttcagttgtgcccatgttataatgtgtttccgacataggagagtcgtgctgctgtctagatcttcttgaatgttgataaaaatgaatgactactacaatacattttgtgttgcttgttggatgaatttgcatgttaactgtaggccaatatagatttgcctttaaaactctggaagagctacatagtcatcattagtttctattaattatgcatcagacaaaagccatttgttaccaaactgggaaaacagaggcttttcttaactatttcacatactgtaacaaatatgaatttaaatttgtgatagcgctctggttgctctaagcataattaagaatttttgtaattaataggttgctaattatttatcactgctaaaaaggaaaaaaggcataaaatgaccttctactgattagattttcagttttctttcaaactggaaatgcctccataaatatgatctatgattttgcttcataaaacagcaaatcaatgttttatgtaaaatattaaagcattaatataaatatgtgagaataaaaacaatctaaatccagaaaatggcagtcctaaatgttcatgagacagattgtattaatttaaccaggactatgtagaagtagaaagaaaagaaaaagaaaatcttttttaaaccagaataaacattaaaaactattgcagaaaatagtggattttggattccaaacattttcgacagtgtaatggaaatttttctgtaattttcttaccatcgggtattttttaaagtattcattgagtttaccaaaagttactgtagcttaaaaggttttgtgagcactaactattggcagaaactgcatttgcaaataaaaataaatgtttgccttttc

SEQ ID NO: 325561 - DNA, 4780 bp, Homo sapiens
  misc_feature (127)..(127): n is a, c, g, or t
cgaaaacccggagcagctgcgtacgctcatggacagtcctccgaggggcgaagccgggcagctgggcatgctcagtagctgggggaggtttgggtggagagtagaaagctgtggctctgcctctcancccctcccgctggcccccgccccccttgcccctacccagccagtagtagttccccagcgtgcgcccggggagaccgggaacatggcgctgggagcgctgtagcagctgagaaggggctgaggcaccgccgcttcgctgacagccggccaccagatgttcatgcattctagagaaagtggaaaacttagaagcctaattaatgactgtcttctggacctctgagaccatgtttctagtgttttccgtggaatattatcagaaatacactgtggtgaaatgcttccacctcttgctaaaatgaacactgagaaaaaatgaagaagactgacaagcaccagcgaaaagttgcagaatagaaatagccacactcctctggagtctttaattcatccacagccatcatataaaggttttggcatcatgtttgggaagaaaaagaaaaagattgaaatatctggcccgtccaactttgaacacagggttcatactgggtttgatccacaagagcagaagtttaccggccttccccagcagtggcacagcctgttagcagatacggccaacaggccaaagcctatggtggacccttcatgcatcacacccatccagctggctcctatgaagacaatcgttagaggaaacaaaccctgcaaggaaacctccatcaacggcctgctagaggattttgacaacatctcggtgactcgctccaactccctaaggaaagaaagcccacccaccccagatcagggagcctccagccacggtccaggccacgcggaagaaaatggcttcatcaccttctcccagtattccagcgaatccgatactactgctgactacacgaccgaaaagtacagggagaagagtctctatggagatgatctggatccgtattatagaggcagccacgcagccaagcaaaatgggcacgtaatgaaaatgaagcacggggaggcctactattctgaggtgaagcctttgaaatccgattttgccagattttctgccgattatcactcacatttggactcactgagcaaaccaagtgaatacagtgacctcaagtgggagtatcagagagcctcgagtagctcccctctggattattcattccaattcacaccttctagaactgcagggaccagcgggtgctccaaggagagcctggcgtacagtgaaagtgaatggggacccagcctggatgactatgacaggaggccaaagtcttcgtacctgaatcagacaagccctcagcccaccatgcggcagaggtccaggtcaggctcgggactccaggaaccgatgatgccatttggagcaagtgcatttaaaacccatccccaaggacactcctacaactcctacacctaccctcgcttgtccgagcccacaatgtgcattccaaaggtggattacgatcgagcacagatggtcctcagccctccactgtcagggtctgacacctaccccaggggccctgccaaactacctcaaagtcaaagcaaatcgggctattcctcaagcagtcaccagtacccgtctgggtaccacaaagccaccttgtaccatcacccctccctgcagagcagttcgcagtacatctccacggcttcctacctgagctccctcagcctctcatccagcacctacccgccgcccagctggggctcctcctccgaccagcagccctccagggtgtcccatgaacagtttcgggcggccctgcagctggtggtcagcccaggagaccccagggaatacttggccaactttatcaaaatcggggaaggctcaaccggcatcgtatgcatcgccaccgagaaacacacagggaaacaagttgcagtgaagaaaatggacctccggaagcaacagagacgagaactgcttttcaatgaggtcgtgatcatgcgggattaccaccatgacaatgtggttgacatgtacagcagctaccttgtcggcgatgagctctgggtggtcatggagtttctagaaggtggtgccttgacagacattgtgactcacaccagaatgaatgaagaacagatagctactgtctgcctgtcagttctgagagctctctcctaccttcataaccaaggagtgattcacagggacataaaaagtgactccatcctcctgacaagcgatggccggataaagttgtctgattttggtttctgtgctcaagtttccaaagaggtgccgaagaggaaatcattggttggcactccctactggatggcccctgaggtgatttctaggctaccttatgggacagaggtggacatctggtccctcgggatcatggtgatagaaatgattgatggcgagcccccctacttcaatgagcctcccctccaggcgatgcggaggatccgggacagtttacctccaagagtgaaggacctacacaaggtttcttcagtgctccggggattcctagacttgatgttggtgagggagccctctcagagagcaacagcccaggaactcctcggacatccattcttaaaactagcaggtccaccgtcttgcatcgtccccctcatgagacaatacaggcatcactgagcagaggattcgtgtaggtggcaaagctagatgaggacatgagaataattcaggagaacaaaaggaaacacagaacatgcaaaaggcctgtgcattctagaccagccaattggtgggacagcgtgatgaccggcagggttcaacagaccagggcatcttcttgtgtcttaaacaggcatctctccactgacagccggtgtggtcacttggagcacggctttaataagtcattattatatttttcagcccttcatccagcaaatcagaaggactcagtacaaactccgttatgatatatcctagccacatgcagggtaacatgtaggattttctatattgaaagaatacttttctggcaaaaaaaaaaaaaaaagaaagaaaggaaaacaaaaagcacttttttcttaatggtagcagtataatgtattttgcaacgaatttgtaatttttctgtacgatagttttgataatttatagtactttgatgtcatgtagccattgtatcagttgaagtaatacttgtttactagaggagtttgaacaaagcctttcctacttttttatccctttaagagaaccaatgattctttaggaactttgaatactgaatgactctcaatcaccgtcagctttagtaaaatctctttcttatcctaacaagtgtcttatttggtggaagaagaattaagagtgatggtgatggtgtgcacgtttcattaatccaaccaaaaataatgaaataaaatttgagccacagtataccactccttgggataaagttaaatatttttaaagatcacattttccatgaacgcctctagtagcaaaccattcttttgcacaccacaatgtttccctcagtgccctttctcaaatgggtacaatgttcccttgtggccaaatttccctcccagggagcaatttcagtgctaggatcattggattcagttcccaaaatagaatgtttcagtgagaccatgagaattccaggctcacaaagggagaggagagaacagggcaagacgtttggtttcatttgtcaccatttttaaaactctgtatgctagcacaccaaactcttgtctatatttacctttgtaccacagtattaatcgctattgttcatgtatcgtgctggaagtctgaactgactctagaggatgaattagcaagagggtattttaccaggtatgatctgacttcagttgtgcccatgttataatgtgtttccgacataggagagtcgtgctgctgtctagatcttcttgaatgttgataaaaatgaatgactactacaatacattttgtgttgcttgttggatgaatttgcatgttaactgtaggccaatatagatttgcctttaaaactctggaagagctacatagtcatcattagtttctattaattatgcatcagacaaaagccatttgttaccaaactgggaaaacagaggcttttcttaactatttcacatactgtaacaaatatgaatttaaatttgtgatagcgctctggttgctctaagcataattaagaatttttgtaattaataggttgctaattatttatcactgctaaaaaggaaaaaaggcataaaatgaccttctactgattagattttcagttttctttcaaactggaaatgcctccataaatatgatctatgattttgcttcataaaacagcaaatcaatgttttatgtaaaatattaaagcattaatataaatatgtgagaataaaaacaatctaaatccagaaaatggcagtcctaaatgttcatgagacagattgtattaatttaaccaggactatgtagaagtagaaagaaaagaaaaagaaaatcttttttaaaccagaataaacattaaaaactattgcagaaaatagtggattttggattccaaacattttcgacagtgtaatggaaatttttctgtaattttcttaccatcgggtattttttaaagtattcattgagtttaccaaaagttactgtagcttaaaaggttttgtgagcactaactattggcagaaactgcatttgcaaataaaaataaatgtttgccttttc

SEQ ID NO: 325562 - DNA, 4674 bp, Homo sapiens
  misc_feature (127)..(127): n is a, c, g, or t
cgaaaacccggagcagctgcgtacgctcatggacagtcctccgaggggcgaagccgggcagctgggcatgctcagtagctgggggaggtttgggtggagagtagaaagctgtggctctgcctctcancccctcccgctggcccccgccccccttgcccctacccagccagtagtagttccccagcgtgcgcccggggagaccgggaacatggcgctgggagcgctgtagcagctgagaaggggctgaggcaccgccgcttcgctgacagccggccaccagaaatacactgtggtgaaatgcttccacctcttgctaaaatgaacactgagaaaaaatgaagaagactgacaagcaccagcgaaaagttgcagaatagaaatagccacactcctctggagtctttaattcatccacagccatcatataaaggttttggcatcatgtttgggaagaaaaagaaaaagattgaaatatctggcccgtccaactttgaacacagggttcatactgggtttgatccacaagagcagaagtttaccggccttccccagcagtggcacagcctgttagcagatacggccaacaggccaaagcctatggtggacccttcatgcatcacacccatccagctggctcctatgaagacaatcgttagaggaaacaaaccctgcaaggaaacctccatcaacggcctgctagaggattttgacaacatctcggtgactcgctccaactccctaaggaaagaaagcccacccaccccagatcagggagcctccagccacggtccaggccacgcggaagaaaatggcttcatcaccttctcccagtattccagcgaatccgatactactgctgactacacgaccgaaaagtacagggagaagagtctctatggagatgatctggatccgtattatagaggcagccacgcagccaagcaaaatgggcacgtaatgaaaatgaagcacggggaggcctactattctgaggtgaagcctttgaaatccgattttgccagattttctgccgattatcactcacatttggactcactgagcaaaccaagtgaatacagtgacctcaagtgggagtatcagagagcctcgagtagctcccctctggattattcattccaattcacaccttctagaactgcagggaccagcgggtgctccaaggagagcctggcgtacagtgaaagtgaatggggacccagcctggatgactatgacaggaggccaaagtcttcgtacctgaatcagacaagccctcagcccaccatgcggcagaggtccaggtcaggctcgggactccaggaaccgatgatgccatttggagcaagtgcatttaaaacccatccccaaggacactcctacaactcctacacctaccctcgcttgtccgagcccacaatgtgcattccaaaggtggattacgatcgagcacagatggtcctcagccctccactgtcagggtctgacacctaccccaggggccctgccaaactacctcaaagtcaaagcaaatcgggctattcctcaagcagtcaccagtacccgtctgggtaccacaaagccaccttgtaccatcacccctccctgcagagcagttcgcagtacatctccacggcttcctacctgagctccctcagcctctcatccagcacctacccgccgcccagctggggctcctcctccgaccagcagccctccagggtgtcccatgaacagtttcgggcggccctgcagctggtggtcagcccaggagaccccagggaatacttggccaactttatcaaaatcggggaaggctcaaccggcatcgtatgcatcgccaccgagaaacacacagggaaacaagttgcagtgaagaaaatggacctccggaagcaacagagacgagaactgcttttcaatgaggtcgtgatcatgcgggattaccaccatgacaatgtggttgacatgtacagcagctaccttgtcggcgatgagctctgggtggtcatggagtttctagaaggtggtgccttgacagacattgtgactcacaccagaatgaatgaagaacagatagctactgtctgcctgtcagttctgagagctctctcctaccttcataaccaaggagtgattcacagggacataaaaagtgactccatcctcctgacaagcgatggccggataaagttgtctgattttggtttctgtgctcaagtttccaaagaggtgccgaagaggaaatcattggttggcactccctactggatggcccctgaggtgatttctaggctaccttatgggacagaggtggacatctggtccctcgggatcatggtgatagaaatgattgatggcgagcccccctacttcaatgagcctcccctccaggcgatgcggaggatccgggacagtttacctccaagagtgaaggacctacacaaggtttcttcagtgctccggggattcctagacttgatgttggtgagggagccctctcagagagcaacagcccaggaactcctcggacatccattcttaaaactagcaggtccaccgtcttgcatcgtccccctcatgagacaatacaggcatcactgagcagaggattcgtgtaggtggcaaagctagatgaggacatgagaataattcaggagaacaaaaggaaacacagaacatgcaaaaggcctgtgcattctagaccagccaattggtgggacagcgtgatgaccggcagggttcaacagaccagggcatcttcttgtgtcttaaacaggcatctctccactgacagccggtgtggtcacttggagcacggctttaataagtcattattatatttttcagcccttcatccagcaaatcagaaggactcagtacaaactccgttatgatatatcctagccacatgcagggtaacatgtaggattttctatattgaaagaatacttttctggcaaaaaaaaaaaaaaaagaaagaaaggaaaacaaaaagcacttttttcttaatggtagcagtataatgtattttgcaacgaatttgtaatttttctgtacgatagttttgataatttatagtactttgatgtcatgtagccattgtatcagttgaagtaatacttgtttactagaggagtttgaacaaagcctttcctacttttttatccctttaagagaaccaatgattctttaggaactttgaatactgaatgactctcaatcaccgtcagctttagtaaaatctctttcttatcctaacaagtgtcttatttggtggaagaagaattaagagtgatggtgatggtgtgcacgtttcattaatccaaccaaaaataatgaaataaaatttgagccacagtataccactccttgggataaagttaaatatttttaaagatcacattttccatgaacgcctctagtagcaaaccattcttttgcacaccacaatgtttccctcagtgccctttctcaaatgggtacaatgttcccttgtggccaaatttccctcccagggagcaatttcagtgctaggatcattggattcagttcccaaaatagaatgtttcagtgagaccatgagaattccaggctcacaaagggagaggagagaacagggcaagacgtttggtttcatttgtcaccatttttaaaactctgtatgctagcacaccaaactcttgtctatatttacctttgtaccacagtattaatcgctattgttcatgtatcgtgctggaagtctgaactgactctagaggatgaattagcaagagggtattttaccaggtatgatctgacttcagttgtgcccatgttataatgtgtttccgacataggagagtcgtgctgctgtctagatcttcttgaatgttgataaaaatgaatgactactacaatacattttgtgttgcttgttggatgaatttgcatgttaactgtaggccaatatagatttgcctttaaaactctggaagagctacatagtcatcattagtttctattaattatgcatcagacaaaagccatttgttaccaaactgggaaaacagaggcttttcttaactatttcacatactgtaacaaatatgaatttaaatttgtgatagcgctctggttgctctaagcataattaagaatttttgtaattaataggttgctaattatttatcactgctaaaaaggaaaaaaggcataaaatgaccttctactgattagattttcagttttctttcaaactggaaatgcctccataaatatgatctatgattttgcttcataaaacagcaaatcaatgttttatgtaaaatattaaagcattaatataaatatgtgagaataaaaacaatctaaatccagaaaatggcagtcctaaatgttcatgagacagattgtattaatttaaccaggactatgtagaagtagaaagaaaagaaaaagaaaatcttttttaaaccagaataaacattaaaaactattgcagaaaatagtggattttggattccaaacattttcgacagtgtaatggaaatttttctgtaattttcttaccatcgggtattttttaaagtattcattgagtttaccaaaagttactgtagcttaaaaggttttgtgagcactaactattggcagaaactgcatttgcaaataaaaataaatgtttgccttttc

SEQ ID NO: 325563 - DNA, 233 bp, Homo sapiens
tctcacgttagtatgaattggtttactcaccctccctccttacaaaaagcttggatttatggactgaaggtgtgcatgaagaaaaggaataaaaagaggatagagtaatcactgactaggaagcactgctttggggaagatctggatgcttagaggcttaaggaaagtgatgaagcaagggaaggtgggaagggacccaaaccaaattttttctttttttttttttttttgag

SEQ ID NO: 325564 - DNA, 285 bp, Homo sapiens
tagctggggctacaggcatgtgccaccatgcctggctaattttttgtatttttagtagagacagggtttcactatgttggccaggctggtctcgaactcctgacctcatgatccgcccgcctcagccacgtaaagtgctgggattacaggtgtgagccaccatgcccggctgaaaggagattcttaaatacacaaaatccttcactccaagggtttagattttttgctcagttttagctgcagactttgctcagtttagagctactagggctttagtttactgtg

SEQ ID NO: 325565 - DNA, 840 bp, Homo sapiens
agcccgggggcggggttggccgcgccagacttggagagccagccccatcggggttccccgccgccggaagcggaaatagcaccgggcgccgccacagtagctgtaactgccaccgcgatgccgaaggcgcccaagcagcagccgccggagcccgagtggatcggggacggagagagcacgagcccatcagacaaagtggtgaagaaagggaagaaggacaagaagatcaaaaaaacgttctttgaagagctggcagtagaagataaacaggctggggaagaagagaaagtgctcaaggagaaggagcagcagcagcagcaacagcaacagcagcaaaaaaaaaagcgagatacccgaaaaggcaggcggaagaaggatgtggatgatgatggagaagagaaagagctcatggagcgtcttaagaagctctcagtgccaaccagtgatgaggaggatgaagtacccgccccaaaaccccgcggagggaagaaaaccaagggtggtaatgtttttgcagccctgattcaggatcagagtgaggaagaggaggaggaagaaaaacatcctcctaagcctgccaagccggagaagaatcggatcaataaggccgtatctgagtgaacagcagactgcactccagcctgggcaacagagcaaaaactgcatctcaaaaaaataaaaacaaaaaaacagaggggacaccagttcccagcactccaggcctaacttcatagcactcacatcatgtcaagtgagtaaccaaaaatcagtgtacatatgtacacagctatacatatctcacactaagttttctgtaagagttctttttattgcagagac

SEQ ID NO: 325566 - DNA, 812 bp, Homo sapiens
  misc_feature (491)..(491): n is a, c, g, or t
  misc_feature (520)..(520): n is a, c, g, or t
  misc_feature (531)..(531): n is a, c, g, or t
  misc_feature (538)..(538): n is a, c, g, or t
  misc_feature (541)..(541): n is a, c, g, or t
  misc_feature (554)..(554): n is a, c, g, or t
  misc_feature (571)..(571): n is a, c, g, or t
  misc_feature (604)..(604): n is a, c, g, or t
  misc_feature (648)..(648): n is a, c, g, or t
  misc_feature (650)..(650): n is a, c, g, or t
  misc_feature (665)..(665): n is a, c, g, or t
  misc_feature (677)..(677): n is a, c, g, or t
  misc_feature (679)..(679): n is a, c, g, or t
  misc_feature (699)..(699): n is a, c, g, or t
  misc_feature (721)..(721): n is a, c, g, or t
  misc_feature (724)..(724): n is a, c, g, or t
  misc_feature (727)..(727): n is a, c, g, or t
  misc_feature (731)..(731): n is a, c, g, or t
  misc_feature (743)..(743): n is a, c, g, or t
  misc_feature (769)..(769): n is a, c, g, or t
agcccgggggcggggttggccgcgccagacttggagagccagccccatcggggttccccgccgccggaagcggaaatagcaccgggcgccgccacagtagctgtaactgccaccgcgatgccgaaggcgcccaagcagcagccgccggagcccgagtggatcggggacggagagagcacgagcccatcagacaaagtggtgaagaaagggaagaaggacaagaagatcaaaaaaacgttctttgaagagctggcagtagaagataaacaggctggggaagaagagaaagtgctcaaggagaaggagcagcagcagcagcaacagcaacagcagcaaaaaaaaaagcgagatacccgaaaaggcaggcggaagaaggatgtggatgatgatggagaagagaaagagctcatggagcgtcttaagaagctctcagtgccaaccagtgatgaggaggatgaagtacccgccccaaaacccgcggaggaagaaancagggtggtatgttttgcacctgttcagntcagagtgagnagagagnagnagacaactctctnagctgcgagcggagaanatcgtcatagcgttctgagacacacgtgctcantgacattctctctctgcacattctgtctgtgccaccatgtgtgngntcgcatcatctctcncatcatcatcancncatccatctggggcagcgtncatctctgctcatgctctgctngcnctntctntctttctctctntctctctttgctgtctcggctggcgnctgcacatctctccctgtcacagctctctcttgtgctttgtgc

SEQ ID NO: 325567 - DNA, 488 bp, Homo sapiens
gatttcccactatgcttattccctccgattcttgctgtactctgaagccagagtgaaactttaaagtgtgaaagtgatcataccaataaagtccccattccttaaccttgctacaaggccctcactccagccttaccttgcaccattctcccctcagtctgtaagcttagccataccaaacctttccctgtctctcagtgtgtgtgctttctcacagctgggcctgtgcacagcactggaattacaccatgtgtctgactaacttctcatactcctcattacttcagttatttgcttaaatgccatcttcttagagaggccgccaccagagatgaagccagcctctcccccaccaccaagtaggctttaccttttcttttggaaccttcagtacacctggaattacctatttaaaaatctctcttcctatagcctgcaagctccagaggagaccacatttgtcttgttcattgctataatcccctacg

SEQ ID NO: 325568 - DNA, 3267 bp, Homo sapiens
agcccgggggcggggttggccgcgccagacttggagagccagccccatcggggttccccgccgccggaagcggaaatagcaccgggcgccgccacagtagctgtaactgccaccgcgatgccgaaggcgcccaagcagcagccgccggagcccgagtggatcggggacggagagagcacgagcccatcagacaaagtggtgaagaaagggaagaaggacaagaagatcaaaaaaacgttctttgaagagctggcagtagaagataaacaggctggggaagaagagaaagtgctcaaggagaaggagcagcagcagcagcaacagcaacagcagcaaaaaaaaaagcgagatacccgaaaaggcaggcggaagaaggatgtggatgatgatggagaagagaaagagctcatggagcgtcttaagaagctctcagtgccaaccagtgatgaggaggatgaagtacccgccccaaaaccccgcggagggaagaaaaccaagggtggtaatgtttttgcagccctgattcaggatcagagtgaggaagaggaggaggaagaaaaacatcctcctaagcctgccaagccggagaagaatcggatcaataaggccgtatctgaggaacagcagcctgcactcaagggcaaaaagggaaaggaagagaagtcaaaagggaaggctaagcctcaaaataaattcgctgctctggacaatgaagaggaggataaagaagaagaaattataaaggaaaaggagcctcccaaacaagggaaggagaaggccaagaaggcagagcagggttcagaggaagaaggagaaggggaagaagaggaggaggaaggaggagagtctaaggcagatgatccctatgctcatcttagcaaaaaggagaagaaaaagctgaaaaaacagatggagtatgagcgccaagtggcttcattaaaagcagccaatgcagctgaaaatgacttctccgtgtcccaggcggagatgtcctcccgccaagccatgttagaaaatgcatctgacatcaagctggagaagttcagcatctccgctcatggcaaggagctgttcgtcaatgcagacctgtacattgtagccggccgccgctacgggctggtaggacccaatggcaagggcaagaccacactcctcaagcacattgccaaccgagccctgagcatccctcccaacattgatgtgttgctgtgtgagcaggaggtggtagcagatgagacaccagcagtccaggctgttcttcgagctgacaccaagcgattgaagctgctggaagaggagcggcggcttcagggacagctggaacaaggggatgacacagctgctgagaggctagagaaggtgtatgaggaattgcgggccactggggcggcagctgcagaggccaaagcacggcggatcctggctggcctgggctttgaccctgaaatgcagaatcgacccacacagaagttctcagggggctggcgcatgcgtgtctccctggccagggcactgttcatggagcccacactgctgatgctggatgagcccaccaaccacctggacctcaacgctgtcatctggcttaataactacctccagggctggcggaagaccttgctgatcgtctcccatgaccagggcttcttggatgatgtctgcactgatatcatccacctcgatgcccagcggctccactactataggggcaattacatgaccttcaaaaagatgtaccagcagaagcagaaagaactgctgaaacagtatgagaagcaagagaaaaagctgaaggagctgaaggcaggcgggaagtccaccaagcaggcggaaaaacaaacgaaggaagccctgactcggaagcagcagaaatgccgacggaaaaaccaagatgaggaatcccaggaggcccctgagctcctgaagcgccctaaggagtacactgtgcgcttcacttttccagaccccccaccactcagccctccagtgctgggtctgcatggtgtgacattcggctaccagggacagaaaccactctttaagaacttggattttggcatcgacatggattcaaggatttgcattgtgggccctaatggtgtggggaagagtacgctactcctgctgctgactggcaagctgacaccgacccatggggaaatgagaaagaaccaccggctgaaaattggcttcttcaaccagcagtatgcagagcagctgcgcatggaggagacgcccactgagtacctgcagcggggcttcaacctgccctaccaggatgcccgcaagtgcctgggccgcttcggcctggagagtcacgcccacaccatccagatctgcaaactctctggtggtcagaaggcgcgagttgtgtttgctgagctggcctgtcgggaacctgatgtcctcatcttggacgagccaaccaataacctggacatagagtctattgatgctctaggggaggccatcaatgaatacaagggtgctgtgatcgttgtcagccatgatgcccgactcatcacagaaaccaattgccagctgtgggtggtggaggagcagagtgttagccaaatcgatggtgactttgaagactacaagcgggaggtgttggaggccctgggtgaagtcatggtcagccggccccgagagtgaagctttccttcccagaagtctcccgagagacatatttgtgtggcctagaagtcctctgtggtctcccctcctctgaagactgcctctggcctgcagctgacctggcaaccattcaggcacatgaaggtggagtgtgaccttgatgtgaccgggatcccactctgattgcatccatttctctgaaagacttgtttgttctgcttctcttcatataactgagctggccttatccttggcatccccctaaacaaacaagaggtgaccaccttattgtgaggttccatccagccaagtttatgtggcctattgtctcaggactctcatcactcagaagcctgcctctgatttaccctacagcttcaggcccagctgccccccagtctttgggtggtgctgttcttttctggtggatttaatgctgactcactggtacaaacagctgttgaagctcagagctggaggtgagcttctgaggcctttgccattatccagcccaagatttggtgcctgcagcctcttgtctggttgaggacttggggcaggaaaggaatgctgctgaacttgaatttccctttacaaggggaagaaataaaggaaaggagttgctgccga

SEQ ID NO: 325569 - DNA, 3489 bp, Homo sapiens
agcccgggggcggggttggccgcgccagacttggagagccagccccatcggggttccccgccgccggaagcggaaatagcaccgggcgccgccacagtagctgtaactgccaccgcgatgccgaaggcgcccaagcagcagccgccggagcccgagtggatcggggacggagagagcacgagcccatcagacaaagtggtgaagaaagggaagaaggacaagaagatcaaaaaaacgttctttgaagagctggcagtagaagataaacaggctggggaagaagagaaagtgctcaaggagaaggagcagcagcagcagcaacagcaacagcagcaaaaaaaaaagcgagatacccgaaaaggcaggcggaagaaggatgtggatgatgatggagaagagaaagagctcatggagcgtcttaagaagctctcagtgccaaccagtgatgaggaggatgaagtacccgccccaaaaccccgcggagggaagaaaaccaagggtggtaatgtttttgcagccctgattcaggatcagagtgaggaagaggaggaggaagaaaaacatcctcctaagcctgccaagccggagaagaatcggatcaataaggccgtatctgaggaacagcagcctgcactcaagggcaaaaagggaaaggaagagaagtcaaaagggaaggctaagcctcaaaataaattcgctgctctggacaatgaagaggaggataaagaagaagaaattataaaggaaaaggagcctcccaaacaagggaaggagaaggccaagaaggcagagcagggttcagaggaagaaggagaaggggaagaagaggaggaggaaggaggagagtctaaggcagatgatccctatgctcatcttagcaaaaaggagaagaaaaagctgaaaaaacagatggagtatgagcgccaagtggcttcattaaaagcagccaatgcagctgaaaatgacttctccgtgtcccaggcggagatgtcctcccgccaagccatgttagaaaatgcatctgacatcaagctggagaagttcagcatctccgctcatggcaaggagctgttcgtcaatgcagacctgtacattgtagccggccgccgctacgggctggtaggacccaatggcaagggcaagaccacactcctcaagcacattgccaaccgagccctgagcatccctcccaacattgatgtgttgctgtgtgagcaggaggtggtagcagatgagacaccagcagtccaggctgttcttcgagctgacaccaagcgattgaagctgctggaagaggagcggcggcttcagggacagctggaacaaggggatgacacagctgctgagaggctagagaaggtgtatgaggaattgcgggccactggggcggcagctgcagaggccaaagcacggcggatcctggctggcctgggctttgaccctgaaatgcagaatcgacccacacagaagttctcagggggctggcgcatgcgtgtctccctggccagggcactgttcatggagcccacactgctgatgctggatgagcccaccaaccacctggacctcaacgctgtcatctggcttaataactacctccagggctggcggaagaccttgctgatcgtctcccatgaccagggcttcttggatgatgtctgcactgatatcatccacctcgatgcccagcggctccactactataggggcaattacatgaccttcaaaaagatgtaccagcagaagcagaaagaactgctgaaacagtatgagaagcaagagaaaaagctgaaggagctgaaggcaggcgggaagtccaccaagcaggcggaaaaacaaacgaaggaagccctgactcggaagcagcagaaatgccgacggaaaaaccaagatgaggaatcccaggaggcccctgagctcctgaagcgccctaaggagtacactgtgcgcttcacttttccagaccccccaccactcagccctccagtgctgggtctgcatggtgtgacattcggctaccagggacagaaaccactctttaagaacttggattttggcatcgacatggattcaaggatttgcattgtgggccctaatggtgtggggaagagtacgctactcctgctgctgactggcaagctgacaccgacccatggggaaatgagaaagaaccaccggctgaaaattggcttcttcaaccagcagtatgcagagcagctgcgcatggaggagacgcccactgagtacctgcagcggggcttcaacctgccctaccaggatgcccgcaagtgcctgggccgcttcggcctggagagtcacgcccacaccatccagatctgcaaactctctggtggtcagaaggcgcgagttgtgtttgctgagctggcctgtcgggaacctgatgtcctcatcttggacgagccaaccaataacctggacatagagtctattgatgctctaggggaggccatcaatgaatacaagggtgctgtgatcgttgtcagccatgatgcccgactcatcacagaaaccaattgccagctgtgggtggtggaggagcagagtgttagccaaatcgatggtgactttgaagactacaagcgggaggtgttggaggccctgggtgaagtcatggtcagccggccccgagagtgaagctttccttcccagaagtctcccgagagacatatttgtgtggcctagaagtcctctgtggtctcccctcctctgaagactgcctctggcctgcagctgacctggcaaccattcaggcacatgaaggtggagtgtgaccttgatgtgaccgggatcccactctgattgcatccatttctctgaaagacttgtttgttctgcttctcttcatataactgagctggccttatccttggcatccccctaaacaaacaagaggtgaccaccttattgtgaggttccatccagccaagtttatgtggcctattgtctcaggactctcatcactcagaagcctgcctctgatttaccctacagcttcaggcccagctgccccccagtctttgggtggtgctgttcttttctggtggatttaatgctgactcactggtacaaacagctgttgaagctcagagctggaggtgagcttctgaggcctttgccattatccagcccaagatttggtgcctgcagcctcttgtctggttgaggacttggggcaggaaaggaatgctgctgaacttgaatttccctttacaaggggaagaaataaaggaaaggagttgctgccgacctgtcactgtttggagattgatgggagttggaactgttctcagtcttgatttgctttattcagttttctagcagcttttaatagtcccctcttccccactaaatggatcttgtttgcagtcttgctgacagtgtttgctgtttaaggatcataggattcctttcccccaacccttcacgcaaggaaaaagcaaagtgattcataccttctatcttggaaca

SEQ ID NO: 325570 - DNA, 2797 bp, Homo sapiens
ctgtttaaggatcataggattcctttcccccaacccttcacgcaaggaaaaagcaaaggatcagagtgaggaagaggaggaggaagaaaaacatcctcctaagcctgccaagccggagaagaatcggatcaataaggccgtatctgaggaacagcagcctgcactcaagggcaaaaagggaaaggaagagaagtcaaaagggaaggctaagcctcaaaataaattcgctgctctggacaatgaagaggaggataaagaagaagaaattataaaggaaaaggagcctcccaaacaagggaaggagaaggccaagaaggcagagcagggttcagaggaagaaggagaaggggaagaagaggaggaggaaggaggagagtctaaggcagatgatccctatgctcatcttagcaaaaaggagaagaaaaagctgaaaaaacagatggagtatgagcgccaagtggcttcattaaaagcagccaatgcagctgaaaatgacttctccgtgtcccaggcggagatgtcctcccgccaagccatgttagaaaatgcatctgacatcaagctggagaagttcagcatctccgctcatggcaaggagctgttcgtcaatgcagacctgtacattgtagccggccgccgctacgggctggtaggacccaatggcaagggcaagaccacactcctcaagcacattgccaaccgagccctgagcatccctcccaacattgatgtgttgctgtgtgagcaggaggtggtagcagatgagacaccagcagtccaggctgttcttcgagctgacaccaagcgattgaagctgctggaagaggagcggcggcttcagggacagctggaacaaggggatgacacagctgctgagaggctagagaaggtgtatgaggaattgcgggccactggggcggcagctgcagaggccaaagcacggcggatcctggctggcctgggctttgaccctgaaatgcagaatcgacccacacagaagttctcagggggctggcgcatgcgtgtctccctggccagggcactgttcatggagcccacactgctgatgctggatgagcccaccaaccacctggacctcaacgctgtcatctggcttaataactacctccagggctggcggaagaccttgctgatcgtctcccatgaccagggcttcttggatgatgtctgcactgatatcatccacctcgatgcccagcggctccactactataggggcaattacatgaccttcaaaaagatgtaccagcagaagcagaaagaactgctgaaacagtatgagaagcaagagaaaaagctgaaggagctgaaggcaggcgggaagtccaccaagcaggcggaaaaacaaacgaaggaagccctgactcggaagcagcagaaatgccgacggaaaaaccaagatgaggaatcccaggaggcccctgagctcctgaagcgccctaaggagtacactgtgcgcttcacttttccagaccccccaccactcagccctccagtgctgggtctgcatggtgtgacattcggctaccagggacagaaaccactctttaagaacttggattttggcatcgacatggattcaaggatttgcattgtgggccctaatggtgtggggaagagtacgctactcctgctgctgactggcaagctgacaccgacccatggggaaatgagaaagaaccaccggctgaaaattggcttcttcaaccagcagtatgcagagcagctgcgcatggaggagacgcccactgagtacctgcagcggggcttcaacctgccctaccaggatgcccgcaagtgcctgggccgcttcggcctggagagtcacgcccacaccatccagatctgcaaactctctggtggtcagaaggcgcgagttgtgtttgctgagctggcctgtcgggaacctgatgtcctcatcttggacgagccaaccaataacctggacatagagtctattgatgctctaggggaggccatcaatgaatacaagggtgctgtgatcgttgtcagccatgatgcccgactcatcacagaaaccaattgccagctgtgggtggtggaggagcagagtgttagccaaatcgatggtgactttgaagactacaagcgggaggtgttggaggccctgggtgaagtcatggtcagccggccccgagagtgaagctttccttcccagaagtctcccgagagacatatttgtgtggcctagaagtcctctgtggtctcccctcctctgaagactgcctctggcctgcagctgacctggcaaccattcaggcacatgaaggtggagtgtgaccttgatgtgaccgggatcccactctgattgcatccatttctctgaaagacttgtttgttctgcttctcttcatataactgagctggccttatccttggcatccccctaaacaaacaagaggtgaccaccttattgtgaggttccatccagccaagtttatgtggcctattgtctcaggactctcatcactcagaagcctgcctctgatttaccctacagcttcaggcccagctgccccccagtctttgggtggtgctgttcttttctggtggatttaatgctgactcactggtacaaacagctgttgaagctcagagctggaggtgagcttctgaggcctttgccattatccagcccaagatttggtgcctgcagcctcttgtctggttgaggacttggggcaggaaaggaatgctgctgaacttgaatttccctttacaaggggaagaaataaaggaaaggagttgctgccga

SEQ ID NO: 325571 - DNA, 2723 bp, Homo sapiens
agcccgggggcggggttggccgcgccagacttggagagccagccccatcggggttccccgccgccggaagcggaaatagcaccgggcgccgccacagtagctgtaactgccaccgcgatgccgaaggcgcccaagcagcagccgccggagcccgagtggatcggggacggagagagcacgagcccatcagacaaagtggtgaagaaagggaagaaggacaagaagatcaaaaaaacgttctttgaagagctggcagtagaagataaacaggctggggaagaagagaaagtgaaggaggagagtctaaggcagatgatccctatgctcatcttagcaaaaaggagaagaaaaagctgaaaaaacagatggagtatgagcgccaagtggcttcattaaaagcagccaatgcagctgaaaatgacttctccgtgtcccaggcggagatgtcctcccgccaagccatgttagaaaatgcatctgacatcaagctggagaagttcagcatctccgctcatggcaaggagctgttcgtcaatgcagacctgtacattgtagccggccgccgctacgggctggtaggacccaatggcaagggcaagaccacactcctcaagcacattgccaaccgagccctgagcatccctcccaacattgatgtgttgctgtgtgagcaggaggtggtagcagatgagacaccagcagtccaggctgttcttcgagctgacaccaagcgattgaagctgctggaagaggagcggcggcttcagggacagctggaacaaggggatgacacagctgctgagaggctagagaaggtgtatgaggaattgcgggccactggggcggcagctgcagaggccaaagcacggcggatcctggctggcctgggctttgaccctgaaatgcagaatcgacccacacagaagttctcagggggctggcgcatgcgtgtctccctggccagggcactgttcatggagcccacactgctgatgctggatgagcccaccaaccacctggacctcaacgctgtcatctggcttaataactacctccagggctggcggaagaccttgctgatcgtctcccatgaccagggcttcttggatgatgtctgcactgatatcatccacctcgatgcccagcggctccactactataggggcaattacatgaccttcaaaaagatgtaccagcagaagcagaaagaactgctgaaacagtatgagaagcaagagaaaaagctgaaggagctgaaggcaggcgggaagtccaccaagcaggcggaaaaacaaacgaaggaagccctgactcggaagcagcagaaatgccgacggaaaaaccaagatgaggaatcccaggaggcccctgagctcctgaagcgccctaaggagtacactgtgcgcttcacttttccagaccccccaccactcagccctccagtgctgggtctgcatggtgtgacattcggctaccagggacagaaaccactctttaagaacttggattttggcatcgacatggattcaaggatttgcattgtgggccctaatggtgtggggaagagtacgctactcctgctgctgactggcaagctgacaccgacccatggggaaatgagaaagaaccaccggctgaaaattggcttcttcaaccagcagtatgcagagcagctgcgcatggaggagacgcccactgagtacctgcagcggggcttcaacctgccctaccaggatgcccgcaagtgcctgggccgcttcggcctggagagtcacgcccacaccatccagatctgcaaactctctggtggtcagaaggcgcgagttgtgtttgctgagctggcctgtcgggaacctgatgtcctcatcttggacgagccaaccaataacctggacatagagtctattgatgctctaggggaggccatcaatgaatacaagggtgctgtgatcgttgtcagccatgatgcccgactcatcacagaaaccaattgccagctgtgggtggtggaggagcagagtgttagccaaatcgatggtgactttgaagactacaagcgggaggtgttggaggccctgggtgaagtcatggtcagccggccccgagagtgaagctttccttcccagaagtctcccgagagacatatttgtgtggcctagaagtcctctgtggtctcccctcctctgaagactgcctctggcctgcagctgacctggcaaccattcaggcacatgaaggtggagtgtgaccttgatgtgaccgggatcccactctgattgcatccatttctctgaaagacttgtttgttctgcttctcttcatataactgagctggccttatccttggcatccccctaaacaaacaagaggtgaccaccttattgtgaggttccatccagccaagtttatgtggcctattgtctcaggactctcatcactcagaagcctgcctctgatttaccctacagcttcaggcccagctgccccccagtctttgggtggtgctgttcttttctggtggatttaatgctgactcactggtacaaacagctgttgaagctcagagctggaggtgagcttctgaggcctttgccattatccagcccaagatttggtgcctgcagcctcttgtctggttgaggacttggggcaggaaaggaatgctgctgaacttgaatttccctttacaaggggaagaaataaaggaaaggagttgctgccga

SEQ ID NO: 325572 - DNA, 2177 bp, Homo sapiens
  misc_feature (34)..(34): n is a, c, g, or t
  misc_feature (41)..(41): n is a, c, g, or t
gggcgtcctctagagtagctaattgctgggcctngaccttncacaagggcaagaccacactcctcaagcacattgccaaccgagccctgagcatccctcccaacattgatgtgttgctgtgtgagcaggaggtggtagcagatgagacaccagcagtccaggctgttcttcgagctgacaccaagcgattgaagctgctggaagaggagcggcggcttcagggacagctggaacaaggggatgacacagctgctgagaggctagagaaggtgtatgaggaattgcgggccactggggcggcagctgcagaggccaaagcacggcggatcctggctggcctgggctttgaccctgaaatgcagaatcgacccacacagaagttctcagggggctggcgcatgcgtgtctccctggccagggcactgttcatggagcccacactgctgatgctggatgagcccaccaaccacctggacctcaacgctgtcatctggcttaataactacctccagggctggcggaagaccttgctgatcgtctcccatgaccagggcttcttggatgatgtctgcactgatatcatccacctcgatgcccagcggctccactactataggggcaattacatgaccttcaaaaagatgtaccagcagaagcagaaagaactgctgaaacagtatgagaagcaagagaaaaagctgaaggagctgaaggcaggcgggaagtccaccaagcaggcggaaaaacaaacgaaggaagccctgactcggaagcagcagaaatgccgacggaaaaaccaagatgaggaatcccaggaggcccctgagctcctgaagcgccctaaggagtacactgtgcgcttcacttttccagaccccccaccactcagccctccagtgctgggtctgcatggtgtgacattcggctaccagggacagaaaccactctttaagaacttggattttggcatcgacatggattcaaggatttgcattgtgggccctaatggtgtggggaagagtacgctactcctgctgctgactggcaagctgacaccgacccatggggaaatgagaaagaaccaccggctgaaaattggcttcttcaaccagcagtatgcagagcagctgcgcatggaggagacgcccactgagtacctgcagcggggcttcaacctgccctaccaggatgcccgcaagtgcctgggccgcttcggcctggagagtcacgcccacaccatccagatctgcaaactctctggtggtcagaaggcgcgagttgtgtttgctgagctggcctgtcgggaacctgatgtcctcatcttggacgagccaaccaataacctggacatagagtctattgatgctctaggggaggccatcaatgaatacaagggtgctgtgatcgttgtcagccatgatgcccgactcatcacagaaaccaattgccagctgtgggtggtggaggagcagagtgttagccaaatcgatggtgactttgaagactacaagcgggaggtgttggaggccctgggtgaagtcatggtcagccggccccgagagtgaagctttccttcccagaagtctcccgagagacatatttgtgtggcctagaagtcctctgtggtctcccctcctctgaagactgcctctggcctgcagctgacctggcaaccattcaggcacatgaaggtggagtgtgaccttgatgtgaccgggatcccactctgattgcatccatttctctgaaagacttgtttgttctgcttctcttcatataactgagctggccttatccttggcatccccctaaacaaacaagaggtgaccaccttattgtgaggttccatccagccaagtttatgtggcctattgtctcaggactctcatcactcagaagcctgcctctgatttaccctacagcttcaggcccagctgccccccagtctttgggtggtgctgttcttttctggtggatttaatgctgactcactggtacaaacagctgttgaagctcagagctggaggtgagcttctgaggcctttgccattatccagcccaagatttggtgcctgcagcctcttgtctggttgaggacttggggcaggaaaggaatgctgctgaacttgaatttccctttacaaggggaagaaataaaggaaaggagttgctgccga

SEQ ID NO: 325573 - DNA, 2636 bp, Homo sapiens
agcccgggggcggggttggccgcgccagacttggagagccagccccatcggggttccccgccgccggaagcggaaatagcaccgggcgccgccacagtagctgtaactgccaccgcgatgccgaaggcgcccaagcagcagccgccggagcccgagtggatcggggacggagagagcacgagcccatcagacaaagtggtgaagaaagggaagaaggacaagaagatcaaaaaaacgttctttgaagagctggcagtagaagataaacaggctggggaagaagagaaagtgctcaaggagaaggagcagcagcagcagcaacagcaacagcagcaaaaaaaaaagcgagatacccgaaaaggcaggcggaagaaggatgtggatgatgatggagaagagaaagagctcatggagcgtcttaagaagctctcagtgccaaccagtgatgaggaggatgaagtacccgccccaaaaccccgcggagggaagaaaaccaagggtggtaatgtttttgcagccctgattcaggatcagagtgaggaagaggaggaggaagaaaaacatcctcctaagcctgccaagccggagaagaatcggatcaataaggccgtatctgaggaacagcagcctgcactcaagggcaaaaagggaaaggaagagaagtcaaaagggaaggctaagcctcaaaataaattcgctgctctggacaatgaagaggaggataaagaagaagaaattataaaggaaaaggagcctcccaaacaagggaaggagaaggccaagaaggcagagcagggttcagaggaagaaggagaaggggaagaagaggaggaggaaggaggagagtctaaggcagatgatccctatgctcatcttagcaaaaaggagaagaaaaagctgaaaaaacagatggagtatgagcgccaagtggcttcattaaaagcagccaatgcagctgaaaatgacttctccgtgtcccaggcggagatgtcctcccgccaagccatgttagaaaatgcatctgacatcaagctggagaagttcagcatctccgctcatggcaaggagctgttcgtcaatgcagacctgtacattgtagccggccgccgctacgggctggtaggacccaatggcaagggcaagaccacactcctcaagcacattgccaaccgagccctgagcatccctcccaacattgatgtgttgctgtgtgagcaggaggtggtagcagatgagacaccagcagtccaggctgttcttcgagctgacaccaagcgattgaagctgctggaagaggagcggcggcttcagggacagctggaacaaggggatgacacagctgctgagaggctagagaaggtgtatgaggaattgcgggccactggggcggcagctgcagaggccaaagcacggcggatcctggctggcctgggctttgaccctgaaatgcagaatcgacccacacagaagttctcagggggctggcgcatgcgtgtctccctggccagggcactgttcatggagcccacactgctgatgctggatgagcccaccaaccacctggacctcaacgctgtcatctggcttaataactacctccagggctggcggaagaccttgctgatcgtctcccatgaccagggcttcttggatgatgtctgcactgatatcatccacctcgatgcccagcggctccactactataggggcaattacatgaccttcaaaaagatgtaccagcagaagcagaaagaactgctgaaacagtatgagaagcaagagaaaaagctgaaggagctgaaggcaggcgggaagtccaccaagcaggcggaaaaacaaacgaaggaagccctgactcggaagcagcagaaatgccgacggaaaaaccaagatgaggaatcccaggaggcccctgagctcctgaagcgccctaaggagtacactgtgcgcttcacttttccagaccccccaccactcagccctccagtgctgggtctgcatggtgtgacattcggctaccagggacagaaaccactctttaagaacttggattttggcatcgacatggattcaaggatttgcattgtgggccctaatggtgtggggaagagtacgctactcctgctgctgactggcaagctgacaccgacccatggggaaatgagaaagaaccaccggctgaaaattggcttcttcaaccagcagtatgcagagcagctgcgcatggaggagacgcccactgagtacctgcagcggggcttcaacctgccctaccaggatgcccgcaagtgcctgggccgcttcggcctggagagtcacgcccacaccatccagatctgcaaactctctggtggtcagaaggcgcgagtgtgtagctgaagctggccgtcgggaaaccgatgcctcatctggaagagcaaacaataaccggacatagagtttatgaaggtctagggaggccccaagactacaggggcgggatggggtcagcataatgcgacataaaaaacaatgccatggcgcggcgaggccacgttcgcagaggggcgtgcagaacacggggggtgagcggcaaatgaatcgcggagaaatccagaaaaaaagggacaccggccccaagcgagaaaaaagggaaa

SEQ ID NO: 325574 - DNA, 1038 bp, Homo sapiens
ttggtaatccctgtgagtacctccagggctataaccggccttcccggtagccctcattgcgcctgggccgttcggccctgaagaatcacgcccacaccatccagatcggcaaacttttgggtgttcaaaaaggcgcgattgttgttgctgaactggcctgtcgggaaacctgaggtcctcatctgggacgagccaaccaataacctggacatagagtctattgatgctctaggggaggccatcaatgaatacaagggtgctgtgatcgttgtcagccatgatgcccgactcatcacagaaaccaattgccagctgtgggtggtggaggagcagagtgttagccaaatcgatggtgactttgaagactacaagcgggaggtgttggaggccctgggtgaagtcatggtcagccggccccgagagtgaagctttccttcccagaagtctcccgagagacatatttgtgtggcctagaagtcctctgtggtctcccctcctctgaagactgcctctggcctgcagctgacctggcaaccattcaggcacatgaaggtggagtgtgaccttgatgtgaccgggatcccactctgattgcatccatttctctgaaagacttgtttgttctgcttctcttcatataactgagctggccttatccttggcatccccctaaacaaacaagaggtgaccaccttattgtgaggttccatccagccaagtttatgtggcctattgtctcaggactctcatcactcagaagcctgcctctgatttaccctacagcttcaggcccagctgccccccagtctttgggtggtgctgttcttttctggtggatttaatgctgactcactggtacaaacagctgttgaagctcagagctggaggtgagcttctgaggcctttgccattatccagcccaagatttggtgcctgcagcctcttgtctggttgaggacttggggcaggaaaggaatgctgctgaacttgaatttccctttacaaggggaagaaataaaggaaaggagttgctgccga

SEQ ID NO: 325575 - DNA, 2086 bp, Homo sapiens
agcccgggggcggggttggccgcgccagacttggagagccagccccatcggggttccccgccgccggaagcggaaatagcaccgggcgccgccacagtagctgtaactgccaccgcgatgccgaaggcgcccaagcagcagccgccggagcccgagtggatcggggacggagagagcacgagcccatcagacaaagtggtgaagaaagggaagaaggacaagaagatcaaaaaaacgttctttgaagagctggcagtagaagataaacaggctggggaagaagagaaagtgctcaaggagaaggagcagcagcagcagcaacagcaacagcagcaaaaaaaaaagcgagatacccgaaaaggcaggcggaagaaggatgtggatgatgatggagaagagaaagagctcatggagcgtcttaagaagctctcagtgccaaccagtgatgaggaggatgaagtacccgccccaaaaccccgcggagggaagaaaaccaagggtggtaatgtttttgcagccctgattcaggatcagagtgaggaagaggaggaggaagaaaaacatcctcctaagcctgccaagccggagaagaatcggatcaataaggccgtatctgaggaacagcagcctgcactcaagggcaaaaagggaaaggaagagaagtcaaaagggaaggctaagcctcaaaataaattcgctgctctggacaatgaagaggaggataaagaagaagaaattataaaggaaaaggagcctcccaaacaagggaaggagaaggccaagaaggcagagcagggttcagaggaagaaggagaaggggaagaagaggaggaggaaggaggagagtctaaggcagatgatccctatgctcatcttagcaaaaaggagaagaaaaagctgaaaaaacagatggagtatgagcgccaagtggcttcattaaaagcagccaatgcagctgaaaatgacttctccgtgtcccaggcggagatgtcctcccgccaagccatgttagaaaatgcatctgacatcaagctggagaagttcagcatctccgctcatggcaaggagctgttcgtcaatgcagacctgtacattgtagccggccgccgctacgggctggtaggacccaatggcaagggcaagaccacactcctcaagcacattgccaaccgagccctgagcatccctcccaacattgatgtgttgctgtgtgagcaggaggtggtagcagatgagacaccagcagtccaggctgttcttcgagctgacaccaagcgattgaagctgctggaagaggagcggcggcttcagggacagctggaacaaggggatgacacagctgctgagaggctagagaaggtgtatgaggaattgcgggccactggggcggcagctgcagaggccaaagcacggcggatcctggctggcctgggctttgaccctgaaatgcagaatcgacccacacagaagttctcagggggctggcgcatgcgtgtctccctggccagggcactgttcatggacgcccatcactgcgtgatgctggaatggagcgccggagccaatgcagccgtgggaagcgctcaacgctgatcatctggcgttaatagacgtacctccagggtctggcgggaagaccttgtcgtgagtacgatctgcccagtgcaccagcggctgtctaggagtgatgttctgcactgaatattcatccaccatcggatggccctaagctggtcgtccactcactcatagtgggtcgaactctcactagtgtacccttgcacagaataggtatgtgacgcagcagcaatgcatggaagaggaacgtgctgcaaactcgtatgacgaagcgaagcagcaatcaagctgcatggacgctgaatggccaggtctgggagggtgtcctaccccacatgcaacggcggggaaacaaacacaacggagaggggaaaggcccctgacactctgggcaagtccaggccaggacacagtgtcctggacgggaatcatgagcctagaggattgaacgggaacgtccgcatggggagggctccccctgaaggcatccatgataggcggtccccct

SEQ ID NO: 325576 - DNA, 926 bp, Homo sapiens
agcccgggggcggggttggccgcgccagacttggagagccagccccatcggggttccccgccgccggaagcggaaatagcaccgggcgccgccacagtagctgtaactgccaccgcgatgccgaaggcgcccaagcagcagccgccggagcccgagtggatcggggacggagagagcacgagcccatcagacaaagtggtgaagaaagggaagaaggacaagaagatcaaaaaaacgttctttgaagagctggcagtagaagataaacaggctggggaagaagagaaagtgctcaaggagaaggagcagcagcagcagcaacagcaacagcagcaaaaaaaaaagcgagatacccgaaaaggcaggcggaagaaggatgtggatgatgatggagaagagaaagagctcatggagcgtcttaagaagctctcagtgccaaccagtgatgaggaggatgaagtacccgccccaaaaccccgcggagggaagaaaaccaagggtggtaatgtttttgcagccctgattcaggatcagagtgaggaagaggaggaggaagaaaaacatcctcctaagcctgccaagccggagaagaatcggatcaataaggccgtatctgaggaacagcagcctgcactcaagggcaaaaagggaaaggaagagaagtcaaaagggaaggctaagcctcaaaataaattcgctgctctggacaatgaagaggaggataaagaagaagaaattataaaggaaaaggagcctcccaaacaagggttaagggctcccggagggttaaggggtcccggagggttaagggctcccggagggttaagggctcccggagggttaagggctcccggagggttaagggctcccggagggttaagggctcccggagggttaagggctcccggagggttaagggctcccgg

SEQ ID NO: 325577 - DNA, 856 bp, Homo sapiens
agcccgggggcggggttggccgcgccagacttggagagccagccccatcggggttccccgccgccggaagcggaaatagcaccgggcgccgccacagtagctgtaactgccaccgcgatgccgaaggcgcccaagcagcagccgccggagcccgagtggatcggggacggagagagcacgagcccatcagacaaagtggtgaagaaagggaagaaggacaagaagatcaaaaaaacgttctttgaagagctggcagtagaagataaacaggctggggaagaagagaaagtgctcaaggagaaggagcagcagcagcagcaacagcaacagcagcaaaaaaaaaagcgagatacccgaaaaggcaggcggaagaaggatgtggatgatgatggagaagagaaagagctcatggagcgtcttaagaagctctcagtgccaaccagtgatgaggaggatgaagtacccgccccaaaaccccgcggagggaagaaaaccaagggtggtaatgtttttgcagccctgattcaggatcagagtgaggaagaggaggaggaagaaaaacatcctcctaagcctgccaagccggagaagaatcggatcaataaggtgacagtggtggctcgatcagtcactctcactccatttaacaccttctggccatggtggagtaatttcccgcttttaaactagctcttctcggtctgtcttacttatactgttaaaatcatctttttagaatacatgcccaggctgggcacagtgggtcacgcctgtaatcccagcactttgggaggccgaggtgggaggatagcttaagcccaggaatttgagacctgcacactccattctccacaaa

SEQ ID NO: 325578 - DNA, 321 bp, Homo sapiens
gtgagtgagctgggctgtgggaaaagggataagggtaacagtaatggaagacgggagttgcagtgctcagtcatggaattcctcctatgtaggacgagccaaccaataacctggacatagagtctattgatgctctaggggaggccatcaatgaatacaagggtggtaagtcagctgagagtgtgccctcatccctgctccatggggaccaagctgtagtgtccttcactacagaagggcctaggactcccttatttcatgttctgattcccctctttctcctttcttcctgccctctgttgttgctatctttcttcaaag

SEQ ID NO: 325579 - DNA, 520 bp, Homo sapiens
accaccaagtaggctttaccttttcttttggaaccttcagtacacctggaattacctatttaaaaatctctcttcctatagcctgcaagctccagaggagaccacatttgtcttgttcattgctataatcccctacgctagcacaatatctgacacatggtagctgtttagtagatacttagtggatgaatgaatagagatgggaatgattatttctgcaggagttgtgagacagtacaaatatttaaggagtgatagttaagctagaaaaataataaaataggatagaggctacagagatctttgcaggggggatcagactgctttggaatttgcagataagcattcacgatgtccgcttaactttctagacaaagtggtgaagaaagggaagaaggacaagaagatcaaaaaaacggtgagaaaatgagggttgaggataagaaatgactatggatgtttccaagctaaataaatagccatgtgaaggaggtgggaggtccaagggaggagaaaagat

SEQ ID NO: 325580 - DNA, 432 bp, Homo sapiens
tgaaagacttgtttgttctgcttctcttcatataactgagctggccttatccttggcatccccctaaacaaacaagaggtgaccaccttattgtgaggttccatccagccaagtttatgtggcctattgtctcaggactctcatcactcagaagcctgcctctgatttaccctacagcttcaggcccagctgccccccagtctttgggtggtgctgttcttttctggtggatttaatgctgactcactggtacaaacagctgttgaagctcagagctggaggtgagcttctgaggcctttgccattatccagcccaagatttggtgcctgcagcctcttgtctggttgaggacttggggcaggaaaggaatgctgctgaacttgaatttccctttacaaggggaagaaataaaggaaaggagttgctgccga

SEQ ID NO: 325581 - DNA, 3153 bp, Homo sapiens
agcccgggggcggggttggccgcgccagacttggagagccagccccatcggggttccccgccgccggaagcggaaatagcaccgggcgccgccacagtagctgtaactgccaccgcgatgccgaaggcgcccaagcagcagccgccggagcccgagtggatcggggacggagagagcacgagcccatcagacaaagtggtgaagaaagggaagaaggacaagaagatcaaaaaaacgttctttgaagagctggcagtagaagataaacaggctggggaagaagagaaagtgctcaaggagaaggagcagcagcagcagcaacagcaacagcagcaaaaaaaaaagcgagatacccgaaaaggcaggcggaagaaggatgtggatgatgatggagaagagaaagagctcatggagcgtcttaagaagctctcagtgccaaccagtgatgaggaggatgaagtacccgccccaaaaccccgcggagggaagaaaaccaagggtggtaatgtttttgcagccctgattcaggatcagagtgaggaagaggaggaggaagaaaaacatcctcctaagcctgccaagccggagaagaatcggatcaataaggccgtatctgaggaacagcagcctgcactcaagggcaaaaagggaaaggaagagaagtcaaaagggaaggctaagcctcaaaataaattcgctgctctggacaatgaagaggaggataaagaagaagaaattataaaggaaaaggagcctcccaaacaagggaaggagaaggccaagaaggcagagcagatggagtatgagcgccaagtggcttcattaaaagcagccaatgcagctgaaaatgacttctccgtgtcccaggcggagatgtcctcccgccaagccatgttagaaaatgcatctgacatcaagctggagaagttcagcatctccgctcatggcaaggagctgttcgtcaatgcagacctgtacattgtagccggccgccgctacgggctggtaggacccaatggcaagggcaagaccacactcctcaagcacattgccaaccgagccctgagcatccctcccaacattgatgtgttgctgtgtgagcaggaggtggtagcagatgagacaccagcagtccaggctgttcttcgagctgacaccaagcgattgaagctgctggaagaggagcggcggcttcagggacagctggaacaaggggatgacacagctgctgagaggctagagaaggtgtatgaggaattgcgggccactggggcggcagctgcagaggccaaagcacggcggatcctggctggcctgggctttgaccctgaaatgcagaatcgacccacacagaagttctcagggggctggcgcatgcgtgtctccctggccagggcactgttcatggagcccacactgctgatgctggatgagcccaccaaccacctggacctcaacgctgtcatctggcttaataactacctccagggctggcggaagaccttgctgatcgtctcccatgaccagggcttcttggatgatgtctgcactgatatcatccacctcgatgcccagcggctccactactataggggcaattacatgaccttcaaaaagatgtaccagcagaagcagaaagaactgctgaaacagtatgagaagcaagagaaaaagctgaaggagctgaaggcaggcgggaagtccaccaagcaggcggaaaaacaaacgaaggaagccctgactcggaagcagcagaaatgccgacggaaaaaccaagatgaggaatcccaggaggcccctgagctcctgaagcgccctaaggagtacactgtgcgcttcacttttccagaccccccaccactcagccctccagtgctgggtctgcatggtgtgacattcggctaccagggacagaaaccactctttaagaacttggattttggcatcgacatggattcaaggatttgcattgtgggccctaatggtgtggggaagagtacgctactcctgctgctgactggcaagctgacaccgacccatggggaaatgagaaagaaccaccggctgaaaattggcttcttcaaccagcagtatgcagagcagctgcgcatggaggagacgcccactgagtacctgcagcggggcttcaacctgccctaccaggatgcccgcaagtgcctgggccgcttcggcctggagagtcacgcccacaccatccagatctgcaaactctctggtggtcagaaggcgcgagttgtgtttgctgagctggcctgtcgggaacctgatgtcctcatcttggacgagccaaccaataacctggacatagagtctattgatgctctaggggaggccatcaatgaatacaagggtgctgtgatcgttgtcagccatgatgcccgactcatcacagaaaccaattgccagctgtgggtggtggaggagcagagtgttagccaaatcgatggtgactttgaagactacaagcgggaggtgttggaggccctgggtgaagtcatggtcagccggccccgagagtgaagctttccttcccagaagtctcccgagagacatatttgtgtggcctagaagtcctctgtggtctcccctcctctgaagactgcctctggcctgcagctgacctggcaaccattcaggcacatgaaggtggagtgtgaccttgatgtgaccgggatcccactctgattgcatccatttctctgaaagacttgtttgttctgcttctcttcatataactgagctggccttatccttggcatccccctaaacaaacaagaggtgaccaccttattgtgaggttccatccagccaagtttatgtggcctattgtctcaggactctcatcactcagaagcctgcctctgatttaccctacagcttcaggcccagctgccccccagtctttgggtggtgctgttcttttctggtggatttaatgctgactcactggtacaaacagctgttgaagctcagagctggaggtgagcttctgaggcctttgccattatccagcccaagatttggtgcctgcagcctcttgtctggttgaggacttggggcaggaaaggaatgctgctgaacttgaatttccctttacaaggggaagaaataaaggaaaggagttgctgccga

SEQ ID NO: 325582 - DNA, 946 bp, Homo sapiens
agcccgggggcggggttggccgcgccagacttggagagccagccccatcggggttccccgccgccggaagcggaaatagcaccgggcgccgccacagtagctgtaactgccaccgcgatgccgaaggcgcccaagcagcagccgccggagcccgagtggatcggggacggagagagcacgagcccatcagacaaagtggtgaagaaagggaagaaggacaagaagatcaaaaaaacgttctttgaagagctggcagtagaagataaacaggctggggaagaagagaaagtgctcaaggagaaggagcagcagcagcagcaacagcaacagcagcaaaaaaaaaagcgagatacccgaagcagcggggggcctagcccttactagtctcaatctccaacacattatggcctagactacgttacataacctaaaccttactccaagtgctaaaactaattcgtcccaacaattatattactaccacgtgacattgactttccaaaaaaacacataattggaatcaacacaaccacccacagcctaattattagcatcatccctctactattttttaaccaaatcaacaacaacctatttagctggttccccaaccttttcctccggaccccctaacaacccccctcctaatactaactacctgactcctacccctcacaatcatggcaagccaaggccacttatccagggaaccactatcacgaaaaaaactctaactctctatactaatctccctagaaatctccttaattataaccttcacaggcacagaactaatcatatttgaaatcttccttcggaaccacattttcccacctgggggtataatacccgatgagggagacaggcgaaagcgcgtaaacaaggacattttccaattttaccctagaaggggcctatccaataacggggaaattatatcaaaaca

SEQ ID NO: 325583 - DNA, 3386 bp, Homo sapiens
agcccgggggcggggttggccgcgccagacttggagagccagccccatcggggttccccgccgccggaagcggaaatagcaccgggcgccgccacagtagctgtaactgccaccgcgatgccgaaggcgcccaagcagcagccgccggagcccgagtggatcggggacggagagagcacgagcccatcagacaaagtggtgaagaaagggaagaaggacaagaagatcaaaaaaacgttctttgaagagctggcagtagaagataaacaggctggggaagaagagaaagtgctcaaggagaaggagcagcagcagcagcaacagcaacagcagcaaaaaaaaaagcgagatacccgaaaaggcaggcggaagaaggatgtggatgatgatggagaagagaaagagctcatggagcgtcttaagaagctctcagtgccaaccagtgatgaggaggatgaagtacccgccccaaaaccccgcggagggaagaaaaccaagggtggtaatgtttttgcagccctgattcaggatcagagtgaggaagaggaggaggaagaaaaacatcctcctaagcctgccaagccggagaagaatcggatcaataaggccgtatctgaggaacagcagcctgcactcaagggcaaaaagggaaaggaagagaagtcaaaagggaaggctaagcctcaaaataaattcgctgctctggacaatgaagaggaggataaagaagaagaaattataaaggaaaaggagcctcccaaacaagggaaggagaaggccaagaaggcagagcagggttcagaggaagaaggagaaggggaagaagaggaggaggaaggaggagagtctaaggcagatgatccctatgctcatcttagcaaaaaggagaagaaaaagctgaaaaaacagatggagtatgagcgccaagtggcttcattaaaagcagccaatgcagctgaaaatgacttctccgtgtcccaggcggagatgtcctcccgccaagccatgttagaaaatgcatctgacatcaagctggagaagttcagcatctccgctcatggcaaggagctgttcgtcaatgcagacctgtacattgtagccggccgccgctacgggctggtaggacccaatggcaagggcaagaccacactcctcaagcacattgccaaccgagccctgagcatccctcccaacattgatgtgttgctgtgtgagcaggaggtggtagcagatgagacaccagcagtccaggctgttcttcgagctgacaccaagcgattgaagctgctggaagaggagcggcggcttcagggacagctggaacaaggggatgacacagctgctgagaggctagagaaggtgtatgaggaattgcgggccactggggcggcagctgcagaggccaaagcacggcggatcctggctggcctgggctttgaccctgaaatgcagaatcgacccacacagaagttctcagggggctggcgcatgcgtgtctccctggccagggcactgttcatggagcccacactgctgatgctggatgagcccaccaaccacctggacctcaacgctgtcatctggcttaataactacctccagggctggcggaagaccttgctgatcgtctcccatgaccagggcttcttggatgatgtctgcactgatatcatccacctcgatgcccagcggctccactactataggggcaattacatgaccttcaaaaagatgtaccagcagaagcagaaagaactgctgaaacagtatgagaagcaagagaaaaagctgaaggagctgaaggcaggcgggaagtccaccaagcaggcggaaaaacaaacgaaggaagccctgactcggaagcagcagaaatgccgacggaaaaaccaagatgaggaatcccaggaggcccctgagctcctgaagcgccctaaggagtacactgtgcgcttcacttttccagaccccccaccactcagccctccagtgctgggtctgcatggtgtgacattcggctaccagggacagaaaccactctttaagaacttggattttggcatcgacatggattcaaggatttgcattgtgggccctaatggtgtggggaagagtacgctactcctgctgctgactggcaagctgacaccgacccatggggaaatgagaaagaaccaccggctgaaaattggcttcttcaaccagcagtatgcagagcagctgcgcatggaggagacgcccactgagtacctgcagcggggcttcaacctgccctaccaggatgcccgcaagtgcctgggccgcttcggcctggagagtcacgcccacaccatccagatctgcaaactctctggtggtcagaaggcgcgagttgtgtttgctgagctggcctgtcgggaacctgatgtcctcatcttggacgagccaaccaataacctggacatagagtctattgatgctctaggggaggccatcaatgaatacaagggtgctgtgatcgttgtcagccatgatgcccgactcatcacagaaaccaattgccagctgtgggtggtggaggagcagagtgttagccaaatcgatggtgactttgaagactacaagcgggaggtgttggaggccctgggtgaagtcatggtcagccggccccgagagtgaagctttccttcccagaagtctcccgagagacatatttgtgtggcctagaagtcctctgtggtctcccctcctctgaagactgcctctggcctgcagctgacctggcaaccattcaggcacatgaaggtggagtgtgaccttgatgtgaccgggatcccactctgattgcatccatttctctgaaagacttgtttgttctgcttctcttcatataactgagctggccttatccttggcatccccctaaacaaacaagaggtgaccaccttattgtgaggttccatccagccaagtttatgtggcctattgtctcaggactctcatcactcagaagcctgcctctgatttaccctacagcttcaggcccagctgccccccagtctttgggtggtgctgttcttttctggtggatttaatgctgactcactggtacaaacagctgttgaagctcagagctggaggtgagcttctgaggcctttgccattatccagcccaagatttggtgcctgcagcctcttgtctggttgaggacttggggcaggaaaggaatgctgctgaacttgaatttccctttacaaggggaagaaataaaggaaaggagttgctgccgacctgtcactgtttggagattgatgggagttggaactgttctcagtcttgatttgctttattcagttttctagcagcttttaatagtcccctcttccccactaaatggatcttgtttgca

SEQ ID NO: 325584 - DNA, 3220 bp, Homo sapiens
agcccgggggcggggttggccgcgccagacttggagagccagccccatcggggttccccgccgccggaagcggaaatagcaccgggcgccgccacagtagctgtaactgccaccgcgatgccgaaggcgcccaagcagcagccgccggagcccgagtggatcggggacggagagagcacgagcccatcagttctttgaagagctggcagtagaagataaacaggctggggaagaagagaaagtgctcaaggagaaggagcagcagcagcagcaacagcaacagcagcaaaaaaaaaagcgagatacccgaaaaggcaggcggaagaaggatgtggatgatgatggagaagagaaagagctcatggagcgtcttaagaagctctcagtgccaaccagtgatgaggaggatgaagtacccgccccaaaaccccgcggagggaagaaaaccaagggtggtaatgtttttgcagccctgattcaggatcagagtgaggaagaggaggaggaagaaaaacatcctcctaagcctgccaagccggagaagaatcggatcaataaggccgtatctgaggaacagcagcctgcactcaagggcaaaaagggaaaggaagagaagtcaaaagggaaggctaagcctcaaaataaattcgctgctctggacaatgaagaggaggataaagaagaagaaattataaaggaaaaggagcctcccaaacaagggaaggagaaggccaagaaggcagagcagggttcagaggaagaaggagaaggggaagaagaggaggaggaaggaggagagtctaaggcagatgatccctatgctcatcttagcaaaaaggagaagaaaaagctgaaaaaacagatggagtatgagcgccaagtggcttcattaaaagcagccaatgcagctgaaaatgacttctccgtgtcccaggcggagatgtcctcccgccaagccatgttagaaaatgcatctgacatcaagctggagaagttcagcatctccgctcatggcaaggagctgttcgtcaatgcagacctgtacattgtagccggccgccgctacgggctggtaggacccaatggcaagggcaagaccacactcctcaagcacattgccaaccgagccctgagcatccctcccaacattgatgtgttgctgtgtgagcaggaggtggtagcagatgagacaccagcagtccaggctgttcttcgagctgacaccaagcgattgaagctgctggaagaggagcggcggcttcagggacagctggaacaaggggatgacacagctgctgagaggctagagaaggtgtatgaggaattgcgggccactggggcggcagctgcagaggccaaagcacggcggatcctggctggcctgggctttgaccctgaaatgcagaatcgacccacacagaagttctcagggggctggcgcatgcgtgtctccctggccagggcactgttcatggagcccacactgctgatgctggatgagcccaccaaccacctggacctcaacgctgtcatctggcttaataactacctccagggctggcggaagaccttgctgatcgtctcccatgaccagggcttcttggatgatgtctgcactgatatcatccacctcgatgcccagcggctccactactataggggcaattacatgaccttcaaaaagatgtaccagcagaagcagaaagaactgctgaaacagtatgagaagcaagagaaaaagctgaaggagctgaaggcaggcgggaagtccaccaagcaggcggaaaaacaaacgaaggaagccctgactcggaagcagcagaaatgccgacggaaaaaccaagatgaggaatcccaggaggcccctgagctcctgaagcgccctaaggagtacactgtgcgcttcacttttccagaccccccaccactcagccctccagtgctgggtctgcatggtgtgacattcggctaccagggacagaaaccactctttaagaacttggattttggcatcgacatggattcaaggatttgcattgtgggccctaatggtgtggggaagagtacgctactcctgctgctgactggcaagctgacaccgacccatggggaaatgagaaagaaccaccggctgaaaattggcttcttcaaccagcagtatgcagagcagctgcgcatggaggagacgcccactgagtacctgcagcggggcttcaacctgccctaccaggatgcccgcaagtgcctgggccgcttcggcctggagagtcacgcccacaccatccagatctgcaaactctctggtggtcagaaggcgcgagttgtgtttgctgagctggcctgtcgggaacctgatgtcctcatcttggacgagccaaccaataacctggacatagagtctattgatgctctaggggaggccatcaatgaatacaagggtgctgtgatcgttgtcagccatgatgcccgactcatcacagaaaccaattgccagctgtgggtggtggaggagcagagtgttagccaaatcgatggtgactttgaagactacaagcgggaggtgttggaggccctgggtgaagtcatggtcagccggccccgagagtgaagctttccttcccagaagtctcccgagagacatatttgtgtggcctagaagtcctctgtggtctcccctcctctgaagactgcctctggcctgcagctgacctggcaaccattcaggcacatgaaggtggagtgtgaccttgatgtgaccgggatcccactctgattgcatccatttctctgaaagacttgtttgttctgcttctcttcatataactgagctggccttatccttggcatccccctaaacaaacaagaggtgaccaccttattgtgaggttccatccagccaagtttatgtggcctattgtctcaggactctcatcactcagaagcctgcctctgatttaccctacagcttcaggcccagctgccccccagtctttgggtggtgctgttcttttctggtggatttaatgctgactcactggtacaaacagctgttgaagctcagagctggaggtgagcttctgaggcctttgccattatccagcccaagatttggtgcctgcagcctcttgtctggttgaggacttggggcaggaaaggaatgctgctgaacttgaatttccctttacaaggggaagaaataaaggaaaggagttgctgccga

SEQ ID NO: 325585 - DNA, 3522 bp, Homo sapiens
agcccgggggcggggttggccgcgccagacttggagagccagccccatcggggttccccgccgccggaagcggaaatagcaccgggcgccgccacagtagctgtaactgccaccgcgatgccgaaggcgcccaagcagcagccgccggagcccgagtggatcggggacggagagagcacgagcccatcagacaaagtggtgaagaaagggaagaaggacaagaagatcaaaaaaacgttctttgaagagctggcagtagaagataaacaggctggggaagaagagaaagtgctcaaggagaaggagcagcagcagcagcaacagcaacagcagcaaaaaaaaaagcgagatacccgaaaaggcaggcggaagaaggatgtggatgatgatggagaagagaaagagctcatggagcgtcttaagaagctctcagtgccaaccagtgatgaggaggatgaagtacccgccccaaaaccccgcggagggaagaaaaccaagggtggtaatgtttttgcagccctgattcaggatcagagtgaggaagaggaggaggaagaaaaacatcctcctaagcctgccaagccggagaagaatcggatcaataaggccgtatctgaggaacagcagcctgcactcaagggcaaaaagggaaaggaagagaagtcaaaagggaaggctaagcctcaaaataaattcgctgctctggacaatgaagaggaggataaagaagaagaaattataaaggaaaaggagcctcccaaacaagggaaggagaaggccaagaaggcagagcagggttcagaggaagaaggagaaggggaagaagaggaggaggaaggaggagagtctaaggcagatgatccctatgctcatcttagcaaaaaggagaagaaaaagctgaaaaaacagatggagtatgagcgccaagtggcttcattaaaagcagccaatgcagctgaaaatgacttctccgtgtcccaggcggagatgtcctcccgccaagccatgttagaaaatgcatctgacatcaagctggagaagttcagcatctccgctcatggcaaggagctgttcgtcaatgcagacctgtacattgtagccggccgccgctacgggctggtaggacccaatggcaagggcaagaccacactcctcaagcacattgccaaccgagccctgagcatccctcccaacattgatgtgttgctgtgtgagcaggaggtggtagcagatgagacaccagcagtccaggctgttcttcgagctgacaccaagcgattgaagctgctggaagaggagcggcggcttcagggacagctggaacaaggggatgacacagctgctgagaggctagagaaggtgtatgaggaattgcgggccactggggcggcagctgcagaggccaaagcacggcggatcctggctggcctgggctttgaccctgaaatgcagaatcgacccacacagaagttctcagggggctggcgcatgcgtgtctccctggccagggcactgttcatggagcccacactgctgatgctggatgagcccaccaaccacctggacctcaacgctgtcatctggcttaataactacctccagggctggcggaagaccttgctgatcgtctcccatgaccagggcttcttggatgatgtctgcactgatatcatccacctcgatgcccagcggctccactactataggggcaattacatgaccttcaaaaagatgtaccagcagaagcagaaagaactgctgaaacagtatgagaagcaagagaaaaagctgaaggagctgaaggcaggcgggaagtccaccaagcaggcggaaaaacaaacgaaggaagccctgactcggaagcagcagaaatgccgacggaaaaaccaagatgaggaatcccaggaggcccctgagctcctgaagcgccctaaggagtacactgtgcgcttcacttttccagaccccccaccactcagccctccagtgctgggtctgcatggtgtgacattcggctaccagggacagaaaccactctttaagaacttggattttggcatcgacatggattcaaggatttgcattgtgggccctaatggtgtggggaagagtacgctactcctgctgctgactggcaagctgacaccgacccatggggaaatgagaaagaaccaccggctgaaaattggcttcttcaaccagcagtatgcagagcagctgcgcatggaggagacgcccactgagtacctgcagcggggcttcaacctgccctaccaggatgcccgcaagtgcctgggccgcttcggcctggagagtcacgcccacaccatccagatctgcaaactctctggtggtcagaaggcgcgagttgtgtttgctgagctggcctgtcgggaacctgatgtcctcatcttggacgagccaaccaataacctggacatagagtctattgatgctctaggggaggccatcaatgaatacaagggtgctgtgatcgttgtcagccatgatgcccgactcatcacagaaaccaattgccagctgtgggtggtggaggagcagagtgttagccaaatcgatggtgactttgaagactacaagcgggaggtgttggaggccctgggtgaagtcatggtcagccggccccgagagtgaagctttccttcccagaagtctcccgagagacatatttgtgtggcctagaagtcctctgtggtctcccctcctctgaagactgcctctggcctgcagctgacctggcaaccattcaggcacatgaaggtggagtgtgaccttgatgtgaccgggatcccactctgattgcatccatttctctgaaagacttgtttgttctgcttctcttcatataactgagctggccttatccttggcatccccctaaacaaacaagaggtgaccaccttattgtgaggttccatccagccaagtttatgtggcctattgtctcaggactctcatcactcagaagcctgcctctgatttaccctacagcttcaggcccagctgccccccagtctttgggtggtgctgttcttttctggtggatttaatgctgactcactggtacaaacagctgttgaagctcagagctggagggggagtggcatctcctggagcagctacgttgctgtcacgaagaggaactgtcatcaacatctccgatcacccccctctgactcgcttgtgtccccagaatccacccccattcagaggcctgagcaatatggtccagtacctcggacgtatgaagggcgcaaggggtccgcagggtgggcacttgtcagaaacctccactgtgtctggccaattctcttcacagccccaccgatgggtgcttcccagatccacatccgtgggaaagaaccccgcgtgtggcgagttacacaaaccccgagaaccccaagtgtctctcagcgctcaccgacagtcgtcacccggtacaccgccccgcgaggtcccgcccgagtgacagatccacgtaagttgctcccggccggggcc

SEQ ID NO: 325586 - DNA, 2879 bp, Homo sapiens
agcccgggggcggggttggccgcgccagacttggagagccagccccatcggggttccccgccgccggaagcggaaatagcaccgggcgccgccacagtagctgtaactgccaccgcgatgccgaaggcgcccaagcagcagccgccggagcccgagtggatcggggacggagagagcacgagcccatcagacaaagtggtgaagaaagggaagaaggacaagaagatcaaaaaaacgttctttgaagagctggcagtagaagataaacaggctggggaagaagagaaagtgctcaaggagaaggagcagcagcagcagcaacagcaacagcagcaaaaaaaaaagcgagatacccgaaaaggcaggcggaagaaggatgtggatgatgatggagaagagaaagagctcatggagcgtcttaagaagctctcagtgccaaccagtgatgaggaggatgaagtacccgccccaaaaccccgcggagggaagaaaaccaagggtggtaatgtttttgcagccctgattcaggatcagagtgaggaagaggaggaggaagaaaaacatcctcctaagcctgccaagccggagaagaatcggatcaataaggccgtatctgaggaacagcagcctgcactcaagggcaaaaagggaaaggaagagaagtcaaaagggaaggctaagcctcaaaataaattcgctgctctggacaatgaagaggaggataaagaagaagaaattataaaggaaaaggagcctcccaaacaagggaaggagaaggccaagaaggcagagcagggttcagaggaagaaggagaaggggaagaagaggaggaggaaggaggagagtctaaggcagatgatccctatgctcatcttagcaaaaaggagaagaaaaagctgaaaaaacagatggagtatgagcgccaagtggcttcattaaaagcagccaatgcagctgaaaatgacttctccgtgtcccaggcggagatgtcctcccgccaagccatgttagaaaatgcatctgacatcaagctggagaagttcagcatctccgctcatggcaaggagctgttcgtcaatgcagacctgtacattgtagccggccgccgctacgggctggtaggacccaatggcaagggcaagaccacactcctcaagcacattgccaaccgagccctgagcatccctcccaacattgatgtgttgctgtgtgagcaggaggtggtagcagatgagacaccagcagtccaggctgttcttcgagctgacaccaagcgattgaagctgctggaagaggagcggcggcttcagggacagctggaacaaggggatgacacagctgctgagaggctagagaaggtgtatgaggaattgcgggccactggggcggcagctgcagaggccaaagcacggcggatcctggctggcctgggctttgaccctgaaatgcagaatcgacccacacagaagttctcagggggctggcgcatgcgtgtctccctggccagggcactgttcatggagcccacactgctgatgctggatgagcccaccaaccacctggacctcaacgctgtcatctggcttaataactacctccagggctggcggaagaccttgctgatcgtctcccatgaccagggcttcttggatgatgtctgcactgatatcatccacctcgatgcccagcggctccactactataggggcaattacatgaccttcaaaaagatgtaccagcagaagcagaaagaactgctgaaacagtatgagaagcaagagaaaaagctgaaggagctgaaggcaggcgggaagtccaccaagcaggcggaaaaacaaacgaaggaagccctgactcggaagcagcagaaatgccgacggaaaaaccaagatgaggaatcccaggaggcccctgagctcctgaagcgccctaaggagtacactgtgcgcttcacttttccagaccccccaccactcagccctccagtgctgggtctgcatggtgtgacattcggctaccagggacagaaaccactctttaagaacttggattttggcatcgacatggattcaaggatttgcattgtgggccctaatggtgtggggaagagtacgctactcctgctgctgactggcaagctgacaccgacccatggggaaatgagaaagaaccaccggctgaaaattggcttcttcaaccagcagtatgcagagcagctgcgcatggaggagacgcccactgagtacctgcagcggggcttcaacctgccctaccaggatgcccgcaagtgcctgggccgcttcggcctggagagtcacgcccacaccatccagatctgcaaactctctggtggtcagaaggcgcgagttgtgtttgctgagctggcctgtcgggaacctgatgtcctcatcttggacgagccaaccaataacctggacatagagtctattgatgctctaggggaggccatcaatgaatacaagggtgctgtgatcgttgtcagccatgatgcccgactcatcacagaaaccaattgccagctgtgggtggtggaggagcagagtgttagccaaatcgatggtgactttgaagactacaagcgggaggtgttggaggccctgggtgaagtcatggtcagccggccccgagagtgaagctttccttcccagaagtctcccgagagacatatttgtgtggcctagaagtcctctgtggtctcccctcctctgaagactgcctctggcctgcagctgacctggcaaccatcgcgagcagcggtgtttcagacacgagaccgtgaaatgaccggcatcccacctgcgagtacacccacttctcagatagactgattcgctctcctgccttctcatcatattac

SEQ ID NO: 325587 - DNA, 1142 bp, Homo sapiens
cagtggactcggccgctgacttaacccatggggaaataagaaagaaccacaggctgaaaattggcttcttcaaccagcagtatgcagagcagctgcgcatggaggagacgcccactgagtacctgcagcggggcttcaacctgccctaccaggatgcccgcaagtgcctgggccgcttcggcctggagagtcacgcccacaccatccagatctgcaaactctctggtggtcagaaggcgcgagttgtgtttgctgagctggcctgtcgggaacctgatgtcctcatcttggacgagccaaccaataacctggacatagagtctattgatgctctaggggaggccatcaatgaatacaagggtgctgtgatcgttgtcagccatgatgcccgactcatcacagaaaccaattgccagctgtgggtggtggaggagcagagtgttagccaaatcgatggtgactttgaagactacaagcgggaggtgttggaggccctgggtgaagtcatggtcagccggccccgagagtgaagctttccttcccagaagtctcccgagagacatatttgtgtggcctagaagtcctctgtggtctcccctcctctgaagactgcctctggcctgcagctgacctggcaaccattcaggcacatgaaggtggagtgtgaccttgatgtgaccgggatcccactctgattgcatccatttctctgaaagacttgtttgttctgcttctcttcatataactgagctggccttatccttggcatccccctaaacaaacaagaggtgaccaccttattgtgaggttccatccagccaagtttatgtggcctattgtctcaggactctcatcactcagaagcctgcctctgatttaccctacagcttcaggcccagctgccccccagtctttgggtggtgctgttcttttctggtggatttaatgctgactcactggtacaaacagctgttgaagctcagagctggaggtgagcttctgaggcctttgccattatccagcccaagatttggtgcctgcagcctcttgtctggttgaggacttggggcaggaaaggaatgctgctgaacttgaatttccctttacaaggggaagaaataaaggaaaggagttgctgccga

SEQ ID NO: 325588 - DNA, 1230 bp, Homo sapiens
agcccgggggcggggttggccgcgccagacttggagagccagccccatcggggttccccgccgccggaagcggaaatagcaccgggcgccgccacagtagctgtaactgccaccgcgatgccgaaggcgcccaagcagcagccgccggagcccgagtggatcggggacggagagagcacgagcccatcagacaaagtggtgaagaaagggaagaaggacaagaagatcaaaaaaacgttctttgaagagctggcagtagaagataaacaggctggggaagaagagaaagtgctcaaggagaaggagcagcagcagcagcaacagcaacagcagcaaaaaaaaaagcgagatacccgaaaaggcaggcggaagaaggatgtggatgatgatggagaagagaaagagctcatggagcgtcttaagaagctctcagtgccaaccagtgatgaggaggatgaagtacccgccccaaaaccccgcggagggaagaaaaccaagggtggtaatgtttttgcagccctgattcaggatcagagtgaggaagaggaggaggaagaaaaacatcctcctaagcctgccaagccggagaagaatcggatcaataaggccgtatctgaggaacagcagcctgcactcaagggcaaaaagggaaaggaagagaagtcaaaagggaaggctaagcctcaaaataaattcgctgctctggacaatgaagaggaggataaagaagaagaaattataaaggaaaaggagcctcccaaacaagggaaggagaaggccaagaaggcagagcaggttcagaggaagaacggagatcttccagagcacaagagaccttcagcacctgtcgacttctcaaagatagacccaagcaagcctgaaagcatattgaaaatgacgaaaaaagggaagactctcatgatgtttgtcactgtatcaggaagccctactgagaaggagacagaggaaattacgagcctctggcagggcagccttttcaatgccaactatgacgtccagaggttcattgtgggatcagaccgtgctatcttcatgcttcgcgatgggagctacgcctgggagatcaaggacttttaggtcggtcaagaccggtgtgcctgatgttactctggagggccaggtgtacccccggtcaaaagcgagcgaggtacagcaaacgagaacaactacaacatagtccaagacaagggccaataaaactatataatg

SEQ ID NO: 325589 - DNA, 755 bp, Homo sapiens
agcccgggggcggggttggccgcgccagacttggagagccagccccatcggggttccccgccgccggaagcggaaatagcaccgggcgccgccacagtagctgtaactgccaccgcgatgccgaaggcgcccaagcagcagccgccggagcccgagtggatcggggacggagagagcacgagcccatcagacaaagtggtgaagaaagggaagaaggacaagaagatcaaaaaaacgttctttgaagagctggcagtagaagataaacaggctggggaagaagagaaagtgctcaaggagaaggagcagcagcagcagcaacagcaacagcagcaaaaaaaaaagcgagatacccgaaaaggcaggcggaagaaggatgtggatgatgatggagaagagaaagagctcatggagcgtcttaagaagctctcagtgccaaccagtgatgaggaggatgaagtacccgccccaaaaccccgcggagggaagaaaaccaagggtggtaatgtttttgcagccctgattcaggatcagagtgaggaagaggaggaggaagaaaaacatcctcctaagcctgccaagccggagaagaatcggatcaataaggccgtatctgaggaacagcagcctgcactcaagggcaaaaagggaaagaagggccacaatgttgaagtggcagtggcacccaggagttagggacccccttccagctctggcatagaagagttatcacatacctgagatcctaacaaggt

SEQ ID NO: 325590 - DNA, 2334 bp, Homo sapiens
gaacatgcttttattgcacttatgaaggtgtattgaaggaaaattttagagtaagctgatgagaaagttttgccaagtgaaattgttaaacaccttgtatgtcagaactgtgattgtggtaaataattcacaagaacaggctgaagtaagtcacctttccctcaaactaactagaacacgttctaacatgttcatttacctttcttcaagtaaaaaaagcgacattaagttagtgtatttcatattttattaggaaatgcttttatgtaattaacttaaaaattcttttttttttttgtagcctatagcaagcaaattttaagcttaattcagcaagggttggcttccaagggtggctgcaataggctgcagctatgtgatttttgtacttgtttttacatatatagcttatgtaatttctttatataaattaatgcttaataactgaaagcaagtgagctccaaagatgaaatttcagaagcagtatacatgaatgagtgtgttctactggtctgctaagagctttaaatggaagtggccgctcaaagcacagtgtcctgttaactcttgagtgctaagtagatctttgcaacagtaagcttgattgatcatgggttaaaaagagagaatattgaaatagatgttttaatacaggctggaaatcagctattcaacactatcattgatttagtatacaagaaatcatatggattaactgaacttaatagtactcaagtaggatatgcaaaatttatattttacataatctgtgaacatttttagtacctaaaaatgtttcaggtatttcaaagatgggaacaaccagtatctagtcatcatacattaatgtgaacatgcttattaaaagttaacctctttataaaaagtattaataaaccaagatgtgcctaaatattagggtacttcaagctaaaggtcatagtttatatataaaaagtacgagattcaaggaagtaatgtatctgatgctttgcttaataagattcactagtgcttgcccttaattcatagaacagtattgtttaggttacattaacctgaaatttaaagcataattattaggattccggcctataaatacaataattaaaatctatactatattattgctaccatgaaagtcttatctttggctgtttttcaagtagaaaagtaagtgtactgtgagccttttatttgagatgctgagagctattaggatgagtatttcagttttcttgtcaatagtgatactctgatgatgttgcagttatttgaagtagaactgattgtctaaaccagacacacataggagtgtgctccattggtcttgtggagagtgctgcacattaacccctccctcaactgtgcaatccacttgagactggcttctctaagccacagttgttatctgctgtgtaaagtcctggatgccagcactgtggcttcttagagagggcagatgctttgtatatcgagctgcagcattcatcgtagaaaatgctacaaagctgtctctcttccccttctctcatgtttccctcttttcatcaagatgaaggctgttgggtaagaaaaactaagtgatttaacaaatcattatgatttaaacttagaaataaacctagaattttttggtgtcccttttatcataggtgtttaatgtatattttaatgattgtagaacttgaattgctctagaatgtgaatgactacccttgtgttttactccttttggcttttgttttgtaaagaatctcctgtgaggagttctgtttttagaatttaatattgtttggttacttccctgactttagtgaaagatattagagtatttactatgccagtatctaacttaaactattagtattaaataagtatatcttttacatttagtacaggtaccataaccaagagatttcttagttttgatggattaagagagagcattctgctgtatattatggcaggtacagatatgatcataactgaaccagaatttggattatagaagtgcacttcctagctgttttttatttaggtataggaacacacaatgagaaccttatgtttagaatgtagcagtaacaacagagggtaactacactgcaagacttaaatggtttgagcatgtgacactatccttttgttggggggagcagggtataaaaatatacatacaggagattagtttaatagtaaagttttatatgtatgtttaacttccatgatatttattattttgtagagacatttgtgattgtttagagttcttgtttttattctatttatgtataaggttgactttttttaaataaataagccaaaaattc

SEQ ID NO: 325591 - DNA, 687 bp, Homo sapiens
  misc_feature (9)..(9): n is a, c, g, or t
  misc_feature (24)..(24): n is a, c, g, or t
ctcgtcaanttcgagcaggagttntctaatgattgtagaacttgaattgctctagaatgtgaatgactacccttgtgttttactccttttggcttttgttttgtaaagaatctcctgtgaggagttctgtttttagaatttaatattgtttggttacttccctgactttagtgaaagatattagagtatttactatgccagtatctaacttaaactattagtattaaataagtatatcttttacatttagtacaggtaccataaccaagagatttcttagttttgatggattaagagagagcattctgctgtatattatggcaggtacagatatgatcataactgaaccagaatttggattatagaagtgcacttcctagctgttttttatttaggtataggaacacacaatgagaaccttatgtttagaatgtagcagtaacaacagagggtaactacactgcaagacttaaatggtttgagcatgtgacactatccttttgttggggggagcagggtataaaaatatacatacaggagattagtttaatagtaaagttttatatgtatgtttaacttccatgatatttattattttgtagagacatttgtgattgtttagagttcttgtttttattctatttatgtataaggttgactttttttaaataaataagccaaaaattc

SEQ ID NO: 325592 - DNA, 594 bp, Homo sapiens
  misc_feature (54)..(54): n is a, c, g, or t
aacttaaactattagtattaaataagatactggcatagtaaatactctaatatntttcactaaagtcagggaagtaaccaaacaatattagagtatttactatgccagtatctaacttaaactattagtattaaataagtatatcttttacatttagtacaggtaccataaccaagagatttcttagttttgatggattaagagagagcattctgctgtatattatggcaggtacagatatgatcataactgaaccagaatttggattatagaagtgcacttcctagctgttttttatttaggtataggaacacacaatgagaaccttatgtttagaatgtagcagtaacaacagagggtaactacactgcaagacttaaatggtttgagcatgtgacactatccttttgttggggggagcagggtataaaaatatacatacaggagattagtttaatagtaaagttttatatgtatgtttaacttccatgatatttattattttgtagagacatttgtgattgtttagagttcttgtttttattctatttatgtataaggttgactttttttaaataaataagccaaaaattc

SEQ ID NO: 325593 - DNA, 1793 bp, Homo sapiens
gaacatgcttttattgcacttatgaaggtgtattgaaggaaaattttagagtaagctgatgagaaagttttgccaagtgaaattgttaaacaccttgtatgtcagaactgtgattgtggtaaataattcacaagaacaggctgaagtaagtcacctttccctcaaactaactagaacacgttctaacatgttcatttacctttcttcaagtaaaaaaagcgacattaagttagtgtatttcatattttattaggaaatgcttttatgtaattaacttaaaaattcttttttttttttgtagcctatagcaagcaaattttaagcttaattcagcaagggttggcttccaagggtggctgcaataggctgcagctatgtgatttttgtacttgtttttacatatatagcttatgtaatttctttatataaattaatgcttaataactgaaagcaagtgagctccaaagatgaaatttcagaagcagtatacatgaatgagtgtgttctactggtctgctaagagctttaaatggaagtggccgctcaaagcacagtgtcctgttaactcttgagtgctaagtagatctttgcaacagtaagcttgattgatcatgggttaaaaagagagaatattgaaatagatgttttaatacaggctggaaatcagctattcaacactatcattgatttagtatacaagaaatcatatggattaactgaacttaatagtactcaagtaggatatgcaaaatttatattttacataatctgtgaacatttttagtacctaaaaatgtttcaggtatttcaaagatgggaacaaccagtatctagtcatcatacattaatgtgaacatgcttattaaaagttaacctctttataaaaagtattaataaaccaagatgtgcctaaatattagggtacttcaagctaaaggtcatagtttatatataaaaagtacgagattcaaggaagtaatgtatctgatgctttgcttaataagattcactagtgcttgcccttaattcatagaacagtattgtttaggttacattaacctgaaatttaaagcataattattaggattccggcctataaatacaataattaaaatctatactatattattgctaccatgaaagtcttatctttggctgtttttcaagtagaaaagtaagtgtactgtgagccttttatttgagatgctgagagctattaggatgagtatttcagttttcttgtcaatagtgatactctgatgatgttgcagttatttgaagtagaactgattgtctaaaccagacacacataggagtgtgctccattggtcttgtggagagtgctgcacattaacccctccctcaactgtgcaatccacttgagactggcttctctaagccacagttgttatctgctgtgtaaagtcctggatgccagcactgtggcttcttagagagggcagatgctttgtatatcgagctgcagcattcatcgtagaaaatgctacaaagctgtctctcttccccttctctcatgtttccctcttttcatcaagatgaaggctgttgggtaagaaaaactaagtgatttaacaaatcattatgatttaaacttagaaataaacctagaattttttggtgtcccttttatcataggtgtttaatgtatattttaatgattgtagaacttgggttgatgagaagaatgtgcagaaacataactgagagagcgggttggttttggggttttttttgttgaggatctcttgtgaggagttctttgcaaaaaaaaa

SEQ ID NO: 325594 - DNA, 252 bp, Homo sapiens
tgaatgcctctgtcatcttttgcaaagaaagataatttaaaaagtacaaaacttaagaacaaattgtttaggtctaacaggttatgaaggtggcagtgagacatttcaaagctggaatatatacaacgtttgagttttgtttaggttcctctttggttcagtaaattaggaaagggatgcatttggcagggtgggaataaagcagaaatgaaacaattctacttaaaataattattttcccagttcatctac

SEQ ID NO: 325595 - DNA, 2141 bp, Homo sapiens
agcggggggtacgcggtggggcgggtctggcgggggcggggcacctctgtgcagggttcccagtcaccgcgacgctcctcgggaagccatagggcgcctcccagcccgtctccccgctccagtttagaacctaattcccaattcccggaccgggcccagccctgggctcttactgtccgcttttgctgggacctgttccacaaatgggcgtcttctgccttgggccgtgggggttgggccggaagctgcggacgcctgggaaggggccgctgcagctcttgagccgcctctgcggggaccacttgcaggccatcccagccaagaaggccccggctgggcaggaggagcctgggacgccgccctcctcgccgctgagtgccgagcagttggaccggatccagaggaacaaggccgcggccctgctcagactcgcggcccgcaacgtgcccgtgggctttggagagagctggaagaagcacctcagcggggagttcgggaaaccgtattttatcaagctaatgggatttgttgcagaagaaagaaagcattacactgtttatccacccccacaccaagtcttcacctggacccagatgtgtgacataaaagatgtgaaggttgtcatcctgggacaggatccatatcatggacctaatcaagctcacgggctctgctttagtgttcaaaggcctgttccgcctccgcccagtttggagaacatttataaagagttgtctacagacatagaggattttgttcatcctggccatggagatttatctgggtgggccaagcaaggtgttctccttctcaacgctgtcctcacggttcgtgcccatcaagccaactctcataaggagcgaggctgggagcagttcactgatgcagttgtgtcctggctaaatcagaactcgaatggccttgttttcttgctctggggctcttatgctcagaagaagggcagtgccattgataggaagcggcaccatgtactacagacggctcatccctcccctttgtcagtgtatagagggttctttggatgtagacacttttcaaagaccaatgagctgctgcagaagtctggcaagaagcccattgactggaaggagctgtgatcatcagctgaggggtggcctttgagaagctgctgttaacgtatttgccagttacgaagttccactgaaaattttcctattaattcttaagtactctgcataagggggaaaagcttccagaaagcagccatgaaccaggctgtccaggaatggcagctgtatccaaccacaaacaacaaaggctaccctttgaccaaatgtctttctctgcaacatggcttcggcctaaaatatgcagaagacagatgaggtcaaatactcagttggctctctttatctcccttgcctttatggtgaaacaggggagatgtgcacctttcaggcacagccctagtttggcgcctgctgctccttggttttgcctggttagactttcagtgacagatgttggggtgtttttgcttagaaaggtccccttgtctcagccttgcagggcaggcatgccagtctctgccagttccactgcccccttgatctttgaaggagtcctcaggcccctcgcagcataaggatgttttgcaactttccagaatctggcccagaaattagggctcaatttcctgattgtagtagaggttaagattgctgtgagctttatcagataagagaccgagagaagtaagctgggtcttgttattccttgggtgttggtggaataagcagtggaatttgaacaaggaagaggagaaaagggaattttgtctttatggggtggggtgattttctcctagggttatgtccagttggggtttttaaggcagcacagactgccaagtactgttttttttaaccgactgaaatcactttgggatattttttcctgcaacactggaaagttttagttttttaagaagtactcatgcagatatatatatatatatttttcccagtcctttttttaagagacggtctttattgggtctgcacctccatccttgatcttgttagcaatgctgtttttgctgttagtcgggttagagttggctctacgcgaggtttgttaataaaagtttgttaaaagtt

SEQ ID NO: 325596 - DNA, 2059 bp, Homo sapiens
cgacgcacattaaggctaggtacgaggccgggtggtgcaggctagcctcgccggttcccgggtggcgcgcgttcgctgcctcctcagctccaggatgatcggccagaagacgctctactcctttttctcccccagccccgccaggaagcgacacgcccccagccccgagccggccgtccaggggaccggcgtggctggggtgcctgaggaaagcggagatgcggcggccatcccagccaagaaggccccggctgggcaggaggagcctgggacgccgccctcctcgccgctgagtgccgagcagttggaccggatccagaggaacaaggccgcggccctgctcagactcgcggcccgcaacgtgcccgtgggctttggagagagctggaagaagcacctcagcggggagttcgggaaaccgtattttatcaagctaatgggatttgttgcagaagaaagaaagcattacactgtttatccacccccacaccaagtcttcacctggacccagatgtgtgacataaaagatgtgaaggttgtcatcctgggacaggatccatatcatggacctaatcaagctcacgggctctgctttagtgttcaaaggcctgttccgcctccgcccagtttggagaacatttataaagagttgtctacagacatagaggattttgttcatcctggccatggagatttatctgggtgggccaagcaaggtgttctccttctcaacgctgtcctcacggttcgtgcccatcaagccaactctcataaggagcgaggctgggagcagttcactgatgcagttgtgtcctggctaaatcagaactcgaatggccttgttttcttgctctggggctcttatgctcagaagaagggcagtgccattgataggaagcggcaccatgtactacagacggctcatccctcccctttgtcagtgtatagagggttctttggatgtagacacttttcaaagaccaatgagctgctgcagaagtctggcaagaagcccattgactggaaggagctgtgatcatcagctgaggggtggcctttgagaagctgctgttaacgtatttgccagttacgaagttccactgaaaattttcctattaattcttaagtactctgcataagggggaaaagcttccagaaagcagccatgaaccaggctgtccaggaatggcagctgtatccaaccacaaacaacaaaggctaccctttgaccaaatgtctttctctgcaacatggcttcggcctaaaatatgcagaagacagatgaggtcaaatactcagttggctctctttatctcccttgcctttatggtgaaacaggggagatgtgcacctttcaggcacagccctagtttggcgcctgctgctccttggttttgcctggttagactttcagtgacagatgttggggtgtttttgcttagaaaggtccccttgtctcagccttgcagggcaggcatgccagtctctgccagttccactgcccccttgatctttgaaggagtcctcaggcccctcgcagcataaggatgttttgcaactttccagaatctggcccagaaattagggctcaatttcctgattgtagtagaggttaagattgctgtgagctttatcagataagagaccgagagaagtaagctgggtcttgttattccttgggtgttggtggaataagcagtggaatttgaacaaggaagaggagaaaagggaattttgtctttatggggtggggtgattttctcctagggttatgtccagttggggtttttaaggcagcacagactgccaagtactgttttttttaaccgactgaaatcactttgggatattttttcctgcaacactggaaagttttagttttttaagaagtactcatgcagatatatatatatatatttttcccagtcctttttttaagagacggtctttattgggtctgcacctccatccttgatcttgttagcaatgctgtttttgctgttagtcgggttagagttggctctacgcgaggtttgttaataaaagtttgttaaaagtt

SEQ ID NO: 325597 - DNA, 2271 bp, Homo sapiens
  misc_feature (2077)..(2077): n is a, c, g, or t
  misc_feature (2088)..(2088): n is a, c, g, or t
  misc_feature (2090)..(2090): n is a, c, g, or t
  misc_feature (2096)..(2096): n is a, c, g, or t
  misc_feature (2099)..(2099): n is a, c, g, or t
cgacgcacattaaggctaggtacgaggccgggtggtgcaggctagcctcgccggttcccgggtggcgcgcgttcgctgcctcctcagctccaggatgatcggccagaagacgctctactcctttttctcccccagccccgccaggaagcgacacgcccccagccccgagccggccgtccaggggaccggcgtggctggggtgcctgaggaaagcggagatgcggcggccatcccagccaagaaggccccggctgggcaggaggagcctgggacgccgccctcctcgccgctgagtgccgagcagttggaccggatccagaggaacaaggccgcggccctgctcagactcgcggcccgcaacgtgcccgtgggctttggagagagctggaagaagcacctcagcggggagttcgggaaaccgtattttatcaagctaatgggatttgttgcagaagaaagaaagcattacactgtttatccacccccacaccaagtcttcacctggacccagatgtgtgacataaaagatgtgaaggttgtcatcctgggacaggatccatatcatggacctaatcaagctcacgggctctgctttagtgttcaaaggcctgttccgcctccgcccagtttggagaacatttataaagagttgtctacagacatagaggattttgttcatcctggccatggagatttatctgggtgggccaagcaaggtgttctccttctcaacgctgtcctcacggttcgtgcccatcaagccaactctcataaggagcgaggctgggagcagttcactgatgcagttgtgtcctggctaaatcagaactcgaatggccttgttttcttgctctggggctcttatgctcagaagaagggcagtgccattgataggaagcggcaccatgtactacagacggctcatccctcccctttgtcagtgtatagagggttctttggatgtagacacttttcaaagaccaatgagctgctgcagaagtctggcaagaagcccattgactggaaggagctgtgatcatcagctgaggggtggcctttgagaagctgctgttaacgtatttgccagttacgaagttccactgaaaattttcctattaattcttaagtactctgcataagggggaaaagcttccagaaagcagccatgaaccaggctgtccaggaatggcagctgtatccaaccacaaacaacaaaggctaccctttgaccaaatgtctttctctgcaacatggcttcggcctaaaatatgcagaagacagatgaggtcaaatactcagttggctctctttatctcccttgcctttatggtgaaacaggggagatgtgcacctttcaggcacagccctagtttggcgcctgctgctccttggttttgcctggttagactttcagtgacagatgttggggtgtttttgcttagaaaggtccccttgtctcagccttgcagggcaggcatgccagtctctgccagttccactgcccccttgatctttgaaggagtcctcaggcccctcgcagcataaggatgttttgcaactttccagaatctggcccagaaattagggctcaatttcctgattgtagtagaggttaagattgctgtgagctttatcagataagagaccgagagaagtaagctgggtcttgttattccttgggtgttggtggaataagcagtggaatttgaacaaggaagaggagaaaagggaattttgtctttatggggtggggtgattttctcctagggttatgtccagttggggtttttaaggcagcacagactgccaagtactgttttttttaaccgactgaaatcactttgggatattttttcctgcaacactggaaagttttagttttttaagaagtactcatgcagatatatatatatatatttttcccagtcctttttttaagagacggtctttattgggtctgcacctccatccttgatcttgttagcaatgctgtttttgctgttagtcgggttagagttggctctacgcgaggtttgttaataaaagtttgttaaaagttaaaaaaaaaaaaaacaanaacaaacaaananacaaanaanacaacaagaacaaacaacaagaaaaaacaaaagaacaagaaaaaacaaccaaaaaagcagcaaagagagcaaaaaacacaaacaacaagccacaaaacgacaacgggacacacgagaaacctgaagaaacggaccaacaccagaagacagaaccaagaaaggagagagaaag

SEQ ID NO: 325598 - DNA, 2195 bp, Homo sapiens
cgacgcacattaaggctaggtacgaggccgggtggtgcaggctagcctcgccggttcccgggtggcgcgcgttcgctgcctcctcagctccaggatgatcggccagaagacgctctactcctttttctcccccagccccgccaggaagcgacacgcccccagccccgagccggccgtccaggggaccggcgtggctggggtgcctgaggaaagcggagatgcggcggccatcccagccaagaaggccccggctgggcaggaggagcctgggacgccgccctcctcgccgctgagtgccgagcagttggaccggatccagaggaacaaggccgcggccctgctcagactcgcggcccgcaacgtgcccgtgggctttggagagagctggaagaagcacctcagcggggagttcgggaaaccgtattttatcaagctaatgggatttgttgcagaagaaagaaagcattacactgtttatccacccccacaccaagtcttcacctggacccagatgtgtgacataaaagatgtgaaggttgtcatcctgggacaggatccatatcatggacctaatcaagctcacgggctctgctttagtgttcaaaggcctgttccgcctccgcccagtttggagaacatttataaagagttgtctacagacatagaggattttgttcatcctggccatggagatttatctgggtgggccaagcaaggtgttctccttctcaacgctgtcctcacggttcgtgcccatcaagccaactctcataaggagcgaggctgggagcagttcactgatgcagttgtgtcctggctaaatcagaactcgaatggccttgttttcttgctctggggctcttatgctcagaagaagggcagtgccattgataggaagcggcaccatgtactacagacggctcatccctcccctttgtcagtgtatagagggttctttggatgtagacacttttcaaagaccaatgagctgctgcagaagtctggcaagaagcccattgactggaaggagctgtgatcatcagctgaggggtggcctttgagaagctgctgttaacgtatttgccagttacgaagttccactgaaaattttcctattaattcttaagtactctgcataagggggaaaagcttccagaaagcagccatgaaccaggctgtccaggaatggcagctgtatccaaccacaaacaacaaaggctaccctttgaccaaatgtctttctctgcaacatggcttcggcctaaaatatgcagaagacagatgaggtcaaatactcagttggctctctttatctcccttgcctttatggtgaaacaggggagatgtgcacctttcaggcacagccctagtttggcgcctgctgctccttggttttgcctggttagactttcagtgacagatgttggggtgtttttgcttagaaaggtccccttgtctcagccttgcagggcaggcatgccagtctctgccagttccactgcccccttgatctttgaaggagtcctcaggcccctcgcagcataaggatgttttgcaactttccagaatctggcccagaaattagggctcaatttcctgattgtagtagaggttaagattgctgtgagctttatcagataagagaccgagagaagtaagctgggtcttgttattccttgggtgttggtggaataagcagtggaatttgaacaaggaagaggagaaaagggaattttgtctttatggggtggggtgattttctcctagggttatgtccagttggggtttttaaggcagcacagactgccaagtactgttttttttaaccgactgaaatcactttgggatattttttcctgcaacactggaaagttttagttttttaagaagtactcatgcagatatatatatatatatttttcccagtcctttttttaagagacggtctttattgggtctgcacctccatccttgatcttgttagcaatgctgtttttgctgttagtcgggttagagttggctctacgcgaggtttgttaataaaagtttgttaaaagtttcaaaccgcttcctcaacctatgtaacatctactctctctctggggggggtctggtaaacatctcttcctccaggttggggcgtcttcaaaattcaccgggggctcggtttaaaacccgtcctcaaaattgcgaaa

SEQ ID NO: 325599 - DNA, 1677 bp, Homo sapiens
cgacgcacattaaggctaggtacgaggccgggtggtgcaggctagcctcgccggttcccgggtggcgcgcgttcgctgcctcctcagctccaggatgatcggccagaagacgctctactcctttttctcccccagccccgccaggaagcgacacgcccccagccccgagccggccgtccaggggaccggcgtggctggggtgcctgaggaaagcggagatgcggcggccatcccagccaagaaggccccggctgggcaggaggagcctgggacgccgccctcctcgccgctgagtgccgagcagttggaccggatccagaggaacaaggccgcggccctgctcagactcgcggcccgcaacgtgcccgtgggctttggagagagctggaagaagcacctcagcggggagttcgggaaaccgtattttatcaagctaatgggatttgttgcagaagaaagaaagcattacactgtttatccacccccacaccaagtcttcacctggacccagatgtgtgacataaaagatgtgaaggttgtcatcctgggacaggatccatatcatggacctaatcaagctcacgggctctgctttagtgttcaaaggcctgttccgcctccgcccagtttggagaacatttataaagagttgtctacagacatagaggattttgttcatcctggccatggagatttatctgggtgggccaagcaaggtgttctccttctcaacgctgtcctcacggttcgtgcccatcaagccaactctcataaggagcgaggctgggagcagttcactgatgcagttgtgtcctggctaaatcagaactcgaatggccttgttttcttgctctggggctcttatgctcagaagaagggcagtgccattgataggaagcggcaccatgtactacagacggctcatccctcccctttgtcagtgtatagagggttctttggatgtagacactttcaggcacagccctagtttggcgcctgctgctccttggttttgcctggttagactttcagtgacagatgttggggtgtttttgcttagaaaggtccccttgtctcagccttgcagggcaggcatgccagtctctgccagttccactgcccccttgatctttgaaggagtcctcaggcccctcgcagcataaggatgttttgcaactttccagaatctggcccagaaattagggctcaatttcctgattgtagtagaggttaagattgctgtgagctttatcagataagagaccgagagaagtaagctgggtcttgttattccttgggtgttggtggaataagcagtggaatttgaacaaggaagaggagaaaagggaattttgtctttatggggtggggtgattttctcctagggttatgtccagttggggtttttaaggcagcacagactgccaagtactgttttttttaaccgactgaaatcactttgggatattttttcctgcaacactggaaagttttagttttttaagaagtactcatgcagatatatatatatatatttttcccagtcctttttttaagagacggtctttattgggtctgcacctccatccttgatcttgttagcaatgctgtttttgctgttagtcgggttagagttggctctacgcgaggtttgttaataaaagtttgttaaaagtt

SEQ ID NO: 325600 - DNA, 2162 bp, Homo sapiens
  misc_feature (1968)..(1968): n is a, c, g, or t
  misc_feature (1979)..(1979): n is a, c, g, or t
  misc_feature (1981)..(1981): n is a, c, g, or t
  misc_feature (1987)..(1987): n is a, c, g, or t
  misc_feature (1990)..(1990): n is a, c, g, or t
cgacgcacattaaggctaggtacgaggccgggtggtgcaggctagcctcgccggttcccgggtggcgcgcgttcgctgcctcctcagctccaggatgatcggccagaagacgctctactcctttttctcccccagccccgccaggaagcgacacgcccccagccccgagccggccgtccaggggaccggcgtggctggggtgcctgaggaaagcggagatgcggcggccatcccagccaagaaggccccggctgggcaggaggagcctgggacgccgccctcctcgccgctgagtgccgagcagttggaccggatccagaggaacaaggccgcggccctgctcagactcgcggcccgcaacgtgcccgtgggctttggagagagctggaagaagcacctcagcggggagttcgggaaaccgtattttatcaagctaatgggatttgttgcagaagaaagaaagcattacactgtttatccacccccacaccaagtcttcacctggacccagatgtgtgacataaaagatgtgaaggttgtcatcctgggacaggatccatatcatggacctaatcaagctcacgggctctgctttagtgttcaaaggcctgttccgcctccgcccagtttggagaacatttataaagagttgtctacagacatagaggattttgttcatcctggccatggagatttatctgggtgggccaagcaaggtgttctccttctcaacgctgtcctcacggttcgtgcccatcaagccaactctcataaggagcgaggctgggagcagttcactgatgcagttgtgtcctggctaaatcagaactcgaatggccttgttttcttgctctggggctcttatgctcagaagaagggcagtgccattgataggaagcggcaccatgtactacagacggctcatccctcccctttgtcagtgtatagagggttctttggatgtagacacttttcaaagaccaatgagctgctgcagaagtctggcaagaagcccattgactggaaggagctgtgatcatcagctgaggggtggcctttgagaagctgctgttaacgtatttgccagttacgaagttccactgaaaattttcctattaattcttaagtactctgcataagggggaaaagcttccagaaagcagccatgaaccaggctgtccaggaatggcagctgtatccaaccacaaacaacaaaggctaccctttgaccaaatgtctttctctgcaacatggcttcggcctaaaatatgcagaagacagatgaggtcaaatactcagttggctctctttatctcccttgcctttatggtgaaacaggggagatgtgcacctttcaggcacagccctagtttggcgcctgctgctccttggttttgcctggttagactttcagtgacagatgttggggtgtttttgcttagaaaggtccccttgtctcagccttgcagggcaggcatgccagtctctgccagttccactgcccccttgatctttgaaggagtcctcaggcccctcgcagcataaggatgttttgcaactttccagaatctggcccagaaattagggctcaatttcctgattgtagtagaggagaaaagggaattttgtctttatggggtggggtgattttctcctagggttatgtccagttggggtttttaaggcagcacagactgccaagtactgttttttttaaccgactgaaatcactttgggatattttttcctgcaacactggaaagttttagttttttaagaagtactcatgcagatatatatatatatatttttcccagtcctttttttaagagacggtctttattgggtctgcacctccatccttgatcttgttagcaatgctgtttttgctgttagtcgggttagagttggctctacgcgaggtttgttaataaaagtttgttaaaagttaaaaaaaaaaaaaacaanaacaaacaaananacaaanaanacaacaagaacaaacaacaagaaaaaacaaaagaacaagaaaaaacaaccaaaaaagcagcaaagagagcaaaaaacacaaacaacaagccacaaaacgacaacgggacacacgagaaacctgaagaaacggaccaacaccagaagacagaaccaagaaaggagagagaaag

SEQ ID NO: 325601 - DNA, 1507 bp, Homo sapiens
cagagttaccaatcttatgagtagcgtcatattaacttacctgaagctgacttcatgcaagtgtcggatgaatatctttattaacgatgcagacggcatagtgatgaaaacttgaattagatatcttgagcagttatgtttgaaatattttactgaacgttgagaagttctccttctcaacgctgtcctcacggttcgtgcccatcaagccaactctcataaggagcgaggctgggagcagttcactgatgcagttgtgtcctggctaaatcagaactcgaatggccttgttttcttgctctggggctcttatgctcagaagaagggcagtgccattgataggaagcggcaccatgtactacagacggctcatccctcccctttgtcagtgtatagagggttctttggatgtagacacttttcaaagaccaatgagctgctgcagaagtctggcaagaagcccattgactggaaggagctgtgatcatcagctgaggggtggcctttgagaagctgctgttaacgtatttgccagttacgaagttccactgaaaattttcctattaattcttaagtactctgcataagggggaaaagcttccagaaagcagccatgaaccaggctgtccaggaatggcagctgtatccaaccacaaacaacaaaggctaccctttgaccaaatgtctttctctgcaacatggcttcggcctaaaatatgcagaagacagatgaggtcaaatactcagttggctctctttatctcccttgcctttatggtgaaacaggggagatgtgcacctttcaggcacagccctagtttggcgcctgctgctccttggttttgcctggttagactttcagtgacagatgttggggtgtttttgcttagaaaggtccccttgtctcagccttgcagggcaggcatgccagtctctgccagttccactgcccccttgatctttgaaggagtcctcaggcccctcgcagcataaggatgttttgcaactttccagaatctggcccagaaattagggctcaatttcctgattgtagtagaggttaagattgctgtgagctttatcagataagagaccgagagaagtaagctgggtcttgttattccttgggtgttggtggaataagcagtggaatttgaacaaggaagaggagaaaagggaattttgtctttatggggtggggtgattttctcctagggttatgtccagttggggtttttaaggcagcacagactgccaagtactgttttttttaaccgactgaaatcactttgggatattttttcctgcaacactggaaagttttagttttttaagaagtactcatgcagatatatatatatatatttttcccagtcctttttttaagagacggtctttattgggtctgcacctccatccttgatcttgttagcaatgctgtttttgctgttagtcgggttagagttggctctacgcgaggtttgttaataaaagtttgttaaaagtt

SEQ ID NO: 325602 - DNA, 1255 bp, Homo sapiens
tgttgtgccaggcgtgcggtgttcgtcgcatcgcgcgacgggtttcctcctggctgacgttccttattcgtgtacaagctccgtcgcgattttcctggccctctctatttacaaggctcatccctcccctttgtcagtgtatagagggttctttggatgtagacacttttcaaagaccaatgagctgctgcagaagtctggcaagaagcccattgactggaaggagctgtgatcatcagctgaggggtggcctttgagaagctgctgttaacgtatttgccagttacgaagttccactgaaaattttcctattaattcttaagtactctgcataagggggaaaagcttccagaaagcagccatgaaccaggctgtccaggaatggcagctgtatccaaccacaaacaacaaaggctaccctttgaccaaatgtctttctctgcaacatggcttcggcctaaaatatgcagaagacagatgaggtcaaatactcagttggctctctttatctcccttgcctttatggtgaaacaggggagatgtgcacctttcaggcacagccctagtttggcgcctgctgctccttggttttgcctggttagactttcagtgacagatgttggggtgtttttgcttagaaaggtccccttgtctcagccttgcagggcaggcatgccagtctctgccagttccactgcccccttgatctttgaaggagtcctcaggcccctcgcagcataaggatgttttgcaactttccagaatctggcccagaaattagggctcaatttcctgattgtagtagaggttaagattgctgtgagctttatcagataagagaccgagagaagtaagctgggtcttgttattccttgggtgttggtggaataagcagtggaatttgaacaaggaagaggagaaaagggaattttgtctttatggggtggggtgattttctcctagggttatgtccagttggggtttttaaggcagcacagactgccaagtactgttttttttaaccgactgaaatcactttgggatattttttcctgcaacactggaaagttttagttttttaagaagtactcatgcagatatatatatatatatttttcccagtcctttttttaagagacggtctttattgggtctgcacctccatccttgatcttgttagcaatgctgtttttgctgttagtcgggttagagttggctctacgcgaggtttgttaataaaagtttgttaaaagtt

SEQ ID NO: 325603 - DNA, 1002 bp, Homo sapiens
  misc_feature (966)..(966): n is a, c, g, or t
  misc_feature (971)..(971): n is a, c, g, or t
agcggggggtacgcggtggggcgggtctggcgggggcggggcacctctgtgcagggttcccagtcaccgcgacgctcctcgggaagccatagggcgcctcccagcccgtctccccgctccagtttagaacctaattcccaattcccggaccgggcccagccctgggctcttactgtccgcttttgctgggacctgttccacaaatgggcgtcttctgccttgggccgtgggggttgggccggaagctgcggacgcctgggaaggggccgctgcagctcttgagccgcctctgcggggaccacttgcaggccatcccagccaagaaggccccggctgggcaggaggagcctgggacgccgccctcctcgccgctgagtgccgagcagttggaccggatccagaggaacaaggccgcggccctgctcagactcgcggcccgcaacgtgcccgtgggctttggagagagctggaagaagcacctcagcggggagttcgggaaaccgtattttatcaagctaatgggatttgttgcagaagaaagaaagcattacactgtttatccacccccacaccaagtcttcacctggacccagatgtgtgacataaaagatgtgaaggttgtcatcctgggacaggatccatatcatggacctaatcaagctcacgggctctgctttagtgttcaaaggcctgttccgcctccgcccagtttggagaacatttataaagagttgtctacagacatagaggattttgttcatcctggccatggagatttatctgggtgggccaagcaaggtgttctccttctcaacgctgtcctcacggttcgtgcccatcaagccaactctcataaggagcgaggctgggagcagttcactgatgcagttgtgtcctggctaaatcagaactcgaatggccttgttttcttgctctggggctcttatgctcagactcctttgcagngatanagggtctttgatgtgacactttcaagaccag

SEQ ID NO: 325604 - DNA, 672 bp, Homo sapiens
atgccatagaagtgttttatttgttttgtttatgtttgtttgaggcagggtctgtgctgcttacattacagtattgtttaattcctgacccctggtggttcacaggtgaaggttgtcatcctgggacaggatccatatcatggacctaatcaagctcacgggctctgctttagtgttcaaaggcctgttccgcctccgcccaggtacagttgctttacaggtgactgcagtccagacatgattcctttcagatgtgtacttagcttattacaagtgggactatctggggcactgttcactagccttggaggaggatttctcggcctcagcaccattgacatttggggctgagtcattctttgttgtggaggaggagaggagtcctgtgctattgcaggatcttgtgccacatccctggcctctaccactggaaaccaggagcaacccccagctcgtgataatgaaaaatgtgcagacattgccaaaagtcccttgggggcgtaaaatcacccctggttaagaaccactgctttgggccgggcgcggtgactcacgcctgtaatcccagcactttgggaggctgaggcaggagaatcgctggatcccgggaggcggaggtggcagtgagccgagatcctgctactgcactctagcctgggtgacacagcaaga

SEQ ID NO: 325605 - DNA, 777 bp, Homo sapiens
  misc_feature (19)..(19): n is a, c, g, or t
  misc_feature (41)..(41): n is a, c, g, or t
  misc_feature (761)..(761): n is a, c, g, or t
  misc_feature (765)..(765): n is a, c, g, or t
acggtcagtaccccccggnttatgtagcgaggctgggtggngcaggctagcctcgccggttcccgggtggcgcgcgttcgctgcctcctcagctccaggatgatcggccagaagacgctctactcctttttctcccccagccccgccaggaagcgacacgcccccagccccgagccggccgtccaggggaccggcgtggctggggtgcctgaggaaagcggagatgcggcggccatcccagccaagaaggccccggctgggcaggaggagcctgggacgccgccctcctcgccgctgagtgccgagcagttggaccggatccagaggaacaaggccgcggccctgctcagactcgcggcccgcaacgtgcccgtgggctttggagagagctggaagaagcacctcagcggggagttcgggaaaccgtattttatcaagctaatgggatttgttgcagaagaaagaaagcattacactgtttatccacccccacaccaagtcttcacctggacccagatgtgtgacataaaagatgtgaaggttgtcatcctgggacaggatccatatcatggacctaatcaagctcacgggctctgctttagtgttcaaaggcctgttccgcctccgcccagtttggagaacatttataaagagttgtctacagacatagaggattttgttcatcctggccatggagatttatctgggtgggccaagcaaggtgtctcttctcagcgtctcacggtcgtgccataagcaantctnaggggagtggag

SEQ ID NO: 325606 - DNA, 2064 bp, Homo sapiens
  misc_feature (19)..(19): n is a, c, g, or t
  misc_feature (41)..(41): n is a, c, g, or t
acggtcagtaccccccggnttatgtagcgaggctgggtggngcaggctagcctcgccggttcccgggtggcgcgcgttcgctgcctcctcagctccaggatgatcggccagaagacgctctactcctttttctcccccagccccgccaggaagcgacacgcccccagccccgagccggccgtccaggggaccggcgtggctggggtgcctgaggaaagcggagatgcggcggccatcccagccaagaaggccccggctgggcaggaggagcctgggacgccgccctcctcgccgctgagtgccgagcagttggaccggatccagaggaacaaggccgcggccctgctcagactcgcggcccgcaacgtgcccgtgggctttggagagagctggaagaagcacctcagcggggagttcgggaaaccgtattttatcaagctaatgggatttgttgcagaagaaagaaagcattacactgtttatccacccccacaccaagtcttcacctggacccagatgtgtgacataaaagatgtgaaggttgtcatcctgggacaggatccatatcatggacctaatcaagctcacgggctctgctttagtgttcaaaggcctgttccgcctccgcccagtttggagaacatttataaagagttgtctacagacatagaggattttgttcatcctggccatggagatttatctgggtgggccaagcaaggtgttctccttctcaacgctgtcctcacggttcgtgcccatcaagccaactctcataaggagcgaggctgggagcagttcactgatgcagttgtgtcctggctaaatcagaactcgaatggccttgttttcttgctctggggctcttatgctcagaagaagggcagtgccattgataggaagcggcaccatgtactacagacggctcatccctcccctttgtcagtgtatagagggttctttggatgtagacacttttcaaagaccaatgagctgctgcagaagtctggcaagaagcccattgactggaaggagctgtgatcatcagctgaggggtggcctttgagaagctgctgttaacgtatttgccagttacgaagttccactgaaaattttcctattaattcttaagtactctgcataagggggaaaagcttccagaaagcagccatgaaccaggctgtccaggaatggcagctgtatccaaccacaaacaacaaaggctaccctttgaccaaatgtctttctctgcaacatggcttcggcctaaaatatgcagaagacagatgaggtcaaatactcagttggctctctttatctcccttgcctttatggtgaaacaggggagatgtgcacctttcaggcacagccctagtttggcgcctgctgctccttggttttgcctggttagactttcagtgacagatgttggggtgtttttgcttagaaaggtccccttgtctcagccttgcagggcaggcatgccagtctctgccagttccactgcccccttgatctttgaaggagtcctcaggcccctcgcagcataaggatgttttgcaactttccagaatctggcccagaaattagggctcaatttcctgattgtagtagaggttaagattgctgtgagctttatcagataagagaccgagagaagtaagctgggtcttgttattccttgggtgttggtggaataagcagtggaatttgaacaaggaagaggagaaaagggaattttgtctttatggggtggggtgattttctcctagggttatgtccagttggggtttttaaggcagcacagactgccaagtactgttttttttaaccgactgaaatcactttgggatattttttcctgcaacactggaaagttttagttttttaagaagtactcatgcagatatatatatatatatttttcccagtcctttttttaagagacggtctttattgggtctgcacctccatccttgatcttgttagcaatgctgtttttgctgttagtcgggttagagttggctctacgcgaggtttgttaataaaagtttgttaaaagtt

SEQ ID NO: 325607 - DNA, 2082 bp, Homo sapiens
agcggggggtacgcggtggggcgggtctggcgggggcggggcacctctgtgcagggttcccagtcaccgcgacgctcctcgggaagccatagggcgcctcccagcccgtctccccgctccagtttagaacctaattcccaattcccggaccgggcccagccctgggctcttactgtccgcttttgctgggacctgttccacaaatgggcgtcttctgccttgagccgcctctgcggggaccacttgcaggccatcccagccaagaaggccccggctgggcaggaggagcctgggacgccgccctcctcgccgctgagtgccgagcagttggaccggatccagaggaacaaggccgcggccctgctcagactcgcggcccgcaacgtgcccgtgggctttggagagagctggaagaagcacctcagcggggagttcgggaaaccgtattttatcaagctaatgggatttgttgcagaagaaagaaagcattacactgtttatccacccccacaccaagtcttcacctggacccagatgtgtgacataaaagatgtgaaggttgtcatcctgggacaggatccatatcatggacctaatcaagctcacgggctctgctttagtgttcaaaggcctgttccgcctccgcccagtttggagaacatttataaagagttgtctacagacatagaggattttgttcatcctggccatggagatttatctgggtgggccaagcaaggtgttctccttctcaacgctgtcctcacggttcgtgcccatcaagccaactctcataaggagcgaggctgggagcagttcactgatgcagttgtgtcctggctaaatcagaactcgaatggccttgttttcttgctctggggctcttatgctcagaagaagggcagtgccattgataggaagcggcaccatgtactacagacggctcatccctcccctttgtcagtgtatagagggttctttggatgtagacacttttcaaagaccaatgagctgctgcagaagtctggcaagaagcccattgactggaaggagctgtgatcatcagctgaggggtggcctttgagaagctgctgttaacgtatttgccagttacgaagttccactgaaaattttcctattaattcttaagtactctgcataagggggaaaagcttccagaaagcagccatgaaccaggctgtccaggaatggcagctgtatccaaccacaaacaacaaaggctaccctttgaccaaatgtctttctctgcaacatggcttcggcctaaaatatgcagaagacagatgaggtcaaatactcagttggctctctttatctcccttgcctttatggtgaaacaggggagatgtgcacctttcaggcacagccctagtttggcgcctgctgctccttggttttgcctggttagactttcagtgacagatgttggggtgtttttgcttagaaaggtccccttgtctcagccttgcagggcaggcatgccagtctctgccagttccactgcccccttgatctttgaaggagtcctcaggcccctcgcagcataaggatgttttgcaactttccagaatctggcccagaaattagggctcaatttcctgattgtagtagaggttaagattgctgtgagctttatcagataagagaccgagagaagtaagctgggtcttgttattccttgggtgttggtggaataagcagtggaatttgaacaaggaagaggagaaaagggaattttgtctttatggggtggggtgattttctcctagggttatgtccagttggggtttttaaggcagcacagactgccaagtactgttttttttaaccgactgaaatcactttgggatattttttcctgcaacactggaaagttttagttttttaagaagtactcatgcagatatatatatatatatttttcccagtcctttttttaagagacggtctttattgggtctgcacctccatccttgatcttgttagcaatgctgtttttgctgttagtcgggttagagttggctctacgcgaggtttgttaataaaagtttgttaaaagtt

SEQ ID NO: 325608 - DNA, 2092 bp, Homo sapiens
agcggggggtacgcggtggggcgggtctggcgggggcggggcacctctgtgcagggttcccagtcaccgcgacgctcctcgggaagccatagggcgcctcccagcccgtctccccgctccagtttagaacctaattcccaattcccggaccgggcccagccctgggctcttactgtccgcttttgctgggacctgttccacaaatgggcgtcttctgccttgggccgtgggggttgggccggaagctgcggacgcctgggaaggggccgctgcagctcttgagccgcctctgcggggaccacttgcaggccatcccagccaagaaggccccggctgggcaggaggagcctgggacgccgccctcctcgccgctgagtgccgagcagttggaccggatccagaggaacaaggccgcggccctgctcagactcgcggcccgcaacgtgcccgtgggctttggagagagctggaagaagcacctcagcggggagttcgggaaaccgtattttatcaagctaatgggatttgttgcagaagaaagaaagcattacactgtttatccacccccacaccaagtcttcacctggacccagatgtgtgacataaaagatctcacgggctctgctttagtgttcaaaggcctgttccgcctccgcccagtttggagaacatttataaagagttgtctacagacatagaggattttgttcatcctggccatggagatttatctgggtgggccaagcaaggtgttctccttctcaacgctgtcctcacggttcgtgcccatcaagccaactctcataaggagcgaggctgggagcagttcactgatgcagttgtgtcctggctaaatcagaactcgaatggccttgttttcttgctctggggctcttatgctcagaagaagggcagtgccattgataggaagcggcaccatgtactacagacggctcatccctcccctttgtcagtgtatagagggttctttggatgtagacacttttcaaagaccaatgagctgctgcagaagtctggcaagaagcccattgactggaaggagctgtgatcatcagctgaggggtggcctttgagaagctgctgttaacgtatttgccagttacgaagttccactgaaaattttcctattaattcttaagtactctgcataagggggaaaagcttccagaaagcagccatgaaccaggctgtccaggaatggcagctgtatccaaccacaaacaacaaaggctaccctttgaccaaatgtctttctctgcaacatggcttcggcctaaaatatgcagaagacagatgaggtcaaatactcagttggctctctttatctcccttgcctttatggtgaaacaggggagatgtgcacctttcaggcacagccctagtttggcgcctgctgctccttggttttgcctggttagactttcagtgacagatgttggggtgtttttgcttagaaaggtccccttgtctcagccttgcagggcaggcatgccagtctctgccagttccactgcccccttgatctttgaaggagtcctcaggcccctcgcagcataaggatgttttgcaactttccagaatctggcccagaaattagggctcaatttcctgattgtagtagaggttaagattgctgtgagctttatcagataagagaccgagagaagtaagctgggtcttgttattccttgggtgttggtggaataagcagtggaatttgaacaaggaagaggagaaaagggaattttgtctttatggggtggggtgattttctcctagggttatgtccagttggggtttttaaggcagcacagactgccaagtactgttttttttaaccgactgaaatcactttgggatattttttcctgcaacactggaaagttttagttttttaagaagtactcatgcagatatatatatatatatttttcccagtcctttttttaagagacggtctttattgggtctgcacctccatccttgatcttgttagcaatgctgtttttgctgttagtcgggttagagttggctctacgcgaggtttgttaataaaagtttgttaaaagtt

SEQ ID NO: 325609 - DNA, 1950 bp, Homo sapiens
cgacgcacattaaggctaggtacgaggccgggtggtgcaggctagcctcgccggttcccgggtggcgcgcgttcgctgcctcctcagctccaggatgatcggccagaagacgctctactcctttttctcccccagccccgccaggaagcgacacgcccccagccccgagccggccgtccaggggaccggcgtggctggggtgcctgaggaaagcggagatgcggcggccatcccagccaagaaggccccggctgggcaggaggagcctgggacgccgccctcctcgccgctgagtgccgagcagttggaccggatccagaggaacaaggccgcggccctgctcagactcgcggcccgcaacgtgcccgtgggctttggagagagctggaagaagcacctcagcggggagttcgggaaaccgtattttatcaagctaatgggatttgttgcagaagaaagaaagcattacactgtttatccacccccacaccaagtcttcacctggacccagatgtgtgacataaaagatgtgaaggttgtcatcctgggacaggatccatatcatggacctaatcaagctcacgggctctgctttagtgttcaaaggcctgttccgcctccgcccagtttggagaacatttataaagagttgtctacagacatagaggattttgttcatcctggccatggagatttatctgggtgggccaagcaaggtgttctccttctcaacgctgtcctcacggttcgtgcccatcaagccaactctcataaggagcgaggctgggagcagttcactgatgcagttgtgtcctggctaaatcagaactcgaatggccttgttttcttgctctggggctcttatgctcagaagaagggcagtgccattgataggaagcggcaccatgtactacagacggctcatccctcccctttgtcagtgtatagagggttctttggatgtagacacttttcaaagaccaatgagctgctgcagaagtctggcaagaagcccattgactggaaggagctgtgatcatcagctgaggggtggcctttgagaagctgctgttaacgtatttgccagttacgaagttccactgaaaattttcctattaattcttaagtactctgcataagggggaaaagcttccagaaagcagccatgaaccaggctgtccaggaatggcagctgtatccaaccacaaacaacaaaggctaccctttgaccaaatgtctttctctgcaacatggcttcggcctaaaatatgcagaagacagatgaggtcaaatactcagttggctctctttatctcccttgcctttatggtgaaacaggggagatgtgcacctttcaggcacagccctagtttggcgcctgctgctccttggttttgcctggttagactttcagtgacagatgttggggtgtttttgcttagaaaggtccccttgtctcagccttgcagggcaggcatgccagtctctgccagttccactgcccccttgatctttgaaggagtcctcaggcccctcgcagcataaggatgttttgcaactttccagaatctggcccagaaattagggctcaatttcctgattgtagtagaggagaaaagggaattttgtctttatggggtggggtgattttctcctagggttatgtccagttggggtttttaaggcagcacagactgccaagtactgttttttttaaccgactgaaatcactttgggatattttttcctgcaacactggaaagttttagttttttaagaagtactcatgcagatatatatatatatatttttcccagtcctttttttaagagacggtctttattgggtctgcacctccatccttgatcttgttagcaatgctgtttttgctgttagtcgggttagagttggctctacgcgaggtttgttaataaaagtttgttaaaagtt

SEQ ID NO: 325610 - DNA, 1735 bp, Homo sapiens
cgacgcacattaaggctaggtacgaggccgggtggtgcaggctagcctcgccggttcccgggtggcgcgcgttcgctgcctcctcagctccaggatgatcggccagaagacgctctactcctttttctcccccagccccgccaggaagcgacacgcccccagccccgagccggccgtccaggggaccggcgtggctggggtgcctgaggaaagcggagatgcggcggccatcccagccaagaaggccccggctgggcaggaggagcctgggacgccgccctcctcgccgctgagtgccgagcagttggaccggatccagaggaacaaggccgcggccctgctcagactcgcggcccgcaacgtgcccgtgggctttggagagagctggaagaagcacctcagcggggagttcgggaaaccgtattttatcaagctaatgggatttgttgcagaagaaagaaagcattacactgtttatccacccccacaccaagtcttcacctggacccagatgtgtgacataaaagatgtgaaggttgtcatcctgggacaggatccatatcatggacctaatcaagctcacgggctctgctttagtgttcaaaggcctgttccgcctccgcccagtttggagaacatttataaagagttgtctacagacatagaggattttgttcatcctggccatggagatttatctgggtgggccaagcaaggtgttctccttctcaacgctgtcctcacggttcgtgcccatcaagccaactctcataaggagcgaggctgggagcagttcactgatgcagttgtgtcctggctaaatcagaactcgaatggccttgttttcttgctctggggctcttatgctcagaagaagggcagtgccattgataggaagcggcaccatgtactacagacggctcatccctcccctttgtcagtgtatagagggttctttggatgtagacacttttcaaagaccaatgagctgctgcagaagtctggcaagaagcccattgactggaaggagctgtgatcatcagctgaggggtggcctttgagaagctgctgttaacgtatttgccagttacgaagttccactgaaaattttcctattaattcttaagtactctgcataagggggaaaagcttccagaaagcagccatgaaccaggctgtccaggaatggcagctgtatccaaccacaaacaacaaaggctaccctttgaccaaatgtctttctctgcaacatggcttcggcctaaaatatgcagaagacagatgaggtcaaatactcagttggctctctttatctcccttgcctttatggtgaaacaggggagatgtgcacctttcaggcacagccctagtttggcgcctgctgctccttggttttgcctggttagactttcagtgacagatgttggggtgattttctcctagggttatgtccagttggggtttttaaggcagcacagactgccaagtactgttttttttaaccgactgaaatcactttgggatattttttcctgcaacactggaaagttttagttttttaagaagtactcatgcagatatatatatatatatttttcccagtcctttttttaagagacggtctttattgggtctgcacctccatccttgatcttgttagcaatgctgtttttgctgttagtcgggttagagttggctctacgcgaggtttgttaataaaagtttgttaaaagtt

SEQ ID NO: 325611 - DNA, 772 bp, Homo sapiens
  misc_feature (756)..(756): n is a, c, g, or t
  misc_feature (760)..(760): n is a, c, g, or t
cgacgcacattaaggctaggtacgaggccgggtggtgcaggctagcctcgccggttcccgggtggcgcgcgttcgctgcctcctcagctccaggatgatcggccagaagacgctctactcctttttctcccccagccccgccaggaagcgacacgcccccagccccgagccggccgtccaggggaccggcgtggctggggtgcctgaggaaagcggagatgcggcggccatcccagccaagaaggccccggctgggcaggaggagcctgggacgccgccctcctcgccgctgagtgccgagcagttggaccggatccagaggaacaaggccgcggccctgctcagactcgcggcccgcaacgtgcccgtgggctttggagagagctggaagaagcacctcagcggggagttcgggaaaccgtattttatcaagctaatgggatttgttgcagaagaaagaaagcattacactgtttatccacccccacaccaagtcttcacctggacccagatgtgtgacataaaagatgtgaaggttgtcatcctgggacaggatccatatcatggacctaatcaagctcacgggctctgctttagtgttcaaaggcctgttccgcctccgcccagtttggagaacatttataaagagttgtctacagacatagaggattttgttcatcctggccatggagatttatctgggtgggccaagcaaggtgtctcttctcagcgtctcacggtcgtgccataagcaantctnaggggagtggag

SEQ ID NO: 325612 - DNA, 361 bp, Homo sapiens
agctaaggatccagttaggacctggaacatctgggcaggtgggaaggaggagtcataaggtctgcagacagtgagtgactctcccatgctgccttgggcaaattctaagcatcgctgcaccaagagagactctgagatctccaataaatgcaaccttaatcaatacaacacgaggctcaagcctggggtgctgctgccatgcccttccgagctgggtatctgccaagtttccaccatgtgcctcaaaacaaaggggcctccagaagctttctgcttataacttgtgcatgcctttggtaagagatgttcaaagtctaccctcttccaaaacaaagaggacttccagaataggcatccagcc

SEQ ID NO: 325613 - DNA, 3478 bp, Homo sapiens
  misc_feature (1841)..(1841): n is a, c, g, or t
gcggccgccatggacgagcaggcgggtcccggcgtcttcttcagcaacaaccacccgggcgccggcggtgccaaggggctcgggcctctggcggaggctgccgcggccggcgacggggcggctgcggcgggggcggcccgagcccagtacagtctcccggggatcctgcacttcctgcagcacgagtgggcccgcttcgaggtggagagagcccagtgggaggtggagcgggcggagctgcaggcccagattgccttcctgcagggagaaaggaagggccaagaaaatttgaagaaggatcttgtgaggaggatcaaaatgttggagtatgctcttaaacaggaaagagccaaataccacaagttgaaatacgggacagaattgaatcagggagatatgaagcctccaagctatgattctgatgaaggtaatgaaacagaagtgcagccacaacaaaacagccagttaatgtggaaacaaggtcgacaactactcagacagtatctacaggaggtgggttatacagatactattctagatgtgaaatctaaacgagtgcgagctttgttgggcttttcaagtgatgtcacggacagggaagatgacaaaaatcaggactcagttgtaaatggcacagaggctgaagttaaagagacagcaatgattgcaaaatctgagttaacagattctgcctccgtgctggataatttcaaattccttgaaagtgcagctgcagatttcagtgatgaagatgaagatgatgatgttgatggaagagagaaaagcgtcattgatacttcaacaattgttaggaaaaaagcattgcctgacagcggtgaagatcgagatacaaaagaagctctaaaggagtttgacttcttggttacatcagaggaaggagacaatgaatctagaagtgcaggcgatggaacagactgggaaaaggaagaccagtgtctcatgcctgaagcctggaatgtggaccagggagtaattaccaaactcaaggaacaatacaaaaaggagagaaaggggaaaaagggggtgaagaggcccaataggtcaaaactacaagatatgcttgctaatttgagagatgttgatgaacttccttcattgcagccatctgtgggttcaccttccagacccagcagctccaggcttcctgaacatgaaattaatagggcagatgaagtggaagcattgacatttcctccttcttctggaaagtcattcatcatgggagcagatgaagcccttgaaagtgaactgggacttggagaactagcaggccttacggtggccaatgaagcagactcactaacttatgatatagcaaacaataaagatgcattgaggaagacatggaaccctaagtttacattgagaagtcactttgatggcatccgagcccttgctttccatcccattgagcctgttttgataacagcatcagaggatcacacattaaaaatgtggaatttacagaaaacagccccagccaaaaagagcacttctcttgatgtagaacctatctatacattcagagcccataaaggtccagtgctttgtgtggtaatgagcagcaatggtgagcagtgttacagtggtggtactgatggactgatccagggctggaataccactaatcccaacatcgacccctatgattcttatgatccttctgttttacgaggccctctgctaggccacacggatgcagtctggggtttggcttatagtgcagcacatcagcgtttgttgtcctgttcagcagatggcactctgcgtttatggaatacaactgaggttgctccagcactaagtgtatttaatgatantaaagaactgggaatccctgcctctgtggatctagtgagcagtgacccgagccatatggtagcatcattcagcaagggatatacaagcatttttaacatggaaacacaacaacgcattctcactttagaatccaatgtagatacaacagccaactcttcctgccaaataaatagagtcatcagtcatcctactctttcgatcagcatcactgctcatgaagacaggcacatcaaattctatgataacaatacaggcaaactgatccactcgatggtagcccacctagaagctgttacaagtttagcagttgatcccaatggcctttacttgatgtctggcagtcatgactgttcaatacgtttatggaatctagaaagtaagacgtgtatccaagaattcacagctcatcgaaaaaagtttgaagaatcgattcatgatgtagctttccacccatccaaatgctatatagccagtgctggagctgacgcactggctaaagtctttgtatgacgcaatgcatcatcttcaccttctagctgtttataagtaatcaactgcacacaagagatacagaagacgagggcaagaatcatctcgtcctgcccttttgttctgctgaaggagcacagagaacatttgttgaagtatagttttgcaattcatatactgttttctaaaactaaggtttgttcaggttgctgcaagctcagctgaatctgtgagcctgaggtctgtttcaaatttctccccaataggcgcctttatttctgaggtggttctaattcgctaggcaggcctgagcgaatacaagtttagcttgtccctgttgagtaagtagggcatgctacaatggataatttaaaagcttgatagctgggactgaatagaagaaaacgggaaacttagaccaagttctcccctgagaaatcttgttaaaacacattaagtagtcaaaatagtaatctttatcatatctgccatattaacccctttgtgtataatgaccaggcagtgttaaactgagtttttaatttgactctcctttcagctgttcacataaagcacctggcaaagcattttacctgttagggggagaaaaatgcaataatatgttaaatatattattattcagaaatgctagacaaatagtttgcaagcagatttctatattgtattacagttttgaaaacagatttggtatcattctaaagtttagctatcaagcactcaccattgtgaagaatagttgatcgactctgcttttactaacagatttaacttattcaggtttgaaattctgtttatttttaagggtaaacagggcatatctctttaataatttctattttaaaattcactttattcatgtgacatttatagtaccagagtgattatttcataccaatgaaatcttacttttcagtgactgaaaagatagaatttatttgctaataatcatttatcaacacccacctaatcatgcttcagatgatctgtgctctttcttctttgtcacgttcaagttatctgacatctaccaagaacagttcataattattaatagcccaaagagtatggttaacttcacgcagctgcttttgcagaagcactaataaaaacaaatattttgtaccct

SEQ ID NO: 325614 - DNA, 5142 bp, Homo sapiens
  misc_feature (1841)..(1841): n is a, c, g, or t
gcggccgccatggacgagcaggcgggtcccggcgtcttcttcagcaacaaccacccgggcgccggcggtgccaaggggctcgggcctctggcggaggctgccgcggccggcgacggggcggctgcggcgggggcggcccgagcccagtacagtctcccggggatcctgcacttcctgcagcacgagtgggcccgcttcgaggtggagagagcccagtgggaggtggagcgggcggagctgcaggcccagattgccttcctgcagggagaaaggaagggccaagaaaatttgaagaaggatcttgtgaggaggatcaaaatgttggagtatgctcttaaacaggaaagagccaaataccacaagttgaaatacgggacagaattgaatcagggagatatgaagcctccaagctatgattctgatgaaggtaatgaaacagaagtgcagccacaacaaaacagccagttaatgtggaaacaaggtcgacaactactcagacagtatctacaggaggtgggttatacagatactattctagatgtgaaatctaaacgagtgcgagctttgttgggcttttcaagtgatgtcacggacagggaagatgacaaaaatcaggactcagttgtaaatggcacagaggctgaagttaaagagacagcaatgattgcaaaatctgagttaacagattctgcctccgtgctggataatttcaaattccttgaaagtgcagctgcagatttcagtgatgaagatgaagatgatgatgttgatggaagagagaaaagcgtcattgatacttcaacaattgttaggaaaaaagcattgcctgacagcggtgaagatcgagatacaaaagaagctctaaaggagtttgacttcttggttacatcagaggaaggagacaatgaatctagaagtgcaggcgatggaacagactgggaaaaggaagaccagtgtctcatgcctgaagcctggaatgtggaccagggagtaattaccaaactcaaggaacaatacaaaaaggagagaaaggggaaaaagggggtgaagaggcccaataggtcaaaactacaagatatgcttgctaatttgagagatgttgatgaacttccttcattgcagccatctgtgggttcaccttccagacccagcagctccaggcttcctgaacatgaaattaatagggcagatgaagtggaagcattgacatttcctccttcttctggaaagtcattcatcatgggagcagatgaagcccttgaaagtgaactgggacttggagaactagcaggccttacggtggccaatgaagcagactcactaacttatgatatagcaaacaataaagatgcattgaggaagacatggaaccctaagtttacattgagaagtcactttgatggcatccgagcccttgctttccatcccattgagcctgttttgataacagcatcagaggatcacacattaaaaatgtggaatttacagaaaacagccccagccaaaaagagcacttctcttgatgtagaacctatctatacattcagagcccataaaggtccagtgctttgtgtggtaatgagcagcaatggtgagcagtgttacagtggtggtactgatggactgatccagggctggaataccactaatcccaacatcgacccctatgattcttatgatccttctgttttacgaggccctctgctaggccacacggatgcagtctggggtttggcttatagtgcagcacatcagcgtttgttgtcctgttcagcagatggcactctgcgtttatggaatacaactgaggttgctccagcactaagtgtatttaatgatantaaagaactgggaatccctgcctctgtggatctagtgagcagtgacccgagccatatggtagcatcattcagcaagggatatacaagcatttttaacatggaaacacaacaacgcattctcactttagaatccaatgtagatacaacagccaactcttcctgccaaataaatagagtcatcagtcatcctactctttcgatcagcatcactgctcatgaagacaggcacatcaaattctatgataacaatacaggcaaactgatccactcgatggtagcccacctagaagctgttacaagtttagcagttgatcccaatggcctttacttgatgtctggcagtcatgactgttcaatacgtttatggaatctagaaagtaagacgtgtatccaagaattcacagctcatcgaaaaaagtttgaagaatcgattcatgatgtagctttccacccatccaaatgctatatagccagtgctggagctgacgcactggctaaagtctttgtatgacgcaatgcatcatcttcaccttctagctgtttataagtaatcaactgcacacaagagatacagaagacgagggcaagaatcatctcgtcctgcccttttgttctgctgaaggagcacagagaacatttgttgaagtatagttttgcaattcatatactgttttctaaaactaaggtttgttcaggttgctgcaagctcagctgaatctgtgagcctgaggtctgtttcaaatttctccccaataggcgcctttatttctgaggtggttctaattcgctaggcaggcctgagcgaatacaagtttagcttgtccctgttgagtaagtagggcatgctacaatggataatttaaaagcttgatagctgggactgaatagaagaaaacgggaaacttagaccaagttctcccctgagaaatcttgttaaaacacattaagtagtcaaaatagtaatctttatcatatctgccatattaacccctttgtgtataatgaccaggcagtgttaaactgagtttttaatttgactctcctttcagctgttcacataaagcacctggcaaagcattttacctgttagggggagaaaaatgcaataatatgttaaatatattattattcagaaatgctagacaaatagtttgcaagcagatttctatattgtattacagttttgaaaacagatttggtatcattctaaagtttagctatcaagcactcaccattgtgaagaatagttgatcgactctgcttttactaacagatttaacttattcaggtttgaaattctgtttatttttaagggtaaacagggcatatctctttaataatttctattttaaaattcactttattcatgtgacatttatagtaccagagtgattatttcataccaatgaaatcttacttttcagtgactgaaaagatagaatttatttgctaataatcatttatcaacacccacctaatcatgcttcagatgatctgtgctctttcttctttgtcacgttcaagttatctgacatctaccaagaacagttcataattattaatagcccaaagagtatggttaacttcacgcagctgcttttgcagaagcactaataaaaacaaatattttgtaccctagaagtcctctattaatccctgtaagaatctcctggaaacctggatgaaagagtttaatgccaaatattggctaacaagttctgtctttctctctccctattcctcccccattgtttaattgagatatacatgttttaatgggcagtggatcagtattgtttctggggaaatccacaccttaaaaggccaggcttccccagcccaacttacctgtgacccacctacatgtgttcaccttttgggattctgaagaccctgctatctagacctagtctcctgtcataaagacattatttctatagtggtttatgtctctcttactctttgtcccaaatgacagagaccaatctagaaattggaaataaattattaacgtccaactttccaccaaaaaacatataaataggctcttagattttaaaaatattaaatctatagatattttaaccaattaaaacaatttctacatattccattccccacattttccatcgtcataacaatgatgcttctcatgatatgtacatctactccttggaaaaagtattctggtggtggtgtggctaatgattgacaaatatttctgtaaaatttctgcctgtttgcctctagaattctgcattatacaggcaaattttctttaaagctagagacttgtgctaaatttgcctgattttcatacagatatgctgtagtaatacagctaccttttcatttcatctttgtgctttggttaacaagcaggctcaagagactgctttgtgtaattaaatgaattgacctaaacatgagctgtcaggtgaatacttaatatttccatgcagatacagaattccatattgtgttcagtaaatttcttttggttcttcacagtgaagaaagaatgtttctaacctaacatttgtagaaggatactggaaaattccttccaggaaggaagggaaggaagatgccattacttggtgtatttatgatgggatgaccacaaagctattgttctaccagttattaattaccttctaagatcttcagttactgctttattaatgtcactgaaattctaaaaaccaggacattcttcccccgttcattttatgcttcatggttgaaatttttctgtcagtgagtggaaaataaccatgagatacatagactgtagcgcaaatggaactgttgaaagttccttagaaagccagtgctgtggcattggagactacggagagagtcttctctaccagcactgcatgatctcagcctagaaatgagccaaagctgtcttccaaccagagtagcatatacatgtgtctgacttttcccctagcctgttgaacattcaatgaaaattcacagaatgaacaaattcaatgtttaaacagccattgaaatgctttcatagtgcttcatttgtaaatattttgtttgaaatgtattggaatagtatgaaaattagcgggaggtttggatccctgccttattttcatatgctgtggatacatctctgggagcttgcagcacccttctcaaaactcaactgtcatatggagctcatttgctactcaaaccatagacagattatttaacaaaagtgatataatgaccttcagtatttttctattgaacaagtttaacaacttttgccattaaacaaatacttagttatgca

SEQ ID NO: 325615 - DNA, 4158 bp, Homo sapiens
  misc_feature (1841)..(1841): n is a, c, g, or t
  misc_feature (4094)..(4094): n is a, c, g, or t
  misc_feature (4122)..(4122): n is a, c, g, or t
gcggccgccatggacgagcaggcgggtcccggcgtcttcttcagcaacaaccacccgggcgccggcggtgccaaggggctcgggcctctggcggaggctgccgcggccggcgacggggcggctgcggcgggggcggcccgagcccagtacagtctcccggggatcctgcacttcctgcagcacgagtgggcccgcttcgaggtggagagagcccagtgggaggtggagcgggcggagctgcaggcccagattgccttcctgcagggagaaaggaagggccaagaaaatttgaagaaggatcttgtgaggaggatcaaaatgttggagtatgctcttaaacaggaaagagccaaataccacaagttgaaatacgggacagaattgaatcagggagatatgaagcctccaagctatgattctgatgaaggtaatgaaacagaagtgcagccacaacaaaacagccagttaatgtggaaacaaggtcgacaactactcagacagtatctacaggaggtgggttatacagatactattctagatgtgaaatctaaacgagtgcgagctttgttgggcttttcaagtgatgtcacggacagggaagatgacaaaaatcaggactcagttgtaaatggcacagaggctgaagttaaagagacagcaatgattgcaaaatctgagttaacagattctgcctccgtgctggataatttcaaattccttgaaagtgcagctgcagatttcagtgatgaagatgaagatgatgatgttgatggaagagagaaaagcgtcattgatacttcaacaattgttaggaaaaaagcattgcctgacagcggtgaagatcgagatacaaaagaagctctaaaggagtttgacttcttggttacatcagaggaaggagacaatgaatctagaagtgcaggcgatggaacagactgggaaaaggaagaccagtgtctcatgcctgaagcctggaatgtggaccagggagtaattaccaaactcaaggaacaatacaaaaaggagagaaaggggaaaaagggggtgaagaggcccaataggtcaaaactacaagatatgcttgctaatttgagagatgttgatgaacttccttcattgcagccatctgtgggttcaccttccagacccagcagctccaggcttcctgaacatgaaattaatagggcagatgaagtggaagcattgacatttcctccttcttctggaaagtcattcatcatgggagcagatgaagcccttgaaagtgaactgggacttggagaactagcaggccttacggtggccaatgaagcagactcactaacttatgatatagcaaacaataaagatgcattgaggaagacatggaaccctaagtttacattgagaagtcactttgatggcatccgagcccttgctttccatcccattgagcctgttttgataacagcatcagaggatcacacattaaaaatgtggaatttacagaaaacagccccagccaaaaagagcacttctcttgatgtagaacctatctatacattcagagcccataaaggtccagtgctttgtgtggtaatgagcagcaatggtgagcagtgttacagtggtggtactgatggactgatccagggctggaataccactaatcccaacatcgacccctatgattcttatgatccttctgttttacgaggccctctgctaggccacacggatgcagtctggggtttggcttatagtgcagcacatcagcgtttgttgtcctgttcagcagatggcactctgcgtttatggaatacaactgaggttgctccagcactaagtgtatttaatgatantaaagaactgggaatccctgcctctgtggatctagtgagcagtgacccgagccatatggtagcatcattcagcaagggatatacaagcatttttaacatggaaacacaacaacgcattctcactttagaatccaatgtagatacaacagccaactcttcctgccaaataaatagagtcatcagtcatcctactctttcgatcagcatcactgctcatgaagacaggcacatcaaattctatgataacaatacaggcaaactgatccactcgatggtagcccacctagaagctgttacaagtttagcagttgatcccaatggcctttacttgatgtctggcagtcatgactgttcaatacgtttatggaatctagaaagtaagacgtgtatccaagaattcacagctcatcgaaaaaagtttgaagaatcgattcatgatgtagctttccacccatccaaatgctatatagccagtgctggagctgacgcactggctaaagtctttgtatgacgcaatgcatcatcttcaccttctagctgtttataagtaatcaactgcacacaagagatacagaagacgagggcaagaatcatctcgtcctgcccttttgttctgctgaaggagcacagagaacatttgttgaagtatagttttgcaattcatatactgttttctaaaactaaggtttgttcaggttgctgcaagctcagctgaatctgtgagcctgaggtctgtttcaaatttctccccaataggcgcctttatttctgaggtggttctaattcgctaggcaggcctgagcgaatacaagtttagcttgtccctgttgagtaagtagggcatgctacaatggataatttaaaagcttgatagctgggactgaatagaagaaaacgggaaacttagaccaagttctcccctgagaaatcttgttaaaacacattaagtagtcaaaatagtaatctttatcatatctgccatattaacccctttgtgtataatgaccaggcagtgttaaactgagtttttaatttgactctcctttcagctgttcacataaagcacctggcaaagcattttacctgttagggggagaaaaatgcaataatatgttaaatatattattattcagaaatgctagacaaatagtttgcaagcagatttctatattgtattacagttttgaaaacagatttggtatcattctaaagtttagctatcaagcactcaccattgtgaagaatagttgatcgactctgcttttactaacagatttaacttattcaggtttgaaattctgtttatttttaagggtaaacagggcatatctctttaataatttctattttaaaattcactttattcatgtgacatttatagtaccagagtgattatttcataccaatgaaatcttacttttcagtgactgaaaagatagaatttatttgctaataatcatttatcaacacccacctaatcatgcttcagatgatctgtgctctttcttctttgtcacgttcaagttatctgacatctaccaagaacagttcataattattaatagcccaaagagtatggttaacttcacgcagctgcttttgcagaagcactaataaaaacaaatattttgtaccctagaagtcctctattaatccctgtaagaatctcctggaaacctggatgaaagagtttaatgccaaatattggctaacaagttctgtctttctctctccctattcctcccccattgtttaattgagatatacatgttttaatgggcagtggatcagtattgtttctggggaaatccacaccttaaaaggccaggcttccccagcccaacttacctgtgacccacctacatgtgttcaccttttgggattctgaagaccctgctatctagacctagtctcctgtcataaagacattatttctatagtggtttatgtctctcttactctttgtcccaaatgacagagaccaatctagaaattggaaataaattattaacgtccaactttccaccaaaaaacatataaataggctcttagattttaaaaatattaaatctatagatattttaaccaattaaaacaatttctacatattccattccccacattttccatcgtcataacaatgatgcttctcatgatatgtacatctactccttggaaaaagtattctggtggtggtgtggctaatgattgacaaatatttctgtaaaatttctgcctgccttgggccttccnggggtgctgggggattacggggcctggngccaccgcgcccgggcctggcccccttttcccagga

SEQ ID NO: 325616 - DNA, 135 bp, Homo sapiens
aagaatcaatgtagataatgtgatttgggatttatagttaccatataaatagaagttgatgtaacatatcatgggttacttcttatgtcgaagttaaaaagattaactaagcaggatatacatgttttacaccag

SEQ ID NO: 325617 - DNA, 324 bp, Homo sapiens
tgttaggaaaaaagcattgcctgacagcggtgaagatcgagatacaaaagaagctctaaaggagtttgacttcttggttacatcagaggaaggagacaatgaatctagaagtgcaggcgatggaacagactggggtaaggaagcatactggatccaaccagagatgttaagtaaataaaagaaattaatattttaccaggagggcaacatcttaactataatgttgaaatattgagcattctgtgaacttattactactagcaccctttatccagggtgaatgtgtgtgtatgtttaaggaacattgtataactacctcattta

SEQ ID NO: 325618 - DNA, 5633 bp, Homo sapiens
  misc_feature (1841)..(1841): n is a, c, g, or t
gcggccgccatggacgagcaggcgggtcccggcgtcttcttcagcaacaaccacccgggcgccggcggtgccaaggggctcgggcctctggcggaggctgccgcggccggcgacggggcggctgcggcgggggcggcccgagcccagtacagtctcccggggatcctgcacttcctgcagcacgagtgggcccgcttcgaggtggagagagcccagtgggaggtggagcgggcggagctgcaggcccagattgccttcctgcagggagaaaggaagggccaagaaaatttgaagaaggatcttgtgaggaggatcaaaatgttggagtatgctcttaaacaggaaagagccaaataccacaagttgaaatacgggacagaattgaatcagggagatatgaagcctccaagctatgattctgatgaaggtaatgaaacagaagtgcagccacaacaaaacagccagttaatgtggaaacaaggtcgacaactactcagacagtatctacaggaggtgggttatacagatactattctagatgtgaaatctaaacgagtgcgagctttgttgggcttttcaagtgatgtcacggacagggaagatgacaaaaatcaggactcagttgtaaatggcacagaggctgaagttaaagagacagcaatgattgcaaaatctgagttaacagattctgcctccgtgctggataatttcaaattccttgaaagtgcagctgcagatttcagtgatgaagatgaagatgatgatgttgatggaagagagaaaagcgtcattgatacttcaacaattgttaggaaaaaagcattgcctgacagcggtgaagatcgagatacaaaagaagctctaaaggagtttgacttcttggttacatcagaggaaggagacaatgaatctagaagtgcaggcgatggaacagactgggaaaaggaagaccagtgtctcatgcctgaagcctggaatgtggaccagggagtaattaccaaactcaaggaacaatacaaaaaggagagaaaggggaaaaagggggtgaagaggcccaataggtcaaaactacaagatatgcttgctaatttgagagatgttgatgaacttccttcattgcagccatctgtgggttcaccttccagacccagcagctccaggcttcctgaacatgaaattaatagggcagatgaagtggaagcattgacatttcctccttcttctggaaagtcattcatcatgggagcagatgaagcccttgaaagtgaactgggacttggagaactagcaggccttacggtggccaatgaagcagactcactaacttatgatatagcaaacaataaagatgcattgaggaagacatggaaccctaagtttacattgagaagtcactttgatggcatccgagcccttgctttccatcccattgagcctgttttgataacagcatcagaggatcacacattaaaaatgtggaatttacagaaaacagccccagccaaaaagagcacttctcttgatgtagaacctatctatacattcagagcccataaaggtccagtgctttgtgtggtaatgagcagcaatggtgagcagtgttacagtggtggtactgatggactgatccagggctggaataccactaatcccaacatcgacccctatgattcttatgatccttctgttttacgaggccctctgctaggccacacggatgcagtctggggtttggcttatagtgcagcacatcagcgtttgttgtcctgttcagcagatggcactctgcgtttatggaatacaactgaggttgctccagcactaagtgtatttaatgatantaaagaactgggaatccctgcctctgtggatctagtgagcagtgacccgagccatatggtagcatcattcagcaagggatatacaagcatttttaacatggaaacacaacaacgcattctcactttagaatccaatgtagatacaacagccaactcttcctgccaaataaatagagtcatcagtcatcctactctttcgatcagcatcactgctcatgaagacaggcacatcaaattctatgataacaatacaggcaaactgatccactcgatggtagcccacctagaagctgttacaagtttagcagttgatcccaatggcctttacttgatgtctggcagtcatgactgttcaatacgtttatggaatctagaaagtaagacgtgtatccaagaattcacagctcatcgaaaaaagtttgaagaatcgattcatgatgtagctttccacccatccaaatgctatatagccagtgctggagctgacgcactggctaaagtctttgtatgacgcaatgcatcatcttcaccttctagctgtttataagtaatcaactgcacacaagagatacagaagacgagggcaagaatcatctcgtcctgcccttttgttctgctgaaggagcacagagaacatttgttgaagtatagttttgcaattcatatactgttttctaaaactaaggtttgttcaggttgctgcaagctcagctgaatctgtgagcctgaggtctgtttcaaatttctccccaataggcgcctttatttctgaggtggttctaattcgctaggcaggcctgagcgaatacaagtttagcttgtccctgttgagtaagtagggcatgctacaatggataatttaaaagcttgatagctgggactgaatagaagaaaacgggaaacttagaccaagttctcccctgagaaatcttgttaaaacacattaagtagtcaaaatagtaatctttatcatatctgccatattaacccctttgtgtataatgaccaggcagtgttaaactgagtttttaatttgactctcctttcagctgttcacataaagcacctggcaaagcattttacctgttagggggagaaaaatgcaataatatgttaaatatattattattcagaaatgctagacaaatagtttgcaagcagatttctatattgtattacagttttgaaaacagatttggtatcattctaaagtttagctatcaagcactcaccattgtgaagaatagttgatcgactctgcttttactaacagatttaacttattcaggtttgaaattctgtttatttttaagggtaaacagggcatatctctttaataatttctattttaaaattcactttattcatgtgacatttatagtaccagagtgattatttcataccaatgaaatcttacttttcagtgactgaaaagatagaatttatttgctaataatcatttatcaacacccacctaatcatgcttcagatgatctgtgctctttcttctttgtcacgttcaagttatctgacatctaccaagaacagttcataattattaatagcccaaagagtatggttaacttcacgcagctgcttttgcagaagcactaataaaaacaaatattttgtaccctagaagtcctctattaatccctgtaagaatctcctggaaacctggatgaaagagtttaatgccaaatattggctaacaagttctgtctttctctctccctattcctcccccattgtttaattgagatatacatgttttaatgggcagtggatcagtattgtttctggggaaatccacaccttaaaaggccaggcttccccagcccaacttacctgtgacccacctacatgtgttcaccttttgggattctgaagaccctgctatctagacctagtctcctgtcataaagacattatttctatagtggtttatgtctctcttactctttgtcccaaatgacagagaccaatctagaaattggaaataaattattaacgtccaactttccaccaaaaaacatataaataggctcttagattttaaaaatattaaatctatagatattttaaccaattaaaacaatttctacatattccattccccacattttccatcgtcataacaatgatgcttctcatgatatgtacatctactccttggaaaaagtattctggtggtggtgtggctaatgattgacaaatatttctgtaaaatttctgcctgtttgcctctagaattctgcattatacaggcaaattttctttaaagctagagacttgtgctaaatttgcctgattttcatacagatatgctgtagtaatacagctaccttttcatttcatctttgtgctttggttaacaagcaggctcaagagactgctttgtgtaattaaatgaattgacctaaacatgagctgtcaggtgaatacttaatatttccatgcagatacagaattccatattgtgttcagtaaatttcttttggttcttcacagtgaagaaagaatgtttctaacctaacatttgtagaaggatactggaaaattccttccaggaaggaagggaaggaagatgccattacttggtgtatttatgatgggatgaccacaaagctattgttctaccagttattaattaccttctaagatcttcagttactgctttattaatgtcactgaaattctaaaaaccaggacattcttcccccgttcattttatgcttcatggttgaaatttttctgtcagtgagtggaaaataaccatgagatacatagactgtagcgcaaatggaactgttgaaagttccttagaaagccagtgctgtggcattggagactacggagagagtcttctctaccagcactgcatgatctcagcctagaaatgagccaaagctgtcttccaaccagagtagcatatacatgtgtctgacttttcccctagcctgttgaacattcaatgaaaattcacagaatgaacaaattcaatgtttaaacagccattgaaatgctttcatagtgcttcatttgtaaatattttgtttgaaatgtattggaatagtatgaaaattagcgggaggtttggatccctgccttattttcatatgctgtggatacatctctgggagcttgcagcacccttctcaaaactcaactgtcatatggagctcatttgctactcaaaccatagacagattatttaacaaaagtgatataatgaccttcagtatttttctattgaacaagtttaacaacttttgccattaaacaaatacttagttatgcaaaatatttcgcttttataatcattttagttatgactaaaacgggggaaattgagctgcatcactgatgatgaactttgtgagaaattttttttttaatctgactttcattccttcagtattcttgctataaatttcttttggagataatgatgaagatttatttgaaaatgtctaaaatgtatgtatattttataaatatatattatatatattgtaagaatatatataatatataaactatatatatatatatatatatatatataaaccataggtgcattttactgttttgtattttcatttttggaggtagtatacacagcagataatgatgagtatgatgagtgttgtgctgtttgcttttgcagtataatatatagttctaagtgtttaaattactgtatatacaatattcattataggctagcatgcttgttttaaagactgtcattctagtgtattaaaatctgaatgtaagaaaaaaaaaaaa

SEQ ID NO: 325619 - DNA, 5044 bp, Homo sapiens
  misc_feature (1252)..(1252): n is a, c, g, or t
tctccttcagcacggcgtggtgtgtccctggacacagctcttcattccattgacttagaggcaacaggattgatcattcttttatagagcatatttgccaataaagaaggacttgagtttccttctttattgaaagtgcagctgcagatttcagtgatgaagatgaagatgatgatgttgatggaagagagaaaagcgtcattgatacttcaacaattgttaggaaaaaagcattgcctgacagcggtgaagatcgagatacaaaagaagctctaaaggagtttgacttcttggttacatcagaggaaggagacaatgaatctagaagtgcaggcgatggaacagactgggaaaaggaagaccagtgtctcatgcctgaagcctggaatgtggaccagggagtaattaccaaactcaaggaacaatacaaaaaggagagaaaggggaaaaagggggtgaagaggcccaataggtcaaaactacaagatatgcttgctaatttgagagatgttgatgaacttccttcattgcagccatctgtgggttcaccttccagacccagcagctccaggcttcctgaacatgaaattaatagggcagatgaagtggaagcattgacatttcctccttcttctggaaagtcattcatcatgggagcagatgaagcccttgaaagtgaactgggacttggagaactagcaggccttacggtggccaatgaagcagactcactaacttatgatatagcaaacaataaagatgcattgaggaagacatggaaccctaagtttacattgagaagtcactttgatggcatccgagcccttgctttccatcccattgagcctgttttgataacagcatcagaggatcacacattaaaaatgtggaatttacagaaaacagccccagccaaaaagagcacttctcttgatgtagaacctatctatacattcagagcccataaaggtccagtgctttgtgtggtaatgagcagcaatggtgagcagtgttacagtggtggtactgatggactgatccagggctggaataccactaatcccaacatcgacccctatgattcttatgatccttctgttttacgaggccctctgctaggccacacggatgcagtctggggtttggcttatagtgcagcacatcagcgtttgttgtcctgttcagcagatggcactctgcgtttatggaatacaactgaggttgctccagcactaagtgtatttaatgatantaaagaactgggaatccctgcctctgtggatctagtgagcagtgacccgagccatatggtagcatcattcagcaagggatatacaagcatttttaacatggaaacacaacaacgcattctcactttagaatccaatgtagatacaacagccaactcttcctgccaaataaatagagtcatcagtcatcctactctttcgatcagcatcactgctcatgaagacaggcacatcaaattctatgataacaatacaggcaaactgatccactcgatggtagcccacctagaagctgttacaagtttagcagttgatcccaatggcctttacttgatgtctggcagtcatgactgttcaatacgtttatggaatctagaaagtaagacgtgtatccaagaattcacagctcatcgaaaaaagtttgaagaatcgattcatgatgtagctttccacccatccaaatgctatatagccagtgctggagctgacgcactggctaaagtctttgtatgacgcaatgcatcatcttcaccttctagctgtttataagtaatcaactgcacacaagagatacagaagacgagggcaagaatcatctcgtcctgcccttttgttctgctgaaggagcacagagaacatttgttgaagtatagttttgcaattcatatactgttttctaaaactaaggtttgttcaggttgctgcaagctcagctgaatctgtgagcctgaggtctgtttcaaatttctccccaataggcgcctttatttctgaggtggttctaattcgctaggcaggcctgagcgaatacaagtttagcttgtccctgttgagtaagtagggcatgctacaatggataatttaaaagcttgatagctgggactgaatagaagaaaacgggaaacttagaccaagttctcccctgagaaatcttgttaaaacacattaagtagtcaaaatagtaatctttatcatatctgccatattaacccctttgtgtataatgaccaggcagtgttaaactgagtttttaatttgactctcctttcagctgttcacataaagcacctggcaaagcattttacctgttagggggagaaaaatgcaataatatgttaaatatattattattcagaaatgctagacaaatagtttgcaagcagatttctatattgtattacagttttgaaaacagatttggtatcattctaaagtttagctatcaagcactcaccattgtgaagaatagttgatcgactctgcttttactaacagatttaacttattcaggtttgaaattctgtttatttttaagggtaaacagggcatatctctttaataatttctattttaaaattcactttattcatgtgacatttatagtaccagagtgattatttcataccaatgaaatcttacttttcagtgactgaaaagatagaatttatttgctaataatcatttatcaacacccacctaatcatgcttcagatgatctgtgctctttcttctttgtcacgttcaagttatctgacatctaccaagaacagttcataattattaatagcccaaagagtatggttaacttcacgcagctgcttttgcagaagcactaataaaaacaaatattttgtaccctagaagtcctctattaatccctgtaagaatctcctggaaacctggatgaaagagtttaatgccaaatattggctaacaagttctgtctttctctctccctattcctcccccattgtttaattgagatatacatgttttaatgggcagtggatcagtattgtttctggggaaatccacaccttaaaaggccaggcttccccagcccaacttacctgtgacccacctacatgtgttcaccttttgggattctgaagaccctgctatctagacctagtctcctgtcataaagacattatttctatagtggtttatgtctctcttactctttgtcccaaatgacagagaccaatctagaaattggaaataaattattaacgtccaactttccaccaaaaaacatataaataggctcttagattttaaaaatattaaatctatagatattttaaccaattaaaacaatttctacatattccattccccacattttccatcgtcataacaatgatgcttctcatgatatgtacatctactccttggaaaaagtattctggtggtggtgtggctaatgattgacaaatatttctgtaaaatttctgcctgtttgcctctagaattctgcattatacaggcaaattttctttaaagctagagacttgtgctaaatttgcctgattttcatacagatatgctgtagtaatacagctaccttttcatttcatctttgtgctttggttaacaagcaggctcaagagactgctttgtgtaattaaatgaattgacctaaacatgagctgtcaggtgaatacttaatatttccatgcagatacagaattccatattgtgttcagtaaatttcttttggttcttcacagtgaagaaagaatgtttctaacctaacatttgtagaaggatactggaaaattccttccaggaaggaagggaaggaagatgccattacttggtgtatttatgatgggatgaccacaaagctattgttctaccagttattaattaccttctaagatcttcagttactgctttattaatgtcactgaaattctaaaaaccaggacattcttcccccgttcattttatgcttcatggttgaaatttttctgtcagtgagtggaaaataaccatgagatacatagactgtagcgcaaatggaactgttgaaagttccttagaaagccagtgctgtggcattggagactacggagagagtcttctctaccagcactgcatgatctcagcctagaaatgagccaaagctgtcttccaaccagagtagcatatacatgtgtctgacttttcccctagcctgttgaacattcaatgaaaattcacagaatgaacaaattcaatgtttaaacagccattgaaatgctttcatagtgcttcatttgtaaatattttgtttgaaatgtattggaatagtatgaaaattagcgggaggtttggatccctgccttattttcatatgctgtggatacatctctgggagcttgcagcacccttctcaaaactcaactgtcatatggagctcatttgctactcaaaccatagacagattatttaacaaaagtgatataatgaccttcagtatttttctattgaacaagtttaacaacttttgccattaaacaaatacttagttatgcaaaatatttcgcttttataatcattttagttatgactaaaacgggggaaattgagctgcatcactgatgatgaactttgtgagaaattttttttttaatctgactttcattccttcagtattcttgctataaatttcttttggagataatgatgaagatttatttgaaaatgtctaaaatgtatgtatattttataaatatatattatatatattgtaagaatatatataatatataaactatatatatatatatatatatatatataaaccataggtgcattttactgttttgtattttcatttttggaggtagtatacacagcagataatgatgagtatgatgagtgttgtgctgtttgcttttgcagtataatatatagttctaagtgtttaaattactgtatatacaatattcattataggctagcatgcttgttttaaagactgtcattctagtgtattaaaatctgaatgtaagaaaaaaaaaaaa

SEQ ID NO: 325620 - DNA, 8599 bp, Homo sapiens
gagagcgagagtgagtgagtgtgagtgcggggtggggtggtggccgttacgttcggggcaacggctacggcagtggagaagtaagaagagaaacaacgtccggcgcttccgccttcgcttaggaggaggaagagctggtagggaaaggaaagtgcttcgccctgggcctggactggaccgagtcgggttggtgggggtctgggctatgagcttttgagggtcgcctgggacgcggagcgagacacgagagccaggagctatgtctcagccgccgccgccgccgcctccgttgccgccgccacctcctccccctgaggctccacagactccgtcgtccttggcgtcggcggctgcttcgggggggcttttgaagcggagagaccggagaatcctttccgggagctgcccggatccgaagtgtcaggcgcgtctatttttcccggcctccggttctgtcagcatcgagtgtaccgagtgcggccagcggcacgagcagcaacagctgctgggggttgaggaggtgaccgacccggacgtagtgctacacaacctgctgcggaacgcgctgctcggggttacgggggcacccaagaagaacacggaactggtaaaggtgatgggcctttccaactatcactgcaaattgttgtcgcccatattagctcgctatggaatggacaaacagacaggccgggccaagcttctccgggacatgaaccagggcgaactgttcgattgcgccttactgggtgaccgcgccttcctcatagaaccagagcatgttaacactgtgggctatggcaaggaccgctccggaagcctcctgtatttgcatgacactctggaggacattaagcgggccaataaaagccaggaatgtctcattccagtgcatgtggacggggatggacactgcttggtgcatgctgtgtctcgggctctagtaggccgagagctcttctggcatgccttaagagagaatcttaaacagcactttcagcagcacctggcccgatatcaagctctgttccatgacttcattgatgctgctgagtgggaggacattatcaatgagtgtgaccctctgtttgtaccacctgagggtgttcccttgggcctgaggaatatccacatatttggtcttgccaatgtgctacatcgtcctattattctgttagattccctcagtggcatgagaagctctggtgattattcagccacctttctacctgggctcatccctgcagagaagtgcactgggaaagatggtcatttgaacaaaccaatctgtattgcatggagcagctccggtagaaaccattatatccccttggtaggcataaaaggggctgctttgcccaaactgcctatgaatttgcttcctaaagcatggggtgtgcctcaggaccttattaaaaagtacataaaacttgaagaggatggtggttgtgttattggaggtgacagaagtttgcaagataaatacttacttaggcttgttgctgctatggaagaagtctttatggacaaacatggtatccatcctagtttggttgctgatgtccatcagtatttctacagaaggactggagtgataggagttcagcctgaggaagtcacagcagctgctaaaaaagcagtaatggataatcgccttcacaaatgtttgctctgtggtgccctttctgaacttcatgttcctccagagtggttggctcctggagggaaattgtataacctggcaaaaagtactcatggacagctgaggactgacaaaaattacagctttcccttgaacaatttggtttgctcatatgattcagtgaaagatgttctggtaccagactatggaatgagtaacctaacagcttgtaattggtgccatggcacatctgtgcgaaaggtcagaggagatgggtctattgtgtatttggatggagacagaactaattctaggtccactggtggcaaatgtggttgtggattcaaacacttttgggatggtaaggagtatgacaatctaccagaagctttccctattactttagaatggggtggaagagtggtcagagaaacagtatattggttccagtatgaaagtgattcatctttgaatagtaatgtttacgatgttgcaatgaaacttgttaccaagcactttccaggtgaatttgggagtgaaatcctagttcagaaagttgtccacactatattgcatcagactgccaaaaagaatcccgatgattatactcctgtaaatatagatggtgctcacgcccaaagagttggagatgttcaaggacaagaatcagagtctcagctcccaactaaaattattcttactggacagaaaacaaaaactttgcacaaggaggagttaaacatgagtaaaactgaaagaactattcaacagaatattacggaacaggcttctgtaatgcagaaacggaaaacagagaagttaaaacaagaacaaaaagggcaacccaggactgtttctcccagtaccattcgtgatggtccatcctctgcacctgctacacctaccaaggctccctattcaccgacaacttctaaggagaagaagatccgaatcacaactaatgatggacgacagtccatggttacccttaagtcttcaacaaccttttttgaacttcaggaaagtatagccagagaattcaacattcctccatatttacagtgtattcgatacgggtttcctcctaaagagttaatgccaccacaggcaggaatggaaaaggaaccagttcctttacagcatggcgacagaattacaatagaaattctaaaaagtaaagctgaaggtggtcagtctgctgcagcacactcagcccacactgtgaaacaagaagatattgctgttactggtaaactgtcatctaaggaacttcaggagcaagctgaaaaagaaatgtactccttgtgtcttttagcaacattaatgggagaagatgtatggtcttatgcaaagggacttcctcacatgtttcagcagggtggtgtattctacagtattatgaagaaaaccatgggtatggctgatggcaagcattgtacttttccacatctgcctggcaaaacctttgtctataatgcttctgaagatagactggaattgtgtgtggatgctgcaggacatttccccattggtcctgatgttgaagatttagttaaagaggctgtaagtcaggttcgagcagaggctactacaagaagtagggaatcaagtccctcacatgggctattaaaactaggtagtggtggagtagtgaaaaagaaatctgagcaacttcataacgtaactgcctttcagggaaaagggcattctttaggaactgcatctggtaacccacaccttgatccaagagctagggaaacttcagttgtaagaaagcataatacagggacagactttagtaatagttccactaaaacagagccttctgtattcacagcttcttctagtaatagtgagcttattcgaatagctcctggagtagtaacaatgagagacggcaggcagcttgatcctgatttggttgaggcccagcgaaaaaaaattgcaggaaatggtttcttctattcaggcttcaatggacaggcaccttcgggatcaaagtacagagcagtcaccatctgatcttcctcaaaggaaaacagaagttgtgagttcttctgcaaagtctgggagtcttcagactggtttgcctgaatcttttcctttaactggtggtactgaaaatttgaatacagaaacaactgatggctgtgtagcagatgcactgggagcagcctttgccacaaggtcaaaagcacaaaggggaaattccgtggaggagcttgaagagatggatagtcaagatgctgagatgactaacacaactgagccaatggatcactcttgatttaattagaggctaataaaggcagaatgtttattgtgaatatgtaatatttgttggctgggccacgtaacttgattagtcattaaaaatcttgtacgtatataattcaaagattatatcttgttattcagtgcatgatagcaagtgtgtgattggccatagcttttaatatactgctgcccaggctggctctgaatttctataaattagctgttagatctgctgagatgactttcttccatatatgtggttcattggaagttctttgtaattttaattccatgaaagtcttaatgtttccaacatgaaaattctcttacttaaatacgtttgatttctgaaaagcctacaaatggaggggaaatgagattgtgctaatgttgatgtcatcaaggtaaccatctcatatactagtgtcaaaaggtttatgtaaacttgaattttatctgaactaaattgtatcttaaaattcatacaattatttattagacagtggaatgcaaatgtttctatgaacgtaaacacattcatagagatttcttggcgaaaatatcttgagaatagaatgtaacgatataacattttgctgatttgtgcaagattggggaaaaatttcttctagattgatgaggtcaatgtgattcagttgtgttgctgtctgagccacagccaattgtgtgtgctctattaatatgttaccattatttttgattcctggcttggtcaagaacaacctgatttttttttttttaatcttgcagaaaagttgattgcaaagtgtggtagaaaaagaaataatggtagcagtagagaatttataaataagagtttatctttatgaatgagttaattgttctacaattttgatcagtggtatttaagcctgtatatgctaagtgtatttatgcccctttgagccaaaatttttttttttttttcagaatccataagagtttatttgttggcttcacttgggtttagatgcaaattttactgcatcacaccctgatcagctgggtatttgcttagtgtattcatcaaatcttcagtgccagtttccttgagaagcagctttcatgcttattccttaaaaacaacagaagagtgtttatcctgagattggtattgcactattttattttattctgcaaatctgtatcctgaagtgtacatttcaacccatattcttctctgttcactgaaattaagttgaatttgaatggctgaaagacaaaatatatgttaatacaatctcttacctagagcattcaaagcctggctgtctctgtttgcacatgtaacagatgcagaactgtgtttgtaattctaagaaaatgtatgtcagaaagtattttatcagatgtttaaaaatctctgcctgttgattcataagggatatagacagtactttaacttgtgtttccagataaggcagattttggtcatctttctgtgaaagtatctctaactgaatccacttcttaaacaaactactctattttaaataaggaaagaatggagaatctagacattttacaggtgtatctgagcaaaatatatatttgggttagtttttatcacattatcacgtttgtctttatattttatcttcatcctaaattttctccctatcaaaacagcaggaaatttttaaacttttatattgtacactatttttgcataaaataagagctgtagctaccaaatactatttactacttagtaaaggtggcttctgtgtattaaactacgaattacaaatatcacttcactaaccactataattatttttggctttttcagccactggaactttttttggggggatttaaatacaggaaaactgtttaagcaaaaaatgcactgctttcatgtaaaatgatataatcttctttaacaaatattttcttcattgataactgacagatatctcatagcattaacataaaataccagaaacaaactttatctccctattcttacatttagtgcaaattggaatgcgtatgtgaatgttagaagatggacttaatctctgacaactttattaatttctctagctacagcaatgctatttaaaagccagttaggtatgaatagtacagtaatagtttgggttctcccttgataaatgaataaaaggctcaattctgataagtgatcaaatttcttgaaattctttcaaatcagctgaaaatttggttggggtgaattgatggtttttgagaagtaggccaggtatcctcacaaagaagttttagaatagggtttcttttaagtttttaaatatcatcctttgtctttccatatggttttcataaccaaatacatgactatagcatggttatttttctagtactgccatttgtgatatagccacatcttggcgtgcaagctagacatctcaggtaaatttgtttttttttttttttttagccctagaggtaacattataactaaaatgcattcctgcaattctgtttgcagtgcttcactaaacattgaaataaagttgtaaattttttcttcagtaatccattttatagttaatcataccaaatttaagttgatgacctaaagtccaggtagtgttgaagatagtatgtatctagaatactggtaatgagaaattgttgtaaattgaagaaaacaagatgctgccatatattaagatagaatataattaactccatgagaatggttactcaggaactagttaaagagcaaacccatttctcccgcttcactctgtttcagatatttttattggaaaatgttagggtagaggcctgagaaagttagcaaatgctattgactgatactggctctgtgtcttccagtgatttttagtttggtttttacagtcaagcctactgcttgcaattaagatatcaatctgaaatgcatctgtaattcctggccacaggtccttattgccattatttttaagtatcttcattggagatgaacactgacttttgcatatggtctcttacctcagggaagatcacttgctagcaactcatactactaatgacaggtttttgagaattgtactgacatcacatgttagctactaaatgcaaaatgtataaaagtattgttttatgtagttacctaccaatactatctgctactgaataactctctaaatatgtagacctcactaataactaacctttaggtaaaaaatttacttctgtcattaattacacttcaactggtcaatatagtggcagcataaagtgtttatttcagaatatcaatacagttttgtcttcatttttcaacagtaatttcaattggttcatacttaaaatactacacagattttgagttttatggttctcaaagcaaggtttccatcttaagatttttataaacacaaagcctttgcaaaattggattaaattccacctatcttaatgtgaattaaaaaccaccatttataataataatagcgccatattctaagttgagtaaatgcatcctaccattcaaggttatcatataatttaacaaaattgtacaaccttaaggctcttcacagtataaattaatttttcaaaccagagctgttcacatgaaaatattccttagtagaatgtatatttaagaaataaaacaacaaaggggaactatatcacccatgtaagttatagagttaattacaagttctaccattcttgataattctttgagatgctaagtgtttcagttcatatttaatgatacttaaatcgtgggaattttaatgtttgttccaaaatagcagaaattgtaaaaattatgaattattggagaaaatgccattacttgtatatctgacatttaattttttaattatggagactacatgcttttgtagtataatattaatgattattctcttgtaaaagaaaaggaaaaattagtaaagaaaaaagttttagttgatgttacctgcttgtgagtatcaattacttagtttttaaatttttaaggtattgcctacttttctttagaatgcagaaatctcgtcctgagcccttattatgcctgtggtagagcaatgcaagactgaaaaggttgccagtattttcaggcttatttgactaagaattagtgccaagaactggaaagtctactttttggagggaaatgatacttagaatttgtaaacataagcagtaatagtgtaaatatttagaaaaatagcaagtgctttaactgctcaataaaatagtatagatgttatttcacccttaaggcactggctgttgcccattattttccgatttcgtgattactgtatatattacatttgagtaatgaataattggtaatagtgtattatagtgttctacagcacaccttactgtacagtatttgaagttttcttttatatcaataataaaactataagttaatactgattttcccctgaaattctccacattagcttttaaaggtaattttatgttctttagtttcctggaattataatgcatgaacatatagttcagttttataaagaaattcttaaataataaagttttcttgttgaacttaaaaaaggaaaaaagaggaagagagaaacaaagaagaaaaaaaaaagaaagaaaagaaagaggaaaagaagaaaagagagagaagggaagggaaagacaaggagaaaaaaaagaagagag

SEQ ID NO: 325621 - DNA, 5596 bp, Homo sapiens
cgaggccgtgggagactcaccgccaccgcgtgatggagagtttatgcgtttaggtatggctgatggcaagcattgtacttttccacatctgcctggcaaaacctttgtctataatgcttctgaagatagactggaattgtgtgtggatgctgcaggacatttccccattggtcctgatgttgaagatttagttaaagaggctgtaagtcaggttcgagcagaggctactacaagaagtagggaatcaagtccctcacatgggctattaaaactaggtagtggtggagtagtgaaaaagaaatctgagcaacttcataacgtaactgcctttcagggaaaagggcattctttaggaactgcatctggtaacccacaccttgatccaagagctagggaaacttcagttgtaagaaagcataatacagggacagactttagtaatagttccactaaaacagagccttctgtattcacagcttcttctagtaatagtgagcttattcgaatagctcctggagtagtaacaatgagagacggcaggcagcttgatcctgatttggttgaggcccagcgaaaaaaaattgcaggaaatggtttcttctattcaggcttcaatggacaggcaccttcgggatcaaagtacagagcagtcaccatctgatcttcctcaaaggaaaacagaagttgtgagttcttctgcaaagtctgggagtcttcagactggtttgcctgaatcttttcctttaactggtggtactgaaaatttgaatacagaaacaactgatggctgtgtagcagatgcactgggagcagcctttgccacaaggtcaaaagcacaaaggggaaattccgtggaggagcttgaagagatggatagtcaagatgctgagatgactaacacaactgagccaatggatcactcttgatttaattagaggctaataaaggcagaatgtttattgtgaatatgtaatatttgttggctgggccacgtaacttgattagtcattaaaaatcttgtacgtatataattcaaagattatatcttgttattcagtgcatgatagcaagtgtgtgattggccatagcttttaatatactgctgcccaggctggctctgaatttctataaattagctgttagatctgctgagatgactttcttccatatatgtggttcattggaagttctttgtaattttaattccatgaaagtcttaatgtttccaacatgaaaattctcttacttaaatacgtttgatttctgaaaagcctacaaatggaggggaaatgagattgtgctaatgttgatgtcatcaaggtaaccatctcatatactagtgtcaaaaggtttatgtaaacttgaattttatctgaactaaattgtatcttaaaattcatacaattatttattagacagtggaatgcaaatgtttctatgaacgtaaacacattcatagagatttcttggcgaaaatatcttgagaatagaatgtaacgatataacattttgctgatttgtgcaagattggggaaaaatttcttctagattgatgaggtcaatgtgattcagttgtgttgctgtctgagccacagccaattgtgtgtgctctattaatatgttaccattatttttgattcctggcttggtcaagaacaacctgatttttttttttttaatcttgcagaaaagttgattgcaaagtgtggtagaaaaagaaataatggtagcagtagagaatttataaataagagtttatctttatgaatgagttaattgttctacaattttgatcagtggtatttaagcctgtatatgctaagtgtatttatgcccctttgagccaaaatttttttttttttttcagaatccataagagtttatttgttggcttcacttgggtttagatgcaaattttactgcatcacaccctgatcagctgggtatttgcttagtgtattcatcaaatcttcagtgccagtttccttgagaagcagctttcatgcttattccttaaaaacaacagaagagtgtttatcctgagattggtattgcactattttattttattctgcaaatctgtatcctgaagtgtacatttcaacccatattcttctctgttcactgaaattaagttgaatttgaatggctgaaagacaaaatatatgttaatacaatctcttacctagagcattcaaagcctggctgtctctgtttgcacatgtaacagatgcagaactgtgtttgtaattctaagaaaatgtatgtcagaaagtattttatcagatgtttaaaaatctctgcctgttgattcataagggatatagacagtactttaacttgtgtttccagataaggcagattttggtcatctttctgtgaaagtatctctaactgaatccacttcttaaacaaactactctattttaaataaggaaagaatggagaatctagacattttacaggtgtatctgagcaaaatatatatttgggttagtttttatcacattatcacgtttgtctttatattttatcttcatcctaaattttctccctatcaaaacagcaggaaatttttaaacttttatattgtacactatttttgcataaaataagagctgtagctaccaaatactatttactacttagtaaaggtggcttctgtgtattaaactacgaattacaaatatcacttcactaaccactataattatttttggctttttcagccactggaactttttttggggggatttaaatacaggaaaactgtttaagcaaaaaatgcactgctttcatgtaaaatgatataatcttctttaacaaatattttcttcattgataactgacagatatctcatagcattaacataaaataccagaaacaaactttatctccctattcttacatttagtgcaaattggaatgcgtatgtgaatgttagaagatggacttaatctctgacaactttattaatttctctagctacagcaatgctatttaaaagccagttaggtatgaatagtacagtaatagtttgggttctcccttgataaatgaataaaaggctcaattctgataagtgatcaaatttcttgaaattctttcaaatcagctgaaaatttggttggggtgaattgatggtttttgagaagtaggccaggtatcctcacaaagaagttttagaatagggtttcttttaagtttttaaatatcatcctttgtctttccatatggttttcataaccaaatacatgactatagcatggttatttttctagtactgccatttgtgatatagccacatcttggcgtgcaagctagacatctcaggtaaatttgtttttttttttttttttagccctagaggtaacattataactaaaatgcattcctgcaattctgtttgcagtgcttcactaaacattgaaataaagttgtaaattttttcttcagtaatccattttatagttaatcataccaaatttaagttgatgacctaaagtccaggtagtgttgaagatagtatgtatctagaatactggtaatgagaaattgttgtaaattgaagaaaacaagatgctgccatatattaagatagaatataattaactccatgagaatggttactcaggaactagttaaagagcaaacccatttctcccgcttcactctgtttcagatatttttattggaaaatgttagggtagaggcctgagaaagttagcaaatgctattgactgatactggctctgtgtcttccagtgatttttagtttggtttttacagtcaagcctactgcttgcaattaagatatcaatctgaaatgcatctgtaattcctggccacaggtccttattgccattatttttaagtatcttcattggagatgaacactgacttttgcatatggtctcttacctcagggaagatcacttgctagcaactcatactactaatgacaggtttttgagaattgtactgacatcacatgttagctactaaatgcaaaatgtataaaagtattgttttatgtagttacctaccaatactatctgctactgaataactctctaaatatgtagacctcactaataactaacctttaggtaaaaaatttacttctgtcattaattacacttcaactggtcaatatagtggcagcataaagtgtttatttcagaatatcaatacagttttgtcttcatttttcaacagtaatttcaattggttcatacttaaaatactacacagattttgagttttatggttctcaaagcaaggtttccatcttaagatttttataaacacaaagcctttgcaaaattggattaaattccacctatcttaatgtgaattaaaaaccaccatttataataataatagcgccatattctaagttgagtaaatgcatcctaccattcaaggttatcatataatttaacaaaattgtacaaccttaaggctcttcacagtataaattaatttttcaaaccagagctgttcacatgaaaatattccttagtagaatgtatatttaagaaataaaacaacaaaggggaactatatcacccatgtaagttatagagttaattacaagttctaccattcttgataattctttgagatgctaagtgtttcagttcatatttaatgatacttaaatcgtgggaattttaatgtttgttccaaaatagcagaaattgtaaaaattatgaattattggagaaaatgccattacttgtatatctgacatttaattttttaattatggagactacatgcttttgtagtataatattaatgattattctcttgtaaaagaaaaggaaaaattagtaaagaaaaaagttttagttgatgttacctgcttgtgagtatcaattacttagtttttaaatttttaaggtattgcctacttttctttagaatgcagaaatctcgtcctgagcccttattatgcctgtggtagagcaatgcaagactgaaaaggttgccagtattttcaggcttatttgactaagaattagtgccaagaactggaaagtctactttttggagggaaatgatacttagaatttgtaaacataagcagtaatagtgtaaatatttagaaaaatagcaagtgctttaactgctcaataaaatagtatagatgttatttcacccttaaggcactggctgttgcccattattttccgatttcgtgattactgtatatattacatttgagtaatgaataattggtaatagtgtattatagtgttctacagcacaccttactgtacagtatttgaagttttcttttatatcaataataaaactataagttaatactgattttcccctgaaattctccacattagcttttaaaggtaattttatgttctttagtttcctggaattataatgcatgaacatatagttcagttttataaagaaattcttaaataataaagttttcttgttgaacttaaaaaaggaaaaaagaggaagagagaaacaaagaagaaaaaaaaaagaaagaaaagaaagaggaaaagaagaaaagagagagaagggaagggaaagacaaggagaaaaaaaagaagagag

SEQ ID NO: 325622 - DNA, 4296 bp, Homo sapiens
gagagcgagagtgagtgagtgtgagtgcggggtggggtggtggccgttacgttcggggcaacggctacggcagtggagaagtaagaagagaaacaacgtccggcgcttccgccttcgcttaggaggaggaagagctggtagggaaaggaaagtgcttcgccctgggcctggactggaccgagtcgggttggtgggggtctgggctatgagcttttgagggtcgcctgggacgcggagcgagacacgagagccaggagctatgtctcagccgccgccgccgccgcctccgttgccgccgccacctcctccccctgaggctccacagactccgtcgtccttggcgtcggcggctgcttcgggggggcttttgaagcggagagaccggagaatcctttccgggagctgcccggatccgaagtgtcaggcgcgtctatttttcccggcctccggttctgtcagcatcgagtgtaccgagtgcggccagcggcacgagcagcaacagctgctgggggttgaggaggtgaccgacccggacgtagtgctacacaacctgctgcggaacgcgctgctcggggttacgggggcacccaagaagaacacggaactggtaaaggtgatgggcctttccaactatcactgcaaattgttgtcgcccatattagctcgctatggaatggacaaacagacaggccgggccaagcttctccgggacatgaaccagggcgaactgttcgattgcgccttactgggtgaccgcgccttcctcatagaaccagagcatgttaacactgtgggctatggcaaggaccgctccggaagcctcctgtatttgcatgacactctggaggacattaagcgggccaataaaagccaggaatgtctcattccagtgcatgtggacggggatggacactgcttggtgcatgctgtgtctcgggctctagtaggccgagagctcttctggcatgccttaagagagaatcttaaacagcactttcagcagcacctggcccgatatcaagctctgttccatgacttcattgatgctgctgagtgggaggacattatcaatgagtgtgaccctctgtttgtaccacctgagggtgttcccttgggcctgaggaatatccacatatttggtcttgccaatgtgctacatcgtcctattattctgttagattccctcagtggcatgagaagctctggtgattattcagccacctttctacctgggctcatccctgcagagaagtgcactgggaaagatggtcatttgaacaaaccaatctgtattgcatggagcagctccggtagaaaccattatatccccttggtaggcataaaaggggctgctttgcccaaactgcctatgaatttgcttcctaaagcatggggtgtgcctcaggaccttattaaaaagtacataaaacttgaagaggatggtggttgtgttattggaggtgacagaagtttgcaagataaatacttacttaggcttgttgctgctatggaagaagtctttatggacaaacatggtatccatcctagtttggttgctgatgtccatcagtatttctacagaaggactggagtgataggagttcagcctgaggaagtcacagcagctgctaaaaaagcagtaatggataatcgccttcacaaatgtttgctctgtggtgccctttctgaacttcatgttcctccagagtggttggctcctggagggaaattgtataacctggcaaaaagtactcatggacagctgaggactgacaaaaattacagctttcccttgaacaatttggtttgctcatatgattcagtgaaagatgttctggtaccagactatggaatgagtaacctaacagcttgtaattggtgccatggcacatctgtgcgaaaggtcagaggagatgggtctattgtgtatttggatggagacagaactaattctaggtccactggtggcaaatgtggttgtggattcaaacacttttgggatggtaaggagtatgacaatctaccagaagctttccctattactttagaatggggtggaagagtggtcagagaaacagtatattggttccagtatgaaagtgattcatctttgaatagtaatgtttacgatgttgcaatgaaacttgttaccaagcactttccaggtgaatttgggagtgaaatcctagttcagaaagttgtccacactatattgcatcagactgccaaaaagaatcccgatgattatactcctgtaaatatagatggtgctcacgcccaaagagttggagatgttcaaggacaagaatcagagtctcagctcccaactaaaattattcttactggacagaaaacaaaaactttgcacaaggaggagttaaacatgagtaaaactgaaagaactattcaacagaatattacggaacaggcttctgtaatgcagaaacggaaaacagagaagttaaaacaagaacaaaaagggcaacccaggactgtttctcccagtaccattcgtgatggtccatcctctgcacctgctacacctaccaaggctccctattcaccgacaacttctaaggagaagaagatccgaatcacaactaatgatggacgacagtccatggttacccttaagtcttcaacaaccttttttgaacttcaggaaagtatagccagagaattcaacattcctccatatttacagtgtattcgatacgggtttcctcctaaagagttaatgccaccacaggcaggaatggaaaaggaaccagttcctttacagcatggcgacagaattacaatagaaattctaaaaagtaaagctgaaggtggtcagtctgctgcagcacactcagcccacactgtgaaacaagaagatattgctgttactggtaaactgtcatctaaggaacttcaggagcaagctgaaaaagaaatgtactccttgtgtcttttagcaacattaatgggagaagatgtatggtcttatgcaaagggacttcctcacatgtttcagcagggtggtgtattctacagtattatgaagaaaaccatgggtatggctgatggcaagcattgtacttttccacatctgcctggcaaaacctttgtctataatgcttctgaagatagactggaattgtgtgtggatgctgcaggacatttccccattggtcctgatgttgaagatttagttaaagaggctgtaagtcaggttcgagcagaggctactacaagaagtagggaatcaagtccctcacatgggctattaaaactaggtagtggtggagtagtgaaaaagaaatctgagcaacttcataacgtaactgcctttcagggaaaagggcattctttaggaactgcatctggtaacccacaccttgatccaagagctagggaaacttcagttgtaagaaagcataatacagggacagactttagtaatagttccactaaaacagagccttctgtattcacagcttcttctagtaatagtgagcttattcgaatagctcctggagtagtaacaatgagagacggcaggcagcttgatcctgatttggttgaggcccagcgaaaaaaaattgcaggaaatggtttcttctattcaggcttcaatggacaggcaccttcgggatcaaagtacagagcagtcaccatctgatcttcctcaaaggaaaacagaagttgtgagttcttctgcaaagtctgggagtcttcagactggtttgcctgaatcttttcctttaactggtggtactgaaaatttgaatacagaaacaactgatggctgtgtagcagatgcactgggagcagcctttgccacaaggtcaaaagcacaaaggggaaattccgtggaggagcttgaagagatggatagtcaagatgctgagatgactaacacaactgagccaatggatcactcttgatttaattagaggctaataaaggcagaatgtttattgtgaatatgtaatatttgttggctgggccacgtaacttgattagtcattaaaaatcttgtacgtatataaaaaaaaaaaaaaaaaataataataaataaaaaaaaaaaaaaaattaaaacaataaaaaattaatatataattatattattaataatatttaaaattaatataatattatcattctaaatttaatttatatataataaaaattcttgttgcctctttcccccaattcttttatatatccgcgattttatttcgcgggcccaattctgccctttttgggccaaatccccttaaggggggggtattacatttggggccggtgttc

SEQ ID NO: 325623 - DNA, 969 bp, Homo sapiens
cgcattacagatttgcgtctaagagtgacaggattaacagaagatcatgagtatgaattcagggtctctgcagaaaatgctgctggagttggggaaccaagtccagctacagtttattataaagcctgtgatcctgtgttcaaacctggcccacctaccaatgcacacattgtagacaccactaaaaattcaatcacacttgcctggggtaaacccatctatgatggcggcagtgagatcttgggatatgtagtagaaatctgtaaagcagatgaagaagaatggcaaatagttactccacagactggcctgagagtcactcgatttgaaatttcaaaactcactgaacaccaagagtataaaatacgagtctgtgccctcaacaaagttggtttaggtgaggctacatcagttcctggtactgtgaaaccagaagataaacttgaagcacctgaacttgaccttgactccgaattaagaaaaggaattgttgtaagagctggtggatctgccagaattcacattccattcaaaggtcgtccaacgcctgagatcacttggtctcgagaggaaggtgaattcacagataaggtccaaattgaaaagggagtaaactatacccaactatcaatagataactgtgatagaaatgatgctggaaaatacattcttaagttggaaaacagcagtggatcaaagtctgcttttgtaactgtgaaagttcttgacactccaggaccaccacagaatttggcagtcaaagaagtgagaaaagattctgccttcctggtatgggagccacccatcattgatggaggggcaaaggtcaagaactatgtgattgacaaacgtgagtcaaccagaaaagcgtatgctaatgtgagtagtaaatgcagcaaaacaagttttaaagtggaaaaccttacagaaggagccatttattacttcagagtcatggctgaaaatgaa

SEQ ID NO: 325624 - DNA, 775 bp, Homo sapiens
cttgaggtcggtagatggagaccatcctggccaacatggtgaaaccctgtctctactaaaaatacaaaaattagctgggtgtggtggtgtgtacctgtagtcccagctacccaggaagctaaggcaggagaatcgcttgaatccaggaggcggaggttgcagtgagctgagatcgcactactgcactccagcctgggcgacagagcaagaccaccatctccaaaaattatatatataaaaataattaatattatagaagagaatatacacaactcagagatgcaatggataatataaaaagagtacctgagatgtatttttttaaactcttagagatatctgtaactcaaatttttcttaggtgaggaggattattaactggcacatatgtactaaaaacccctcacttaaaaatggcagtctcaatcctactgtcatcctttttattttaaaataaataaataagcctatctttttgtgcttacatacttaaaaggatatcattaagtatataaacaatcattacttctgtatttttaatgaatgcaggaaaataatatttttatgtataaaaaatgaagaaaaaattttgcaagtctttaagcacataaatacaacagaatagccacccaatttctgtctgaaatctaaattggatggatttgaccatcattctattatctttgatttctacaatgtctatatcttattacctataactattaatttttcatagaattataaatgtcatttgactatgtcaatctgtatatat

SEQ ID NO: 325625 - DNA, 766 bp, Homo sapiens
cgtgcgagtgggcgttgggggtgggcaggactggaagttcctctactccgtgcgtttacggggtcctggaggaggctcctgggacctcgagcttgggggaaagccggtcggggagactgactccccccgaccccatccttccaagcgcgactaccgggacgcctggctcctcccggcggccgtcgggaggcgatgccgaagctttagctcatccacctgcagacatggggcgcagaaagtcaaaacgaaagccgcctcccaagaagaagatgacaggcaccctcgagacccagttcacctgccccttctgcaaccacgagaaatcctgtgatgtgaaaatggaccgtgcccgcaacaccggagtcatctcttgtaccgtgtgcctagaggaattccagacgcccataacgtatctgtcagaacccgtggatgtgtacagtgattggatagacgcctgcgaggcggccaatcagtagcgacacagaggacccgccccctgagcagccccgcgtactgtggatccagctgttcggttctggtccagagacattccaggggtccagggtgtgggtcctgggctgtcacagccgtgtgtgtgtgtgtgtgtgtgtgtgtgtgtgtgtgttgtgtgtgtgtagtgggtgtgcgtgtgtgtgtgggtgtgagtgagtgtgggtgtgtgtggctgcacgtgtcagatagtggatgtgggcgtgatgtgtggcacagagtgtagaggggtgaaggtcctgggaagaggcgcaaa

SEQ ID NO: 325626 - DNA, 1053 bp, Homo sapiens
  misc_feature (8)..(8): n is a, c, g, or t
  misc_feature (17)..(17): n is a, c, g, or t
tggctagntacgaggcngggtgtgaatcggccgagggtcggaagtcactatctcccgggtgaacggagctttcgcagctggagaaggctcatccacctgcagacatggggcgcagaaagtcaaaacgaaagccgcctcccaagaagaagatgacaggcaccctcgagacccagttcacctgccccttctgcaaccacgagaaatcctgtgatgtgaaaatggaccgtgcccgcaacaccggagtcatctcttgtaccgtgtgcctagaggaattccagacgcccataacgtatctgtcagaacccgtggatgtgtacagtgattggatagacgcctgcgaggcggccaatcagtagcgacacagaggacccgccccctgagcagccccgcgtactgtggatccagctgttcggttctggtccagagacattccaggggtccagggtgtgggtcctgggctgtcacagccgtgtgtgtgtgtgtgtgtgtgtgtgtgtgtgtgtgttgtgtgtgtgtagtgggtgtgcgtgtgtgtgtgggtgtgagtgagtgtgggtgtgtgtggctgcacgtgtcactggggtggccgtgagtgtgtgctcacaggtacgcggtggtgtcgggttcctgggcctgaggggcctgaactgatctcacttggctccgaaagcctttgctgtgttccctgcagcccctggccccccagccttggggctctggctccccccggcggaattgggggactgtttcctgacatcctggacaagggaagcccactagaggctggaacaggacctctccagcctcctcaccagcaccgtgcccatctcaactggacttcccgccctccttctccaccttctagtgcccgtggccggggattcaaagccgccgttccccaggtccctgggctgggccctgacagggagccgcccccctccccatggtaaccaggaagcccgtttcatgttcagttgcttttgtagaggaagcaagggctgggatggggacagctgtcaatcacaagcccttaaataaagcagccagcgcaca

SEQ ID NO: 325627 - DNA, 1004 bp, Homo sapiens
  misc_feature (8)..(8): n is a, c, g, or t
  misc_feature (17)..(17): n is a, c, g, or t
tggctagntacgaggcngggtgtgaatcggccgaggggctcatccacctgcagacatggggcgcagaaagtcaaaacgaaagccgcctcccaagaagaagatgacaggcaccctcgagacccagttcacctgccccttctgcaaccacgagaaatcctgtgatgtgaaaatggaccgtgcccgcaacaccggagtcatctcttgtaccgtgtgcctagaggaattccagacgcccataacgtatctgtcagaacccgtggatgtgtacagtgattggatagacgcctgcgaggcggccaatcagtagcgacacagaggacccgccccctgagcagccccgcgtactgtggatccagctgttcggttctggtccagagacattccaggggtccagggtgtgggtcctgggctgtcacagccgtgtgtgtgtgtgtgtgtgtgtgtgtgtgtgtgtgttgtgtgtgtgtagtgggtgtgcgtgtgtgtgtgggtgtgagtgagtgtgggtgtgtgtggctgcacgtgtcactggggtggccgtgagtgtgtgctcacaggtacgcggtggtgtcgggttcctgggcctgaggggcctgaactgatctcacttggctccgaaagcctttgctgtgttccctgcagcccctggccccccagccttggggctctggctccccccggcggaattgggggactgtttcctgacatcctggacaagggaagcccactagaggctggaacaggacctctccagcctcctcaccagcaccgtgcccatctcaactggacttcccgccctccttctccaccttctagtgcccgtggccggggattcaaagccgccgttccccaggtccctgggctgggccctgacagggagccgcccccctccccatggtaaccaggaagcccgtttcatgttcagttgcttttgtagaggaagcaagggctgggatggggacagctgtcaatcacaagcccttaaataaagcagccagcgcaca

SEQ ID NO: 325628 - DNA, 1285 bp, Homo sapiens
  misc_feature (8)..(8): n is a, c, g, or t
  misc_feature (17)..(17): n is a, c, g, or t
tggctagntacgaggcngggtgtgaatcggccgagggtcggaagtcactatctcccgggtgaacggagctttcgcagctggagaaggctcatccacctgcagacatggggcgcagaaagtcaaaacgaaagccgcctcccaagaagaagatgacaggcaccctcgagacccagttcacctgccccttctgcaaccacgagaaatcctgtgatgtgaaaatggaccgtgcccgcaacaccggagtcatctcttgtaccgtgtgcctagaggaattccagacgcccataacgtatctgtcagaacccgtggatgtgtacagtgattggatagacgcctgcgaggcggccaatcagtagcgacacagaggacccgccccctgagcagccccgcgtactgtggatccagctgttcggttctggtccagagacattccaggggtccagggtgtgggtcctgggctgtcacagccgtgtgtgtgtgtgtgtgtgtgtgtgtgtgtgtgtgttgtgtgtgtgtagtgggtgtgcgtgtgtgtgtgggtgtgagtgagtgtgggtgtgtgtggctgcacgtgtcactggggtggccgtgagtgtgtgctcacaggtacgcggtggtgtcgggttcctgggcctgaggggcctgaactgatctcacttggctccgaaagcctttgctgtgttccctgcagcccctggccccccagccttggggctctggctccccccggcggaattgggggactgtttcctgacatcctggacaagggaagcccactagaggctggaacaggacctctccagcctcctcaccagcaccgtgcccatctcaactggacttcccgccctccttctccaccttctagtgcccgtggccggggattcaaagccgccgttccccaggtccctgggctgggccctgacagggagccgcccccctccccatggtaaccaggaagcccgtttcatgttcagttgcttttgtagaggaagcaagggctgggatggggacagctgtcaatcacaagcccttaaataaagcagccagcgcacaaaaaaaaaaaaaaaaaaaaaaaaaaaaaaaaaaaaaaataaaaaaaaaaaaagaaaaacaaacggcggggacattattgttggggggggggagaaaaaagggtgtattaaaagggcctgatggttaaaatgtgattctccgagaaccgctttttttggaaaaaagggggaaaaaaaagggggggcacccaaaagggagggggaaaaatttgaaaaacgggggaacctgaaaa

SEQ ID NO: 325629 - DNA, 1403 bp, Homo sapiens
  misc_feature (8)..(8): n is a, c, g, or t
  misc_feature (17)..(17): n is a, c, g, or t
tggctagntacgaggcngggtgtgaatcggccgagggtcggaagtcactatctcccgggtgaacggagctttcgcagctggagaaggctcatccacctgcagacatggggcgcagaaagtcaaaacgaaagccgcctcccaagaagaagatgacaggcaccctcgagacccagttcacctgccccttctgcaaccacgagaaatcctgtgatgtgaaaatggaccgtgcccgcaacaccggagtcatctcttgtaccgtgtgcctagaggaattccagacgcccataacgtatctgtcagaacccgtggatgtgtacagtgattggatagacgcctgcgaggcggccaatcagtagcgacacagaggacccgccccctgagcagccccgcgtactgtggatccagctgttcggttctggtccagagacattccaggggtccagggtgtgggtcctgggctgtcacagccgtgtgtgtgtgtgtgtgtgtgtgtgtgtgtgtgtgttgtgtgtgtgtagtgggtgtgcgtgtgtgtgtgggtgtgagtgagtgtgggtgtgtgtggctgcacgtgtcactggggtggccgtgagtgtgtgctcacaggtacgcggtggtgtcgggttcctgggcctgaggggcctgaactgatctcacttggctccgaaagcctttgctgtgttccctgcagcccctggccccccagccttggggctctggctccccccggcggaattgggggactgtttcctgacatcctggacaagggaagcccactagaggctggaacaggacctctccagcctcctcaccagcaccgtgcccatctcaactggacttcccgccctccttctccaccttctagtgcccgtggccggggattcaaagccgccgttccccaggtccctgggctgggccctgacagggagccgcccccctccccatggtaaccaggaagcccgtttcatgttcagttgcttttgtagaggaagcaagggctgggatggggacagctgtcaatcacaagcccttaaataaagcagccagcgcacaaaaaaaaaaaaaaaaaaaaaaaaaaaaaaaaaaaaaaagcgtgggggggcgcgcccggggcccccgagaaaaacttttcaaaacccaggggggggggcgcggggggcccagagggaagggaaagggggcaaaaggggtcccacagagaaaacccggggacacgcaaacaaggggggggagatcccacacacaaaaaaaaaaggccccggggggaacaccggaggggtttgaggaaacaacccaaagaaggggaggtccgaggagggcaattacaggggaggcttctaaacaacgggggagcccaaaggagaaccgccagaattaaaaattaacccccggaccgggggggc

SEQ ID NO: 325630 - DNA, 1173 bp, Homo sapiens
cgtgcgagtgggcgttgggggtgggcaggactggaagttcctctactccgtgcgtttacggggtcctggaggaggctcctgggacctcgagcttgggggaaagccggtcggggagactgactccccccgaccccatccttccaagcgcgactaccgggacgcctggctcctcccggcggccgtcgggaggcgatgccgaagctttagctcatccacctgcagacatggggcgcagaaagtcaaaacgaaagccgcctcccaagaagaagatgacaggcaccctcgagacccagttcacctgccccttctgcaaccacgagaaatcctgtgatgtgaaaatggaccgtgcccgcaacaccggagtcatctcttgtaccgtgtgcctagaggaattccagacgcccataacgtatctgtcagaacccgtggatgtgtacagtgattggatagacgcctgcgaggcggccaatcagtagcgacacagaggacccgccccctgagcagccccgcgtactgtggatccagctgttcggttctggtccagagacattccaggggtccagggtgtgggtcctgggctgtcacagccgtgtgtgtgtgtgtgtgtgtgtgtgtgtgtgtgtgttgtgtgtgtgtagtgggtgtgcgtgtgtgtgtgggtgtgagtgagtgtgggtgtgtgtggctgcacgtgtcactggggtggccgtgagtgtgtgctcacaggtacgcggtggtgtcgggttcctgggcctgaggggcctgaactgatctcacttggctccgaaagcctttgctgtgttccctgcagcccctggccccccagccttggggctctggctccccccggcggaattgggggactgtttcctgacatcctggacaagggaagcccactagaggctggaacaggacctctccagcctcctcaccagcaccgtgcccatctcaactggacttcccgccctccttctccaccttctagtgcccgtggccggggattcaaagccgccgttccccaggtccctgggctgggccctgacagggagccgcccccctccccatggtaaccaggaagcccgtttcatgttcagttgcttttgtagaggaagcaagggctgggatggggacagctgtcaatcacaagcccttaaataaagcagccagcgcaca

SEQ ID NO: 325631 - DNA, 1325 bp, Homo sapiens
ggtttcatcctgttgcctaggctggagtgcagtgcctggatcataactctggatcatcactgaaacctgaaactcctgggctcaagcgatcctcccatctcagcctcccaagtagctgggactacaggcctgcaccaccatgcctggctaatttttaattttttttttttagagatgaggcctcactatgttgcccaggctggtatccaggtcctggcatcaagtaatcctctcaccttagcttcccaaagtgctggctgggatcacaggtgtgagccaccatgcctggccttgtctctgttttatagacgaggaaactgtggcacaaagagcttaaataacctgcccaggtcacgcagctcatccacctgcagacatggggcgcagaaagtcaaaacgaaagccgcctcccaagaagaagatgacaggcaccctcgagacccagttcacctgccccttctgcaaccacgagaaatcctgtgatgtgaaaatggaccgtgcccgcaacaccggagtcatctcttgtaccgtgtgcctagaggaattccagacgcccataacgtatctgtcagaacccgtggatgtgtacagtgattggatagacgcctgcgaggcggccaatcagtagcgacacagaggacccgccccctgagcagccccgcgtactgtggatccagctgttcggttctggtccagagacattccaggggtccagggtgtgggtcctgggctgtcacagccgtgtgtgtgtgtgtgtgtgtgtgtgtgtgtgtgtgttgtgtgtgtgtagtgggtgtgcgtgtgtgtgtgggtgtgagtgagtgtgggtgtgtgtggctgcacgtgtcactggggtggccgtgagtgtgtgctcacaggtacgcggtggtgtcgggttcctgggcctgaggggcctgaactgatctcacttggctccgaaagcctttgctgtgttccctgcagcccctggccccccagccttggggctctggctccccccggcggaattgggggactgtttcctgacatcctggacaagggaagcccactagaggctggaacaggacctctccagcctcctcaccagcaccgtgcccatctcaactggacttcccgccctccttctccaccttctagtgcccgtggccggggattcaaagccgccgttccccaggtccctgggctgggccctgacagggagccgcccccctccccatggtaaccaggaagcccgtttcatgttcagttgcttttgtagaggaagcaagggctgggatggggacagctgtcaatcacaagcccttaaataaagcagccagcgcaca

SEQ ID NO: 325632 - DNA, 1095 bp, Homo sapiens
agaggagcggcgaaggaggcagggcctatttgctgggctgtccgggatgggggtggccgggacctgaaagtaggagaggggtttccgcttccggcaggagtcggaagtcactatctcccgggtgaacggagctttcgcagctggagaaggctcatccacctgcagacatggggcgcagaaagtcaaaacgaaagccgcctcccaagaagaagatgacaggcaccctcgagacccagttcacctgccccttctgcaaccacgagaaatcctgtgatgtgaaaatggaccgtgcccgcaacaccggagtcatctcttgtaccgtgtgcctagaggaattccagacgcccataacgtatctgtcagaacccgtggatgtgtacagtgattggatagacgcctgcgaggcggccaatcagtagcgacacagaggacccgccccctgagcagccccgcgtactgtggatccagctgttcggttctggtccagagacattccaggggtccagggtgtgggtcctgggctgtcacagccgtgtgtgtgtgtgtgtgtgtgtgtgtgtgtgtgtgtcgtgtgtgtgtgggtgtgagtgagtgtgggtgtgtgtggctgcacgtgtcactggggtggccgtgagtgtgtgctcacaggtacgcggtggtgtcgggttcctgggcctgaggggcctgaactgatctcacttggctccgaaagcctttgctgtgttccctgcagcccctggccccccagccttggggctctggctccccccggcggaattgggggactgtttcctgacatcctggacaagggaagcccactagaggctggaacaggacctctccagcctcctcaccagcaccgtgcccatctcaactggacttcccgccctccttctccaccttctagtgcccgtggccggggattcaaagccgccgttccccaggtccctgggctgggccctgacagggagccgcccccctccccatggtaaccaggaagcccgtttcatgttcagttgcttttgtagaggaagcaagggctgggatggggacagctgtcaatcacaagcccttaaataaagcagccagcgcaca

SEQ ID NO: 325633 - DNA, 929 bp, Homo sapiens
  misc_feature (8)..(8): n is a, c, g, or t
  misc_feature (17)..(17): n is a, c, g, or t
tggctagntacgaggcngggtgtgaatcggccgagggtcggaagtcactatctcccgggtgaacggagctttcgcagctggagaaggctcatccacctgcagacatggggcgcagaaagtcaaaacgaaagccgcctcccaagaagaagatgacaggcaccctcgagacccagttcacctgccccttctgcaaccacgagaaatcctgtgatgtgaaaatggaccgtgcccgcaacaccggagtcatctcttgtaccgtgtgcctagaggaattccagacgcccataacgtatctgtcagaacccgtggatgtgtacagtgattggatagacgcctgcgaggcggccaatcagtagcgacacagaggacccgccccctgagcagccccgcgtactgtggatccagctgttcggttctggtccagagacattccaggggtccagggtgtgggtcctgggctgtcacagccgtgtgtgtgtgtgtgtgtgtgtgtgtgtgtgtgtgttgtgtgtgtgtagtgggtgtgcgtgtgtgtgtgggtgtgagtgagtgtgggtgtgtgtggctgcacgtgtcactggggtggccgtgagtgtgtgctcacaggtacgcggtggtgtcgggttcctgggcctgaggggcctgaactgatctcacttggctccgaaagcctttgctgtgttccctgcagcccctggccccccagccttggggctctggctccccccggcggaattgggggactgtttcctgacatcctggacaagggaagcccactagaggctggaacaggactacacagcacctcaaaagcaggggcccatcacaaggggaatcgcgatctctataaccaccttagaagtgcgcgggcagggaataaaaggcggcagccccaggaaccgggggggccagaaagggagcgcgcccta

SEQ ID NO: 325634 - DNA, 1097 bp, Homo sapiens
  misc_feature (8)..(8): n is a, c, g, or t
  misc_feature (17)..(17): n is a, c, g, or t
tggctagntacgaggcngggtgtgaatcggccgagggtcggaagtcactatctcccgggtgaacggagctttcgcagctggagaagacggagtcttgctctgttgcccaggctggagtgcaatggtgcgatctcggctcactgcagtctccgcctcttgggttcaggctcatccacctgcagacatggggcgcagaaagtcaaaacgaaagccgcctcccaagaagaagatgacaggcaccctcgagacccagttcacctgccccttctgcaaccacgagaaatcctgtgatgtgaaaatggaccgtgcccgcaacaccggagtcatctcttgtaccgtgtgcctagaggaattccagacgcccataacgtatctgtcagaacccgtggatgtgtacagtgattggatagacgcctgcgaggcggccaatcagtagcgacacagaggacccgccccctgagcagccccgcgtactgtggatccagctgttcggttctggtccagagacattccaggggtccagggtgtgggtcctgggctgtcacagcctgtgtgtgtgtagtgggtgtgcgtgtgtgtgtgggtgtgagtgagtgtgggtgtgtgtggctgcacgtgtcactggggtggccgtgagtgtgtgctcacaggtacgcggtggtgtcgggttcctgggcctgaggggcctgaactgatctcacttggctccgaaagcctttgctgtgttccctgcagcccctggccccccagccttggggctctggctccccccggcggaattgggggactgtttcctgacatcctggacaagggaagcccactagaggctggaacaggacctctccagcctcctcaccagcaccgtgcccatctcaactggacttcccgccctccttctccaccttctagtgcccgtggccggggattcaaagccgccgttccccaggtccctgggctgggccctgacagggagccgcccccctccccatggtaaccaggaagcccgtttcatgttcagttgcttttgtagaggaagcaagggctgggatggggacagctgtcaatcacaagcccttaaataaagcagccagcgcaca

SEQ ID NO: 325635 - DNA, 369 bp, Homo sapiens
ttttttttttttagagatgaggcctcactatgttgcccaggctggtatccaggtcctggcatcaagtaatcctctcaccttagcttcccaaagtgctggctgggatcacaggtgtgagccaccatgcctggccttgtctctgttttatagacgaggaaactgtggcacaaagagcttaaataacctgcccaggtcacgcagtaagtgagagagatggggttagagcctcgtctcaccccttccatccagagtgggacagggaattgtcctcctgcatcaggactgagggcctcgtccctcaagggcagaggccccgggaccacggtgcaagtcccagaccctctttccggcctgctttctagagcattg

SEQ ID NO: 325636 - DNA, 1170 bp, Homo sapiens
aggctcttaggctccacccggccctgaacagctggcttgtcttggagtctcttgtgccaccctccccaggaacagtggcttccttgtattggcgccagcgatgatgggccagctctgtgctaaacggagtcttgctctgttgcccaggctggagtgcaatggtgcgatctcggctcactgcagtctccgcctcttgggttcaggctcatccacctgcagacatggggcgcagaaagtcaaaacgaaagccgcctcccaagaagaagatgacaggcaccctcgagacccagttcacctgccccttctgcaaccacgagaaatcctgtgatgtgaaaatggaccgtgcccgcaacaccggagtcatctcttgtaccgtgtgcctagaggaattccagacgcccataacgtatctgtcagaacccgtggatgtgtacagtgattggatagacgcctgcgaggcggccaatcagtagcgacacagaggacccgccccctgagcagccccgcgtactgtggatccagctgttcggttctggtccagagacattccaggggtccagggtgtgggtcctgggctgtcacagccgtgtgtgtgtgtgtgtgtgtgtgtgtgtgtgtgtgttgtgtgtgtgtagtgggtgtgcgtgtgtgtgtgggtgtgagtgagtgtgggtgtgtgtggctgcacgtgtcactggggtggccgtgagtgtgtgctcacaggtacgcggtggtgtcgggttcctgggcctgaggggcctgaactgatctcacttggctccgaaagcctttgctgtgttccctgcagcccctggccccccagccttggggctctggctccccccggcggaattgggggactgtttcctgacatcctggacaagggaagcccactagaggctggaacaggacctctccagcctcctcaccagcaccgtgcccatctcaactggacttcccgccctccttctccaccttctagtgcccgtggccggggattcaaagccgccgttccccaggtccctgggctgggccctgacagggagccgcccccctccccatggtaaccaggaagcccgtttcatgttcagttgcttttgtagaggaagcaagggctgggatggggacagctgtcaatcacaagcccttaaataaagcagccagcgcaca

SEQ ID NO: 325637 - DNA, 1213 bp, Homo sapiens
tgcccaccacactgtcgggaacataggtacggcgcgggttaatcggacgaggcaggatccatccaaacacccagaaccctcccacctgtccctcctctctccctcacctgccaggggacggacagctgccctgagccttcacacagtgttcctctactcagaagtgcctgtccccacttctctgccctgcagtctgtcatctggatcgaggccatcagataacctgagtgtcactcctcctggatggctcatccacctgcagacatggggcgcagaaagtcaaaacgaaagccgcctcccaagaagaagatgacaggcaccctcgagacccagttcacctgccccttctgcaaccacgagaaatcctgtgatgtgaaaatggaccgtgcccgcaacaccggagtcatctcttgtaccgtgtgcctagaggaattccagacgcccataacgtatctgtcagaacccgtggatgtgtacagtgattggatagacgcctgcgaggcggccaatcagtagcgacacagaggacccgccccctgagcagccccgcgtactgtggatccagctgttcggttctggtccagagacattccaggggtccagggtgtgggtcctgggctgtcacagccgtgtgtgtgtgtgtgtgtgtgtgtgtgtgtgtgtgttgtgtgtgtgtagtgggtgtgcgtgtgtgtgtgggtgtgagtgagtgtgggtgtgtgtggctgcacgtgtcactggggtggccgtgagtgtgtgctcacaggtacgcggtggtgtcgggttcctgggcctgaggggcctgaactgatctcacttggctccgaaagcctttgctgtgttccctgcagcccctggccccccagccttggggctctggctccccccggcggaattgggggactgtttcctgacatcctggacaagggaagcccactagaggctggaacaggacctctccagcctcctcaccagcaccgtgcccatctcaactggacttcccgccctccttctccaccttctagtgcccgtggccggggattcaaagccgccgttccccaggtccctgggctgggccctgacagggagccgcccccctccccatggtaaccaggaagcccgtttcatgttcagttgcttttgtagaggaagcaagggctgggatggggacagctgtcaatcacaagcccttaaataaagcagccagcgcaca

SEQ ID NO: 325638 - DNA, 1525 bp, Homo sapiens
ggtttcatcctgttgcctaggctggagtgcagtgcctggatcataactctggatcatcactgaaacctgaaactcctgggctcaagcgatcctcccatctcagcctcccaagtagctgggactacaggcctgcaccaccatgcctggctaatttttaattttttttttttagagatgaggcctcactatgttgcccaggctggtatccaggtcctggcatcaagtaatcctctcaccttagcttcccaaagtgctggctgggatcacaggtgtgagccaccatgcctggccttgtctctgttttatagacgaggaaactgtggcacaaagagcttaaataacctgcccaggtcacgcagctcatccacctgcagacatggggcgcagaaagtcaaaacgaaagccgcctcccaagaagaagatgacaggcaccctcgagacccagttcacctgccccttctgcaaccacgagaaatcctgtgatgtgaaaatggaccgtgcccgcaacaccggagtcatctcttgtaccgtgtgcctagaggaattccagacgcccataacgtgtatccttggaaacctgggctttttccagagggtggggagggggctggagtccggaccctgctcatctggcccactgtgtgccctggtgcagggccaaagccgtccagaggaacaggtgccacctagtgatttctgtggggtgagaagatgcagggcagggttccaatgccaatgatcgcccttgacctaagtggcccagatctgtcagaacccgtggatgtgtacagtgattggatagacgcctgcgaggcggccaatcagtagcgacacagaggacccgccccctgagcagccccgcgtactgtggatccagctgttcggttctggtccagagacattccaggggtccagggtgtgggtcctgggctgtcacagccgtgtgtgtgtgtgtgtgtgtgtgtgtgtgtgtgtgttgtgtgtgtgtagtgggtgtgcgtgtgtgtgtgggtgtgagtgagtgtgggtgtgtgtggctgcacgtgtcactggggtggccgtgagtgtgtgctcacaggtacgcggtggtgtcgggttcctgggcctgaggggcctgaactgatctcacttggctccgaaagcctttgctgtgttccctgcagcccctggccccccagccttggggctctggctccccccggcggaattgggggactgtttcctgacatcctggacaagggaagcccactagaggctggaacaggacctctccagcctcctcaccagcaccgtgcccatctcaactggacttcccgccctccttctccaccttctagtgcccgtggccggggattcaaagccgccgttccccaggtccctgggctgggccctgacagggagccgcccccctccccatggtaaccaggaagcccgtttcatgttcagttgcttttgtagaggaagcaagggctgggatggggacagctgtcaatcacaagcccttaaataaagcagccagcgcaca

SEQ ID NO: 325639 - DNA, 1818 bp, Homo sapiens
cgcgccgcgtacgtgcagcaaccgactccgcccagcgaggcggagcctagggaagccgcgggcggcccgccgctgtcctggagctgctgctgctgctgcggcggctgcaccggcggcgccgaggccgagatcgaggccggggtgcgcgcttcgcaaacgtgccctatccgtgcggcttggctgcgccagcccttgcggccacccgggcgtctaggcgggtctgtgcgccgcccgggcgaggatgcggctgttccggtggctgctgaagcagccggtgcccaagcagatcgagcgctactcgcgcttttcgccgtcgccgctctccatcaaacaattcctggacttcgggagagataatgcatgtgagaaaacttcatatatgtttctacgaaaggaacttcctgtgcggctggctaacacaatgagagaagttaatcttctgccggataatttacttaaccgcccttcagtgggattggttcagagttggtatatgcagagttttcttgaacttttagaatatgaaaataagagccctgaggatccacaggtcttggataactttctacaagttctgattaaagtcagaaatagacacaatgatgtggttcctacaatggcacaaggagtgattgaatacaaggagaagtttgggtttgatcctttcattagcactaacatccaatattttctggatcggttttataccaaccgcatctctttccgcatgcttattaatcagcacacacttctgtttgggggtgacactaatcctgttcatcctaaacacataggaagtatcgatcccacctgtaacgtggcggatgtggtgaaagatgcatatgaaacagccaagatgctgtgtgaacagtattacctggtagctccagagctggaagttgaagaattcaatgccaaagcgccagacaaacctattcaggtggtttatgtgccctcacatctgtttcatatgctatttgagttgttcaagaactcaatgagagcgacagttgaactctatgaagacagaaaagagggctaccctgctgttaaaaccctcgttactttgggtaaagaagacttatccattaagatcagtgacctaggtggtggtgtcccacttcgaaaaatagatcgtctttttaactacatgtattctactgctcctagacccagcctggagcctaccagagctgcccctttggctggatttggttatggtttgccaatttcccgtctgtatgctagatattttcaaggagatctgaaactgtattccatggaaggagtgggtactgatgctgtcatttatttgaaggctctttcaagtgagtcatttgagagacttccagtttttaataagtccgcatggcgccattacaagaccacgcctgaagccgatgattggagcaatcccagcagtgaacccagggatgcttcaaaatacaaagcaaaacagtaatataccaccttgatttccattacaaagtatctgatttgtctgaataaaggtgtcccactcactgttccaggaattcttgcagtgtagaggtattcacaacagcaagcagggatttggcctgccatcaattttatttaaaaagcaattaagtttgcagtttgtcctcataaacgttgtaggttgaaactgaaaaataagttaaaatgatcaatcaagataaaaggtgatctatccatccaatggaatattatttggccttaaaaaggaaggacatctgatatgtgctgcaacatgggtgaatcttgaagtcattatgctaagtgaaataaaccagacataaaaggacaaatacatcg

SEQ ID NO: 325640 - DNA, 1522 bp, Homo sapiens
cgcgccgcgtacgtgcagcaaccgactccgcccagcgaggcggagcctagggaagccgcgggcggcccgccgctgtcctggagctgctgctgctgctgcggcggctgcaccggcggcgccgaggccgagatcgaggccggggtgcgcgcttcgcaaacgtgccctatccgtgcggcttggctgcgccagcccttgcggccacccgggcgtctaggcgggtctgtgcgccgcccgggcgaggatgcggctgttccggtggctgctgaagcagccggtgcccaagcagatcgagcgctactcgcgcttttcgccgtcgccgctctccatcaaacaattcctggacttcgggagagataatgcatgtgagaaaacttcatatatgtttctacgaaaggaacttcctgtgcggctggctaacacaatgagagaagttaatcttctgccggataatttacttaaccgcccttcagtgggattggttcagagttggtatatgcagagttttcttgaacttttagaatatgaaaataagagccctgaggatccacaggtcttggataactttctacaagttctgattaaagtcagaaatagacacaatgatgtggttcctacaatggcacaaggagtgattgaatacaaggagaagtttgggtttgatcctttcattagcactaacatccaatattttctggatcggttttataccaaccgcatctctttccgcatgcttattaatcagcacacacttctgtttgggggtgacactaatcctgttcatcctaaacacataggaagtatcgatcccacctgtaacgtggcggatgtggtgaaagatgcatatgaaacagccaagatgctgtgtgaacagtattacctggtagctccagagctggaagttgaagaattcaatgccaaagcgccagacaaacctattcaggtggtttatgtgccctcacatctgtttcatatgctatttgagttgttcaagaactcaatgagagcgacagttgaactctatgaagacagaaaagagggctaccctgctgttaaaaccctcgttactttgggtaaagaagacttatccattaagatcagtgacctaggtggtggtgtcccacttcgaaaaatagatcgtctttttaactacatgtattctactgctcctagacccagcctggagcctaccagagctgcccctttggctggatttggttatggtttgccaatttcccgtctgtatgctagatattttcaaggagatctgaaactgtattccatggaaggagtgggtactgatgctgtcatttatttgaaggctctttcaagtgagtcatttgagagacttccagtttttaataagtccgcatggcgccattacaagaccacgcctgaagccgatgattggagcaatcccagcagtgaacccagggatgcttcaaaatacaaagcaaaacagtaatataccaccttgatttccattacaaagtatctgatttgtctgaataaaggtgtcccactc

SEQ ID NO: 325641 - DNA, 2154 bp, Homo sapiens
cgcgccgcgtacgtgcagcaaccgactccgcccagcgaggcggagcctagggaagccgcgggcggcccgccgctgtcctggagctgctgctgctgctgcggcggctgcaccggcggcgccgaggccgagatcgaggccggggtgcgcgcttcgcaaacgtgccctatccgtgcggcttggctgcgccagcccttgcggccacccgggcgtctaggcgggtctgtgcgccgcccgggcgaggatgcggctgttccggtggctgctgaagcagccggtgcccaagcagatcgagcgctactcgcgcttttcgccgtcgccgctctccatcaaacaattcctggacttcgggagagataatgcatgtgagaaaacttcatatatgtttctacgaaaggaacttcctgtgcggctggctaacacaatgagagaagttaatcttctgccggataatttacttaaccgcccttcagtgggattggttcagagttggtatatgcagagttttcttgaacttttagaatatgaaaataagagccctgaggatccacaggtcttggataactttctacaagttctgattaaagtcagaaatagacacaatgatgtggttcctacaatggcacaaggagtgattgaatacaaggagaagtttgggtttgatcctttcattagcactaacatccaatattttctggatcggttttataccaaccgcatctctttccgcatgcttattaatcagcacacacttctgtttgggggtgacactaatcctgttcatcctaaacacataggaagtatcgatcccacctgtaacgtggcggatgtggtgaaagatgcatatgaaacagccaagatgctgtgtgaacagtattacctggtagctccagagctggaagttgaagaattcaatgccaaagcgccagacaaacctattcaggtggtttatgtgccctcacatctgtttcatatgctatttgagttgttcaagaactcaatgagagcgacagttgaactctatgaagacagaaaagagggctaccctgctgttaaaaccctcgttactttgggtaaagaagacttatccattaagatcagtgacctaggtggtggtgtcccacttcgaaaaatagatcgtctttttaactacatgtattctactgctcctagacccagcctggagcctaccagagctgcccctttggctggatttggttatggtttgccaatttcccgtctgtatgctagatattttcaaggagatctgaaactgtattccatggaaggagtgggtactgatgctgtcatttatttgaaggctctttcaagtgagtcatttgagagacttccagtttttaataagtccgcatggcgccattacaagaccacgcctgaagccgatgattggagcaatcccagcagtgaacccagggatgcttcaaaatacaaagcaaaacaagacaagatcaagactaatagaactttctagaggactgaatgctgtggtcctctctgtgaagaaagattgccttctgcaagtcaaacagagagaactgctttctcccacctgctctgagcgtggcatcacagttattcctagtgcttaaatgtgtattttctctctaccacctggactttcccaaagagtttttcctgtagctactccagatcttccactaaagtagtaactttttaatgacatcttgctgtggtgtgattgatgcctgtcaccgaagagcacagagcctccttacagctcttgtgccctcgtactctccatcttgttatcatagcatctgatgtcttcagtccttccaggattctgtgcgcctttcccattccagatacagcagatcgtactgttgctccttgtgaccaaataccatatttgtcccaaacctccacctagggccctgggaccctgaaagtggaagacatcaggtggccatgccctgatgatttagtcccagagccctccgtctctcccgtgcctccctccgccactctatgatttagacttttgccttcttccatctgatcggattctcattgtgagatgtggtgactttcatgttagatcttcttcattgatgccttggttttattttaaaattcatttgtatatgtctgttgattaaagcattcgaaatgtta

SEQ ID NO: 325642 - DNA, 2188 bp, Homo sapiens
cgcgccgcgtacgtgcagcaaccgactccgcccagcgaggcggagcctagggaagccgcgggcggcccgccgctgtcctggagctgctgctgctgctgcggcggctgcaccggcggcgccgaggccgagatcgaggccggggtgcgcgcttcgcaaacgtgccctatccgtgcggcttggctgcgccagcccttgcggccacccgggcgtctaggcgggtctgtgcgccgcccgggcgaggatgcggctgttccggtggctgctgaagcagccggtgcccaagcagatcgagcgctactcgcgcttttcgccgtcgccgctctccatcaaacaattcctggacttcgggagagataatgcatgtgagaaaacttcatatatgtttctacgaaaggaacttcctgtgcggctggctaacacaatgagagaagttaatcttctgccggataatttacttaaccgcccttcagtgggattggttcagagttggtatatgcagagttttcttgaacttttagaatatgaaaataagagccctgaggatccacaggtcttggataactttctacaagttctgattaaagtcagaaatagacacaatgatgtggttcctacaatggcacaaggagtgattgaatacaaggagaagtttgggtttgatcctttcattagcactaacatccaatattttctggatcggttttataccaaccgcatctctttccgcatgcttattaatcagcacagtaagttggagtttgttggtccagttttgaaaagcacttctgtttgggggtgacactaatcctgttcatcctaaacacataggaagtatcgatcccacctgtaacgtggcggatgtggtgaaagatgcatatgaaacagccaagatgctgtgtgaacagtattacctggtagctccagagctggaagttgaagaattcaatgccaaagcgccagacaaacctattcaggtggtttatgtgccctcacatctgtttcatatgctatttgagttgttcaagaactcaatgagagcgacagttgaactctatgaagacagaaaagagggctaccctgctgttaaaaccctcgttactttgggtaaagaagacttatccattaagatcagtgacctaggtggtggtgtcccacttcgaaaaatagatcgtctttttaactacatgtattctactgctcctagacccagcctggagcctaccagagctgcccctttggctggatttggttatggtttgccaatttcccgtctgtatgctagatattttcaaggagatctgaaactgtattccatggaaggagtgggtactgatgctgtcatttatttgaaggctctttcaagtgagtcatttgagagacttccagtttttaataagtccgcatggcgccattacaagaccacgcctgaagccgatgattggagcaatcccagcagtgaacccagggatgcttcaaaatacaaagcaaaacaagacaagatcaagactaatagaactttctagaggactgaatgctgtggtcctctctgtgaagaaagattgccttctgcaagtcaaacagagagaactgctttctcccacctgctctgagcgtggcatcacagttattcctagtgcttaaatgtgtattttctctctaccacctggactttcccaaagagtttttcctgtagctactccagatcttccactaaagtagtaactttttaatgacatcttgctgtggtgtgattgatgcctgtcaccgaagagcacagagcctccttacagctcttgtgccctcgtactctccatcttgttatcatagcatctgatgtcttcagtccttccaggattctgtgcgcctttcccattccagatacagcagatcgtactgttgctccttgtgaccaaataccatatttgtcccaaacctccacctagggccctgggaccctgaaagtggaagacatcaggtggccatgccctgatgatttagtcccagagccctccgtctctcccgtgcctccctccgccactctatgatttagacttttgccttcttccatctgatcggattctcattgtgagatgtggtgactttcatgttagatcttcttcattgatgccttggttttattttaaaattcatttgtatatgtctgttgattaaagcattcgaaatgtta

SEQ ID NO: 325643 - DNA, 826 bp, Homo sapiens
cgcgccgcgtacgtgcagcaaccgactccgcccagcgaggcggagcctagggaagccgcgggcggcccgccgctgtcctggagctgctgctgctgctgcggcggctgcaccggcggcgccgaggccgagatcgaggccggggtgcgcgcttcgcaaacgtgccctatccgtgcggcttggctgcgccagcccttgcggccacccgggcgtctaggcgggtctgtgcgccgcccgggcgaggatgcggctgttccggtggctgctgaagcagccggtgcccaagcagatcgagcgctactcgcgcttttcgccgtcgccgctctccatcaaacaattcctggacttcgggagagataatgcatgtgagaaaacttcatatatgtttctacgaaaggaacttcctgtgcggctggctaacacaatgagagaagttaatcttctgccggataatttacttaaccgcccttcagtgggattggttcagagttggtatatgcagagttttcttgaacttttagaatatgaaaataagagccctgaggatccacaggtcttggataagtaagtatggtaccacttagctgaaagtaaaaatatctaggtaagaaagattttggtaaatgtaattcaagtcattaagactcaaggagtatgaatgtggacaaaagcgttcattttcttaatgagtagtgactcaacattgagttttttttttttaattcgagctaagaatgtaacacaatacaaaagtaataatgacactttcagttttgcttttatgatctaatacttaatacctttacccaaggtgaactgggcagtcact

SEQ ID NO: 325644 - DNA, 2438 bp, Homo sapiens
cgcgccgcgtacgtgcagcaaccgactccgcccagcgaggcggagcctagggaagccgcgggcggcccgccgctgtcctggagctgctgctgctgctgcggcggctgcaccggcggcgccgaggccgagatcgaggccggggtgcgcgcttcgcaaacgtgccctatccgtgcggcttggctgcgccagcccttgcggccacccgggcgtctaggcgggtctgtgcgccgcccgggcgaggatgcggctgttccggtggctgctgaagcagccggtgcccaagcagatcgagcgctactcgcgcttttcgccgtcgccgctctccatcaaacaattcctggacttcgggagagataatgcatgtgagaaaacttcatatatgtttctacgaaaggaacttcctgtgcggctggctaacacaatgagagaagttaatcttctgccggataatttacttaaccgcccttcagtgggattggttcagagttggtatatgcagagttttcttgaacttttagaatatgaaaataagagccctgaggatccacaggtcttggataactttctacaagttctgattaaagtcagaaatagacacaatgatgtggttcctacaatggcacaaggagtgattgaatacaaggagaagtttgggtttgatcctttcattagcactaacatccaatattttctggatcggttttataccaaccgcatctctttccgcatgcttattaatcagcacacacttctgtttgggggtgacactaatcctgttcatcctaaacacataggaagtatcgatcccacctgtaacgtggcggatgtggtgaaagatgcatatgaaacagccaagatgctgtgtgaacagtattacctggtagctccagagctggaagttgaagaattcaatgccaaagcgccagacaaacctattcaggtggtttatgtgccctcacatctgtttcatatgctatttgagttgttcaagaactcaatgagagcgacagttgaactctatgaagacagaaaagagggctaccctgctgttaaaaccctcgttactttgggtaaagaagacttatccattaagatcagtgacctaggtggtggtgtcccacttcgaaaaatagatcgtctttttaactacatgtattctactgctcctagacccagcctggagcctaccagagctgcccctttggctggatttggttatggtttgccaatttcccgtctgtatgctagatattttcaaggagatctgaaactgtattccatggaaggagtgggtactgatgctgtcatttatttgaaggctctttcaagtgagtcatttgagagacttccagtttttaataagtccgcatggcgccattacaagaccacgcctgaagccgatgattggagcaatcccagcagtgaacccagggatgcttcaaaatacaaagcaaaacaagacaagatcaagactaatagaactttctagaggactgaatgctgtggtcctctctgtgaagaaagattgccttctgcaagtcaaacagagagaactgctttctcccacctgctctgagcgtggcatcacagttattcctagtgcttaaatgtgtattttctctctaccacctggactttcccaaagagtttttcctgtagctactccagatcttccactaaagtagtaactttttaatgacatcttgctgtggtgtgattgatgcctgtcaccgaagagcacagagcctccttacagctcttgtgccctcgtactctccatcttgttatcatagcatctgatgtcttcagtccttccaggattctgtgcgcctttcccattccagatacagcagatcgtactgttgctccttgtgaccaaataccatatttgtcccaaacctccacctagggccctgggaccctgaaagtggaagacatcaggtggccatgccctgatgatttagtcccagagccctccgtctctcccgtgcctccctccgccactctatgatttagacttttgccttcttccatctgatcggattctcattgtgagatgtggtgactttcatgttagatcttcttcattgatgccttggttttattttaaaattcatttgtatatgtctgttgattaaagcattcgaaatgttatcttagaatttttcacccaactgcttggtttcaaagatcttaagtgaaaaactgcctcctggtcaataccaaatttgtacagagtgtgaagtggagtttttatgcttctgtcaaacttccatccatctaatactgtacctgtgtcatattttattcctttgtagtcttctaaggaattggaagtttctgtatgatgcgctttactagttgtaaaatagactatcagagggaaaaggcctctctagtttatttttgaaaaatgctccaggtcttaataattttca

SEQ ID NO: 325645 - DNA, 1085 bp, Homo sapiens
  misc_feature (127)..(127): n is a, c, g, or t
  misc_feature (133)..(133): n is a, c, g, or t
  misc_feature (135)..(135): n is a, c, g, or t
  misc_feature (138)..(138): n is a, c, g, or t
  misc_feature (140)..(140): n is a, c, g, or t
  misc_feature (144)..(144): n is a, c, g, or t
  misc_feature (146)..(146): n is a, c, g, or t
  misc_feature (161)..(162): n is a, c, g, or t
  misc_feature (1005)..(1005): n is a, c, g, or t
  misc_feature (1016)..(1016): n is a, c, g, or t
  misc_feature (1033)..(1033): n is a, c, g, or t
gcatgccctgtgaccaggcagggatgggctatgtcgctgttggggaccacgagggatggccagtgaggaggggtcagaggctgtgaggggaggactgaggctgggtgtggtgtcctgggatggaagnggagancnaancngatnanagacggcgacaagannaacgacggccgcattgacttcgacgagttcctgaagatgatggagggcgtgcagtaaggagtggacagtcgcctctaccaagatcgcgtgtccctagggtggtggagtgcaaaggaggcgacctgcaacagaggagtcccggtcaccagcaaccatgacggaccagcaggctgaggccaggtcctacctcagcgaagagatgatcgctgagttcaaggctgcctttgacatgtttgatgctgatggtggtggggacatcagcgtcaaggagttgggcacggtgatgaggatgctgggccagacacccaccaaggaggagctggacgccatcatcgaggaggtggatgaggacggcagcggcaccatcgacttcgaggagttcttggtcatgatggtgcgccagatgaaagaggacgcgaaagggaagagcgaggaggagctggccgagtgcttccgcatcttcgacaggaatgcagacggctacatcgacccggaggagctggctgagattttcagggcctccggggagcacgtgacggacgaggagatcgaatctctgatgaaagacggcgacaagaacaacgacggccgcattgacttcgacgagttcctgaagatgatggagggcgtgcagtaaggagtggacagtcgcctctaccaagatcgcgtgtccctagggtgtgggagactccgccctgccgggtccccaccagggaggcgcgaccccttgtgggtctttgtctggaaggaataaaagcaaatgttccaaaaaaaaaaaaaaaaaaaaaaatttgggcgcgcggcccaaaaattttaaacactcgtggggcgggcccaaggaangacatggccanggccaagaaccggcganagggggtcccaaaaaaccgggcacgtggaacccaaggtcggctggttaagcc

SEQ ID NO: 325646 - DNA, 353 bp, Homo sapiens
  misc_feature (127)..(127): n is a, c, g, or t
  misc_feature (133)..(133): n is a, c, g, or t
  misc_feature (135)..(135): n is a, c, g, or t
  misc_feature (138)..(138): n is a, c, g, or t
  misc_feature (140)..(140): n is a, c, g, or t
  misc_feature (144)..(144): n is a, c, g, or t
  misc_feature (146)..(146): n is a, c, g, or t
  misc_feature (161)..(162): n is a, c, g, or t
gcatgccctgtgaccaggcagggatgggctatgtcgctgttggggaccacgagggatggccagtgaggaggggtcagaggctgtgaggggaggactgaggctgggtgtggtgtcctgggatggaagnggagancnaancngatnanagacggcgacaagannaacgacggccgcattgacttcgacgagttcctgaagatgatggagggcgtgcagtaaggagtggacagtcgcctctaccaagatcgcgtgtccctagggtgtgggagactccgccctgccgggtccccaccagggaggcgcgaccccttgtgggtctttgtctggaaggaataaaagcaaatgttccaaaa

SEQ ID NO: 325647 - DNA, 933 bp, Homo sapiens
  misc_feature (127)..(127): n is a, c, g, or t
  misc_feature (133)..(133): n is a, c, g, or t
  misc_feature (135)..(135): n is a, c, g, or t
  misc_feature (138)..(138): n is a, c, g, or t
  misc_feature (140)..(140): n is a, c, g, or t
  misc_feature (144)..(144): n is a, c, g, or t
  misc_feature (146)..(146): n is a, c, g, or t
  misc_feature (161)..(162): n is a, c, g, or t
gcatgccctgtgaccaggcagggatgggctatgtcgctgttggggaccacgagggatggccagtgaggaggggtcagaggctgtgaggggaggactgaggctgggtgtggtgtcctgggatggaagnggagancnaancngatnanagacggcgacaagannaacgacggccgcattgacttcgacgagttcctgaagatgatggagggcgtgcagtaaggagtggacagtcgcctctaccaagatcgcgtgtccctagggtggtggagtgcaaaggaggcgacctgcaacagaggagtcccggtcaccagcaaccatgacggaccagcaggctgaggccaggtcctacctcagcgaagagatgatcgctgagttcaaggctgcctttgacatgtttgatgctgatggtggtggggacatcagcgtcaaggagttgggcacggtgatgaggatgctgggccagacacccaccaaggaggagctggacgccatcatcgaggaggtggatgaggacggcagcggcaccatcgacttcgaggagttcttggtcatgatggtgcgccagatgaaagaggacgcgaaagggaagagcgaggaggagctggccgagtgcttccgcatcttcgacaggaatgcagacggctacatcgacccggaggagctggctgagattttcagggcctccggggagcacgtgacggacgaggagatcgaatctctgatgaaagacggcgacaagaacaacgacggccgcattgacttcgacgagttcctgaagatgatggagggcgtgcagtaaggagtggacagtcgcctctaccaagatcgcgtgtccctagggtgtgggagactccgccctgccgggtccccaccagggaggcgcgaccccttgtgggtctttgtctggaaggaataaaagcaaatgttccaaaa

SEQ ID NO: 325648 - DNA, 699 bp, Homo sapiens
gctagagcaggccaggtcatctttgggtggtggagtgcaaaggaggcgacctgcaacagaggagtcccggtcaccagcaaccatgacggaccagcaggctgaggccaggtcctacctcagcgaagagatgatcgctgagttcaaggctgcctttgacatgtttgatgctgatggtggtggggacatcagcgtcaaggagttgggcacggtgatgaggatgctgggccagacacccaccaaggaggagctggacgccatcatcgaggaggtggatgaggacggcagcggcaccatcgacttcgaggagttcttggtcatgatggtgcgccagatgaaagaggacgcgaaagggaagagcgaggaggagctggccgagtgcttccgcatcttcgacaggaatgcagacggctacatcgacccggaggagctggctgagattttcagggcctccggggagcacgtgacggacgaggagatcgaatctctgatgaaagacggcgacaagaacaacgacggccgcattgacttcgacgagttcctgaagatgatggagggcgtgcagtaaggagtggacagtcgcctctaccaagatcgcgtgtccctagggtgtgggagactccgccctgccgggtccccaccagggaggcgcgaccccttgtgggtctttgtctggaaggaataaaagcaaatgttccaaaa

SEQ ID NO: 325649 - DNA, 780 bp, Homo sapiens
gggcccttggctccaggagggacttgggaagcctgggtcggcctgagggagtcccaggcctgccgcagagtcatcccagtccggccagtgttcacaggcttgcacaatctgatttgaacctcacacatgggaagtaggcaaacagggaaactgaggaccagagaggacggaccagcaggctgaggccaggtcctacctcagcgaagagatgatcgctgagttcaaggctgcctttgacatgtttgatgctgatggtggtggggacatcagcgtcaaggagttgggcacggtgatgaggatgctgggccagacacccaccaaggaggagctggacgccatcatcgaggaggtggatgaggacggcagcggcaccatcgacttcgaggagttcttggtcatgatggtgcgccagatgaaagaggacgcgaaagggaagagcgaggaggagctggccgagtgcttccgcatcttcgacaggaatgcagacggctacatcgacccggaggagctggctgagattttcagggcctccggggagcacgtgacggacgaggagatcgaatctctgatgaaagacggcgacaagaacaacgacggccgcattgacttcgacgagttcctgaagatgatggagggcgtgcagtaaggagtggacagtcgcctctaccaagatcgcgtgtccctagggtgtgggagactccgccctgccgggtccccaccagggaggcgcgaccccttgtgggtctttgtctggaaggaataaaagcaaatgttccaaaa

SEQ ID NO: 325650 - DNA, 708 bp, Homo sapiens
  misc_feature (127)..(127): n is a, c, g, or t
  misc_feature (133)..(133): n is a, c, g, or t
  misc_feature (135)..(135): n is a, c, g, or t
  misc_feature (138)..(138): n is a, c, g, or t
  misc_feature (140)..(140): n is a, c, g, or t
  misc_feature (144)..(144): n is a, c, g, or t
  misc_feature (146)..(146): n is a, c, g, or t
  misc_feature (161)..(162): n is a, c, g, or t
gcatgccctgtgaccaggcagggatgggctatgtcgctgttggggaccacgagggatggccagtgaggaggggtcagaggctgtgaggggaggactgaggctgggtgtggtgtcctgggatggaagnggagancnaancngatnanagacggcgacaagannaacgacggccgcattgacttcgacgagttcctgaagatgatggagggcgtgcagtaaggagtggacagtcgcctctaccaagatcgcgtgtccctagggtggtggagtgcaaaggaggcgacctgcaacagaggagtcccggtcaccagcaaccatgacggaccagcaggctgaggccaggtcctacctcagcgaagagatgatcgctgagttcaaggctgccctctagaagtaggctgtgtttccaggtgttcacccgtggtgcccacagtgccgacccgtggctgggtcgagctccatgttcctaagctaggtctaggtctacactcctaggacgcacgcatatcagcccgtgtaccctgtgacagtgactgtccccacctcctgtgttagtggtgcccttactgccgtcgctcatccactcgtgtgggacgtaggattgcacagggctgtgcagtggcgtgtagggaacactgccctggctcagcgtgcgagctaaggtggcgatgtatgcgatgggactctgcatgggatagtacagttgtg

SEQ ID NO: 325651 - DNA, 2797 bp, Homo sapiens
cgggccgccgggacgggcacgggcgcgcgggctccggcgggcgccggctgccttcctccgtcgctcgctgtctctcccggccgcattctcctccgctgcggggccgagctctccccagcgctcgcaggaaggaagaagggagccgaggacgccgagaagttcccgcggcagccgcggatcccggccaaggcggaggctgcggctccgacggggcaggagcgcgatccacggcgaggggcgtacggccaaagggtccgcggcgtggagcgctcggaccttccgctctcccccgggcgtgggccgggaccccatgagacgcgcccacgaggggcgcgagattcctagcttgggcggcgctaggcggagggaggtgttgcaggccggccggagccagagagctgccggcaggaggcggcggcggcaagaacttgaacttggcgtcgggagcgggcgccccggaggccccccgccggggccggggcgccgagggacctgcgccgcagcgctgccccccgaatggccgcggcggcggaccgggctcccgcgccgcggccctaggcggcctctcgccatggccaagtggctaaacaagtacttcagcttgggcaacagcaagaccaagagccccccgcagccgccgcggccagactaccgcgagcagcggcgccgaggcgagcggccctcgcagcccccccaggccgtgccgcaggcctcctccgccgcctcggcgtcctgcggtccggccaccgcctcctgcttctcagcctcttcgggctcgctgcccgacgacagcggcagcaccagcgacctcatccgcgcctaccgcgcgcagaaggagcgagacttcgaggacccctacaacgggcctggctcgtcgctgcgcaaactgcgcgccatgtgccgcctggactactgcggcggcagcggggagccaggcggggtccagcgcgccttctcggcctcgtccgcgtcgggcgccgcgggctgttgctgcgcctcctcgggcgcgggggccgccgcgtcctcgtcctcgtcctccggctctccgcatctctaccgcagcagcagcgagcggcggcccgccacgccggccgaggtgcgctacatctcccccaagcaccgcctcatcaaagtggagagcgccgcgggcggtggggccggggaccccctggggggcgcctgcgcgggcggccgcacctggagcccgacggcctgcggaggcaagaaactgctcaacaagtgcgccgcctcagccgcggaggagagcggggccggcaagaaggacaaggtgaccatagccgatgactactcagatccctttgatgccaagaatgatctcaagagcaaagcaggaaagggggagagtgctggctacatggagccctatgaggcacagaggatcatgacagaatttcagaggcaggaaagtgtccggtcccagcataaaggtatccagttatatgacaccccttacgaacctgaaggccaaagtgttgactcggactcggagagcacagtcagcccccgactgcgggagagcaagctgccccaggatgacgacaggcccgccgatgagtacgaccagccttgggagtggaaccgggtcaccatcccagccctggcagcacagtttaatggcaacgagaagcggcagtcatccccctcaccttcgcgggaccggcggcgccagcttcgtgcccctggagggggctttaagcctatcaaacatgggagccctgagttctgcgggatcctaggagaaagggtggatcctgccgtccccctggagaagcaaatatggtatcacggagccatcagcagaggagacgccgagaacctgctgcgactctgcaaggagtgtagctaccttgtccggaacagccagaccagcaagcatgactactccctctccctgaggagcaaccagggttttatgcacatgaaactggccaaaaccaaagagaaatacgttctgggtcagaacagccctccgttcgacagtgtcccggaagtcatccactactacaccaccagaaagctacccatcaaaggggctgagcacttgtccctcctctatcccgtggctgtgaggaccctgtgagcggaccagacctgccctgctctgtgacagagcctgagacttggaggtgccagaggccccccaccaaccagcccagccactgttgctggctgtgtcgtttgtgttgtgtgtatggtactagcacaccactgcatgtctctagaatgctgttgccacttacgggggctggagaaggcctggataaagacagaagggcggcaacacaccaccccagcccccacccccaccctctccttgagtttctgtgaattaaaatatttgcaaatccaaagagatgccttccaggatgaacaaaggcagaccagctccgaggggcggggtagggtggggcgggagctccctggctgacatctctttgttctccagctgtctcaaattcacacctctgtacagggcaaagttttcccacaggagcccccctactgatgctgggagccaaatgctggtgctttgagagtcccggaggccccggggttcccgccccgctggtgtgtatatgtgtgtctgtgtgagtgtgtgtgtgagtacagatgtgagaaggtggtcacacacagatgggtaagcccactgatctacttgtagtcactcagtgtaatcattaggctatcttcaaggaatcattgtgcagtcaaaaagaggattcaattatttatgaatagggtgtgtaaataaaatagtcatttaatataaaaatta

SEQ ID NO: 325652 - DNA, 2370 bp, Homo sapiens
cgggccgccgggacgggcacgggcgcgcgggctccggcgggcgccggctgccttcctccgtcgctcgctgtctctcccggccgcattctcctccgctgcggggccgagctctccccagcgctcgcaggaaggaagaagggagccgaggacgccgagaagttcccgcggcagccgcggatcccggccaaggcggaggctgcggctccgacggggcaggagcgcgatccacggcgaggggcgtacggccaaagggtccgcggcgtggagcgctcggaccttccgctctcccccgggcgtgggccgggaccccatgagacgcgcccacgaggggcgcgagattcctagcttgggcggcgctaggcggagggaggtgttgcaggccggccggagccagagagctgccggcaggaggcggcggcggcaagaacttgaacttggcgtcgggagcgggcgccccggaggccccccgccggggccggggcgccgagggacctgcgccgcagcgctgccccccgaatggccgcggcggcggaccgggctcccgcgccgcggccctaggcggcctctcgccatggccaagtggctaaacaagtacttcagcttgggcaacagcaagaccaagagccccccgcagccgccgcggccagactaccgcgagcagcggcgccgaggcgagcggccctcgcagcccccccaggccgtgccgcaggcctcctccgccgcctcggcgtcctgcggtccggccaccgcctcctgcttctcagcctcttcgggctcgctgcccgacgacagcggcagcaccagcgacctcatccgcgcctaccgcgcgcagaaggagcgagacttcgaggacccctacaacgggcctggctcgtcgctgcgcaaactgcgcgccatgtgccgcctggactactgcggcggcagcggggagccaggcggggtccagcgcgccttctcggcctcgtccgcgtcgggcgccgcgggctgttgctgcgcctcctcgggcgcgggggccgccgcgtcctcgtcctcgtcctccggctctccgcatctctaccgcagcagcagcgagcggcggcccgccacgccggccgaggtgcgctacatctcccccaagcaccgcctcatcaaagtggagagcgccgcgggcggtggggccggggaccccctggggggcgcctgcgcgggcggccgcacctggagcccgacggcctgcggaggcaagaaactgctcaacaagtgcgccgcctcagccgcggaggagagcggggccggcaagaaggacaaggtgaccatagccgatgactactcagatccctttgatgccaagaatgatctcaagagcaaagcaggaaagggggagagtgctggctacatggagccctatgaggcacagaggatcatgacagaatttcagaggcaggaaagtgtccggtcccagcataaaggtatccagttatatgacaccccttacgaacctgaaggccaaagtgttgactcggactcggagagcacagtcagcccccgactgcgggagagcaagctgccccaggatgacgacaggcccgccgatgagtacgaccagccttgggagtggaaccgggtcaccatcccagccctggcagcacagtttaatggcaacgagaagcggcagtcatccccctcaccttcgcgggaccggcggcgccagcttcgtgcccctggagggggctttaagcctatcaaacatgggagccctgagttctgcgggatcctaggagaaagggtggatcctgccgtccccctggagaagcaaatatggtatcacggagccatcagcagaggagacgccgagaacctgctgcgactctgcaaggagtgtagctaccttgtccggaacagccagaccagcaagcatgactactccctctccctgaggagcaaccagggttttatgcacatgaaactggccaaaaccaaagagaaatacgttctgggtcagaacagccctccgttcgacagtgtcccggaagtcatccactactacaccaccagaaagctacccatcaaaggggctgagcacttgtccctcctctatcccgtggctgtgaggaccctgtgagcggaccagacctgccctgctctgtgacagagcctgagacttggaggtgccagaggccccccaccaaccagcccagccactgttgctggctgtgtcgtttgtgttgtgtgtatggtactagcacaccactgcatgtctctagaatgctgttgccacttacgggggctggagaaggcctggataaagacagaagggcggcaacacaccaccccagcccccacccccaccctctccttgagtttctgtgaattaaaatatttgcaaatcca

SEQ ID NO: 325653 - DNA, 2301 bp, Homo sapiens
cgggccgccgggacgggcacgggcgcgcgggctccggcgggcgccggctgccttcctccgtcgctcgctgtctctcccggccgcattctcctccgctgcggggccgagctctccccagcgctcgcaggaaggaagaagggagccgaggacgccgagaagttcccgcggcagccgcggatcccggccaaggcggaggctgcggctccgacggggcaggagcgcgatccacggcgaggggcgtacggccaaagggtccgcggcgtggagcgctcggaccttccgctctcccccgggcgtgggccgggaccccatgagacgcgcccacgaggggcgcgagattcctagcttgggcggcgctaggcggagggaggtgttgcaggccggccggagccagagagctgccggcaggaggcggcggcggcaagaacttgaacttggcgtcgggagcgggcgccccggaggccccccgccggggccggggcgccgagggacctgcgccgcagcgctgccccccgaatggccgcggcggcggaccgggctcccgcgccgcggccctaggcggcctctcgccatggccaagtggctaaacaagtacttcagcttgggcaacagcaagaccaagagccccccgcagccgccgcggccagactaccgcgagcagcggcgccgaggcgagcggccctcgcagcccccccaggccgtgccgcaggcctcctccgccgcctcggcgtcctgcggtccggccaccgcctcctgcttctcagcctcttcgggctcgctgcccgacgacagcggcagcaccagcgacctcatccgcgcctaccgcgcgcagaaggagcgagacttcgaggacccctacaacgggcctggctcgtcgctgcgcaaactgcgcgccatgtgccgcctggactactgcggcggcagcggggagccaggcggggtccagcgcgccttctcggcctcgtccgcgtcgggcgccgcgggctgttgctgcgcctcctcgggcgcgggggccgccgcgtcctcgtcctcgtcctccggctctccgcatctctaccgcagcagcagcgagcggcggcccgccacgccggccgaggtgcgctacatctcccccaagcaccgcctcatcaaagtggagagcgccgcgggcggtggggccggggaccccctggggggcgcctgcgcgggcggccgcacctggagcccgacggcctgcggaggcaagaaactgctcaacaagtgcgccgcctcagccgcggaggagagcggggccggcaagaaggacaaggtgaccatagccgatgactactcagatccctttgatgccaagaatgatctcaagagcaaagcaggaaagggggagagtgctggctacatggagccctatgaggcacagaggatcatgacagaatttcagaggcaggaaagtgtccggtcccagcataaaggtatccagttatatgacaccccttacgaacctgaaggccaaagtgttgactcggactcggagagcacagtcagcccccgactgcgggagagcaactacccatcaaaggggctgagcacttgtccctcctctatcccgtggctgtgaggaccctgtgagcggaccagacctgccctgctctgtgacagagcctgagacttggaggtgccagaggccccccaccaaccagcccagccactgttgctggctgtgtcgtttgtgttgtgtgtatggtactagcacaccactgcatgtctctagaatgctgttgccacttacgggggctggagaaggcctggataaagacagaagggcggcaacacaccaccccagcccccacccccaccctctccttgagtttctgtgaattaaaatatttgcaaatccaaagagatgccttccaggatgaacaaaggcagaccagctccgaggggcggggtagggtggggcgggagctccctggctgacatctctttgttctccagctgtctcaaattcacacctctgtacagggcaaagttttcccacaggagcccccctactgatgctgggagccaaatgctggtgctttgagagtcccggaggccccggggttcccgccccgctggtgtgtatatgtgtgtctgtgtgagtgtgtgtgtgagtacagatgtgagaaggtggtcacacacagatgggtaagcccactgatctacttgtagtcactcagtgtaatcattaggctatcttcaaggaatcattgtgcagtcaaaaagaggattcaattatttatgaatagggtgtgtaaataaaatagtcatttaatataaaaatta

SEQ ID NO: 325654 - DNA, 2765 bp, Homo sapiens
cgggccgccgggacgggcacgggcgcgcgggctccggcgggcgccggctgccttcctccgtcgctcgctgtctctcccggccgcattctcctccgctgcggggccgagctctccccagcgctcgcaggaaggaagaagggagccgaggacgccgagaagttcccgcggcagccgcggatcccggccaaggcggaggctgcggctccgacggggcaggagcgcgatccacggcgaggggcgtacggccaaagggtccgcggcgtggagcgctcggaccttccgctctcccccgggcgtgggccgggaccccatgagacgcgcccacgaggggcgcgagattcctagcttgggcggcgctaggcggagggaggtgttgcaggccggccggagccagagagctgccggcaggaggcggcggcggcaagaacttgaacttggcgtcgggagcgggcgccccggaggccccccgccggggccggggcgccgagggacctgcgccgcagcgctgccccccgaatggccgcggcggcggaccgggctcccgcgccgcggccctaggcggcctctcgccatggccaagtggctaaacaagtacttcagcttgggcaacagcaagaccaagagccccccgcagccgccgcggccagactaccgcgagcagcggcgccgaggcgagcggccctcgcagcccccccaggccgtgccgcaggcctcctccgccgcctcggcgtcctgcggtccggccaccgcctcctgcttctcagcctcttcgggctcgctgcccgacgacagcggcagcaccagcgacctcatccgcgcctaccgcgcgcagaaggagcgagacttcgaggacccctacaacgggcctggctcgtcgctgcgcaaactgcgcgccatgtgccgcctggactactgcggcggcagcggggagccaggcggggtccagcgcgccttctcggcctcgtccgcgtcgggcgccgcgggctgttgctgcgcctcctcgggcgcgggggccgccgcgtcctcgtcctcgtcctccggctctccgcatctctaccgcagcagcagcgagcggcggcccgccacgccggccgaggtgcgctacatctcccccaagcaccgcctcatcaaagtggagagcgccgcgggcggtggggccggggaccccctggggggcgcctgcgcgggcggccgcacctggagcccgacggcctgcggaggcaagaaactgctcaacaagtgcgccgcctcagccgcggaggagagcggggccggcaagaaggacaaggtgaccatagccgatgactactcagatccctttgatgccaagaatgatctcaagagcaaagcaggaaagggggagagtgctggctacatggagccctatgaggcacagaggatcatgacagaatttcagaggcaggaaagtgtccggtcccagcataaaggtatccagttatatgacaccccttacgaacctgaaggccaaagtgttgactcggactcggagagcacagtcagcccccgactgcgggagagcaagctgccccaggatgacgacaggcccgccgatgagtacgaccagccttgggagtggaaccgggtcaccatcccagccctggcagcacagtttaatggcaacgagaagcggcagtcatccccctcaccttcgcgggaccggcggcgccagcttcgtgcccctggagggggctttaagcctatcaaacatgggagccctgagttctgcgggatcctaggagaaagggtggatcctgccgtccccctggagaagcaaatatggtatcacggagccatcagcagaggagacgccgagaacctgctgcgactctgcaaggagtgtagctaccttgtccggaacagccagaccagcaagcatgactactccctctccctgaggagcaaccagggttttatgcacatgaaactggccaaaaccaaagagaaatacgttctgggtcagaacagccctccgttcgacagtgtcccggaagtcatccactactacaccaccagaaagctacccatcaaaggggctgagcacttgtccctcctctatcccgtggctgtgaggaccctgtgagcggaccagacctgccctgctctgtgacagagcctgagacttggaggtgccagaggccccccaccaaccagcccagccactgttgctggctgtgtcgtttgtgttgtgtgtatggtactagcacaccactgcatgtctctagaatgctgttgccacttacgggggctggagaaggcctggataaagacagaagggcggcaacacaccaccccagcccccacccccaccctctccttgagtttctgtgaattaaaatatttgcaaatccaaagagatgccttccaggatgaacaaaggcagaccactccctggctgacatctctttgttctccagctgtctcaaattcacacctctgtacagggcaaagttttcccacaggagcccccctactgatgctgggagccaaatgctggtgctttgagagtcccggaggccccggggttcccgccccgctggtgtgtatatgtgtgtctgtgtgagtgtgtgtgtgagtacagatgtgagaaggtggtcacacacagatgggtaagcccactgatctacttgtagtcactcagtgtaatcattaggctatcttcaaggaatcattgtgcagtcaaaaagaggattcaattatttatgaatagggtgtgtaaataaaatagtcatttaatataaaaatta

SEQ ID NO: 325655 - DNA, 2754 bp, Homo sapiens
cgggccgccgggacgggcacgggcgcgcgggctccggcgggcgccggctgccttcctccgtcgctcgctgtctctcccggccgcattctcctccgctgcggggccgagctctccccagcgctcgcaggaaggaagaagggagccgaggacgccgagaagttcccgcggcagccgcggatcccggccaaggcggaggctgcggctccgacggggcaggagcgcgatccacggcgaggggcgtacggccaaagggtccgcggcgtggagcgctcggaccttccgctctcccccgggcgtgggccgggaccccatgagacgcgcccacgaggggcgcgagattcctagcttgggcggcgctaggcggagggaggtgttgcaggccggccggagccagagagctgccggcaggaggcggcggcggcaagaacttgaacttggcgtcgggagcgggcgccccggaggccccccgccggggccggggcgccgagggacctgcgccgcagcgctgccccccgaatggccgcggcggcggaccgggctcccgcgccgcggccctaggcggcctctcgccatggccaagtggctaaacaagtacttcagcttgggcaacagcaagaccaagagccccccgcagccgccgcggccagactaccgcgagcagcggcgccgaggcgagcggccctcgcagcccccccaggccgtgccgcaggcctcctccgccgcctcggcgtcctgcggtccggccaccgcctcctgcttctcagcctcttcgggctcgctgcccgacgacagcggcagcaccagcgacctcatccgcgcctaccgcgcgcagaaggagcgagacttcgaggacccctacaacgggcctggctcgtcgctgcgcaaactgcgcgccatgtgccgcctggactactgcggcggcagcggggagccaggcggggtccagcgcgccttctcggcctcgtccgcgtcgggcgccgcgggctgttgctgcgcctcctcgggcgcgggggccgccgcgtcctcgtcctcgtcctccggctctccgcatctctaccgcagcagcagcgagcggcggcccgccacgccggccgaggtgcgctacatctcccccaagcaccgcctcatcaaagtggagagcgccgcgggcggtggggccggggaccccctggggggcgcctgcgcgggcggccgcacctggagcccgacggcctgcggaggcaagaaactgctcaacaagtgcgccgcctcagccgcggaggagagcggggccggcaagaaggacaaggtgaccatagccgatgactactcagatccctttgatgccaagaatgatctcaagagcaaagcaggaaagggggagagtgctggctacatggagccctatgaggcacagaggatcatgacagaatttcagaggcaggaaagtgtccggtcccagcataaaggtatccagttatatgacaccccttacgaacctgaaggccaaagtgttgactcggactcggagagcacagtcagcccccgactgcgggagagcaagctgccccaggatgacgacaggcccgccgatgagtacgaccagccttgggagtggaaccgggtcaccatcccagccctggcagcacagtttaatggcaacgagaagcggcagtcatccccctcaccttcgcgggaccggcggcgccagcttcgtgcccctggagggggctttaagcctatcaaacatgggagccctgagttctgcgggatcctaggagaaagggtggatcctgccgtccccctggagaagcaaatatggtatcacggagccatcagcagaggagacgccgagaacctgctgcgactctgcaaggagtgtagctaccttgtccggaacagccagaccagcaagcatgactactccctctccctgaggagcaaccagggttttatgcacatgaaactggccaaaaccaaagagaaatacgttctgggtcagaacagccctccgttcgacagtgtcccggaagtcatccactactacaccaccagaaagctacccatcaaaggggctgagcacttgtccctcctctatcccgtggctgtgaggaccctgtgagcggaccagacctgccctgctctgtgacagagcctgagacttggaggtgccagaggccccccaccaaccagcccagccactgttgctggctgtgtcgtttgtgttgtgtgtatggtactagcacaccactgcatgtctctagaatgctgttgccacttacgggggctggagaaggcctggataaagacagaagggcggcaacacaccaccccagcccccacccccaccctctccttgagtttctgtgaattaaaatatttgcaaatccaaagagatgccttccaggatgaacaaaggcagaccagctccgaggggcggggtagggtggggcgggagctccctggctgacatctctttgttctccagctgtctcaaattcacacctctgtacagggcaaagttttcccacaggagcccccctactgatgctgggagccaaatgctggtgctttgagagtcccggaggccccggggttcccgccccgctggtgtgtatatgtgtgtctgtgtgagtgtgtgtgtgagtacagatgtgagaaggtggtcacacacagatgggtaagcccactgatctacttgtagtcactgagcggcaccaccgcccgatgaccgcggcagcctgaccgatcccagcccccaatggaagcgcgcat

SEQ ID NO: 325656 - DNA, 2336 bp, Homo sapiens
cgggccgccgggacgggcacgggcgcgcgggctccggcgggcgccggctgccttcctccgtcgctcgctgtctctcccggccgcattctcctccgctgcggggccgagctctccccagcgctcgcaggaaggaagaagggagccgaggacgccgagaagttcccgcggcagccgcggatcccggccaaggcggaggctgcggctccgacggggcaggagcgcgatccacggcgaggggcgtacggccaaagggtccgcggcgtggagcgctcggaccttccgctctcccccgggcgtgggccgggaccccatgagacgcgcccacgaggggcgcgagattcctagcttgggcggcgctaggcggagggaggtgttgcaggccggccggagccagagagctgccggcaggaggcggcggcggcaagaacttgaacttggcgtcgggagcgggcgccccggaggccccccgccggggccggggcgccgagggacctgcgccgcagcgctgccccccgaatggccgcggcggcggaccgggctcccgcgccgcggccctaggcggcctctcgccatggccaagtggctaaacaagtacttcagcttgggcaacagcaagaccaagagccccccgcagccgccgcggccagactaccgcgagcagcggcgccgaggcgagcggccctcgcagcccccccaggccgtgccgcaggcctcctccgccgcctcggcgtcctgcggtccggccaccgcctcctgcttctcagcctcttcgggctcgctgcccgacgacagcggcagcaccagcgacctcatccgcgcctaccgcgcgcagaaggagcgagacttcgaggacccctacaacgggcctggctcgtcgctgcgcaaactgcgcgccatgtgccgcctggactactgcggcggcagcggggagccaggcggggtccagcgcgccttctcggcctcgtccgcgtcgggcgccgcgggctgttgctgcgcctcctcgggcgcgggggccgccgcgtcctcgtcctcgtcctccggctctccgcatctctaccgcagcagcagcgagcggcggcccgccacgccggccgaggtgcgctacatctcccccaagcaccgcctcatcaaagtggagagcgccgcgggcggtggggccggggaccccctggggggcgcctgcgcgggcggccgcacctggagcccgacggcctgcggaggcaagaaactgctcaacaagtgcgccgcctcagccgcggaggagagcggggccggcaagaaggacaaggtgaccatagccgatgactactcagatccctttgatgccaagaatgatctcaagagcaaagcaggaaagggggagagtgctggctacatggagccctatgaggcacagaggatcatgacagaatttcagaggcaggaaagtgtccggtcccagcataaaggtatccagttatatgacaccccttacgaacctgaaggccaaagtgttgactcggactcggagagcacagtcaaacagccctccgttcgacagtgtcccggaagtcatccactactacaccaccagaaagctacccatcaaaggggctgagcacttgtccctcctctatcccgtggctgtgaggaccctgtgagcggaccagacctgccctgctctgtgacagagcctgagacttggaggtgccagaggccccccaccaaccagcccagccactgttgctggctgtgtcgtttgtgttgtgtgtatggtactagcacaccactgcatgtctctagaatgctgttgccacttacgggggctggagaaggcctggataaagacagaagggcggcaacacaccaccccagcccccacccccaccctctccttgagtttctgtgaattaaaatatttgcaaatccaaagagatgccttccaggatgaacaaaggcagaccagctccgaggggcggggtagggtggggcgggagctccctggctgacatctctttgttctccagctgtctcaaattcacacctctgtacagggcaaagttttcccacaggagcccccctactgatgctgggagccaaatgctggtgctttgagagtcccggaggccccggggttcccgccccgctggtgtgtatatgtgtgtctgtgtgagtgtgtgtgtgagtacagatgtgagaaggtggtcacacacagatgggtaagcccactgatctacttgtagtcactcagtgtaatcattaggctatcttcaaggaatcattgtgcagtcaaaaagaggattcaattatttatgaatagggtgtgtaaataaaatagtcatttaatataaaaatta

SEQ ID NO: 325657 - DNA, 1243 bp, Homo sapiens
  misc_feature (2)..(2): n is a, c, g, or t
  misc_feature (555)..(555): n is a, c, g, or t
  misc_feature (578)..(578): n is a, c, g, or t
cngggcctctctctgcagctgctgcagttcgagcctacccggcgcctgggcatgggagaaggtggtgtcagcaaactcaagtcccatccctttttcagtaccatccaatggagcaagctggtggggtcaacagacccgttgagcatgtggactcaccatgttaaaggttgccttctgtggcactggcgctgagctgttgaccacctgctgcaccctactgtgaggttctgtgactcactcactgccatgttgtgccccactcaggacatctctggagactcatctcaggacactgatccactggctcagtggacccaaaccagactgtcctggctagtcctctcagtcacacagcgagtaggcctcttccaccagaagctgttcgtgcagctggggaggcccagaagcagggatgccatctgttgtgcagggagggatgaggtaggggacaggatgacccccacccccacccccccacccccgattcctgaccatgccccctatcttgtgatttcagacttgggagagcaaaagggaggggaagaaaataagagnaatggggggaggaaggaatgcangggtctgccccttagagcaagtctgaaaccagaatcaagagtcctcctccccagtgggcctgtgtgggggaagaggggcagcctgccccaggggtgcaagaggacagcaattcagcttccaggccaaagcagtttagacaaggtgtgcccatcaggactccctctcaggccctggctgtttaccatgtcactgcctactgtgacttcatgcccttttgggataagaaaccacaaaacgcatggaacaactatccatggctcttagccagaaatgtcttgcctctggtctctgaaaagctggggtgagtggttacctcaaagacaattgcctccagtttgggggctcctctcagggttcaccctgtcaccggggcgtgggaccgacctgggaaatttccactagagttttgccctcagctcctccctgccagcatcccagtcaccaccaggtggcgcttctgacacggtccacgtgcctggctctgaaggcccaactgtcagaccagacccctcactcatggtggggagacttgacttcctcgggctcttcaggagactgagacagagaagacaagtgaaagcgcagcctgtacatgactctctgtggtccacgtcctgcctctccctggggtttacacggccccaataaagcctgctctggccta

SEQ ID NO: 325658 - DNA, 459 bp, Homo sapiens
gcgctctggcgtgaagggccggtacgtgagggggaggcctggcccgcggacccggctcccagctcgggcagttcttacagcccagctctgtgctctgctctctgctggctccaggaggggtcctcactcgctgaccacactgacctcaggaccaagggaacaaaacacagcaggggcaatccatctggtccacggagaagtgctaaaccccaaagggtaaatgagattcccactcaccaccaggtggcgcttctgacacggtccacgtgcctggctctgaaggcccaactgtcagaccagacccctcactcatggtggggagacttgacttcctcgggctcttcaggagactgagacagagaagacaagtgaaagcgcagcctgtacatgactctctgtggtccacgtcctgcctctccctggggtttacacggccccaataaagcctgctctggccta

SEQ ID NO: 325659 - DNA, 690 bp, Homo sapiens
gcgctctggcgtgaagggccggtacgtgagggggaggcctggcccgcggacccggctcccagctcgggcagttcttacagcccagctctgtgctctgctctctgctggctccaggaggggtcctcactcgctgaccacactgacctcaggaccaagggaacaaaacacagcaggggcaatccatctggtccacggagaagtgctaaaccccaaagggtaaatgagattcccacaggaggagcagggaggagacaacaggcagggtggagggaacagcatgaggaacagcatttgagcccagcgtgtgtggcctccatgtgctgaatgcgtactggataccaagcttgctctacggaggccctgtgaaggtggctgtggatcacagatatcctcagctctctccagagctcaacacagtaccagatgctccagaaatgtttgctgaactgaatttgattggaaaggaaaacagagccccaggcctgcgcggtggctcacgtctataatcccagcactgtgggaggccgaggcagacggatcacttgaggtcaggagttcaagaccagcctggccaacatggtaaaaccccgtctctactacaaatacaaaacatagccaggtgtggtaggcaagtgcctgtaatcccagctacttgggatgctgaggcaggagaattgcttgaacctggga

SEQ ID NO: 325660 - DNA, 2921 bp, Homo sapiens
  misc_feature (2233)..(2233): n is a, c, g, or t
  misc_feature (2256)..(2256): n is a, c, g, or t
gcgctctggcgtgaagggccggtacgtgagggggaggcctggcccgcggacccggctcccagctcgggcagttcttacagcccagctctgtgctctgctctctgctggctccaggaggggtcctcactcgctgaccacactgacctcaggaccaagggaacaaaacacagcaggggcaatccatctggtccacggagaagtgctaaaccccaaagggtaaatgagattcccacaggaggagcagggaggagacaacaggcagggtggagggaacagcatgaggaacagcatttgagcccagcgtgtgtggcctccatgtgctgaatgcgtactggataccaagcttgctctacggaggccctgtgaaggtggctgtggatcacagatatcctcagctctctccagagctcaacacagtaccagatgctccagaaatgtttgctgaactgaatttgattggaaaggaaaacagagccccaggcctgcgcggtggctcacgtctataatcccagcactgtgggaggccgaggcagacggatcacttgaggtcaggagttcaagaccagcctggccaacatggtcccagctgcagggcagccatgagcctggtggcctgtgagtgcctgcccagccccggcctggagcctgagccttgctcacgagcacggtcccaagctcacgtgtacctggagcagattcgcaacagggtggctctgggagtgcctgacatgacaaaacgtgactatctggtggatgcggccacgcagatccggctggccctggagcgcgatgttagtgaggactatgaggcggccttcaaccactatcagaatggcgtggacgtgctgctccgtggcatacacgttgaccccaacaaggagcgacgtgaggctgtgaagctgaaaattaccaaatacctgcggcgggcagaggagatcttcaactgccacctgcagcggccgctgagcagtggagccagccccagcgcggtgcagctggtccaggacccggcaaccggagggacctttgtggtgaagagcctacccaggtgccacatggtgagcagggagcggctgaccatcatcccacacggagtcccctacatgacgaagctgctcaggtactttgtgagcgaggactccatcttcctgcacctggagcatgtgcaaggtcacatccggctcacatattttggccagtggtcagaggtggagccccagtgctgcggggaggccgtggacaatctctacagcgccccagaggtgggtgggatttccgagctgacggaagcctgtgactggtggagctttgggtctctactgtatgaactgctgacgggaatggcactgtcccagagccacccttcaggaatccaggcccacacccagctccagctgcccgagtggctcagtcgcccagcggcctctctgctgactgagctgctgcagttcgagcctacccggcgcctgggcatgggagaaggtggtgtcagcaaactcaagtcccatccctttttcagtaccatccaatggagcaagctggtggggtaagagggcagagcgggtgacggaagcagctggcctggtctggatcgcctctcctccttgcctgacacccaacccagggctggccctctatcagcgggctttgggcgaggaatggagggcactgtctgtcctgctgggctcccactggggcctcagaattatggccaccacccaggaagggccagctcctggaaaagctggaggtgggggcagtcaaggcttgccctgctaagcagcttgaaccatctacccatcagtcaacagacccgttgagcatgtggactcaccatgttaaaggttgccttctgtggcactggcgctgagctgttgaccacctgctgcaccctactgtgaggttctgtgactcactcactgccatgttgtgccccactcaggacatctctggagactcatctcaggacactgatccactggctcagtggacccaaaccagactgtcctggctagtcctctcagtcacacagcgagtaggcctcttccaccagaagctgttcgtgcagctggggaggcccagaagcagggatgccatctgttgtgcagggagggatgaggtaggggacaggatgacccccacccccacccccccacccccgattcctgaccatgccccctatcttgtgatttcagacttgggagagcaaaagggaggggaagaaaataagagnaatggggggaggaaggaatgcangggtctgccccttagagcaagtctgaaaccagaatcaagagtcctcctccccagtgggcctgtgtgggggaagaggggcagcctgccccaggggtgcaagaggacagcaattcagcttccaggccaaagcagtttagacaaggtgtgcccatcaggactccctctcaggccctggctgtttaccatgtcactgcctactgtgacttcatgcccttttgggataagaaaccacaaaacgcatggaacaactatccatggctcttagccagaaatgtcttgcctctggtctctgaaaagctggggtgagtggttacctcaaagacaattgcctccagtttgggggctcctctcagggttcaccctgtcaccggggcgtgggaccgacctgggaaatttccactagagttttgccctcagctcctccctgccagcatcccagtcaccaccaggtggcgcttctgacacggtccacgtgcctggctctgaaggcccaactgtcagaccagacccctcactcatggtggggagacttgacttcctcgggctcttcaggagactgagacagagaagacaagtgaaagcgcagcctgtacatgactctctgtggtccacgtcctgcctctccctggggtttacacggccccaataaagcctgctctggccta

SEQ ID NO: 325661 - DNA, 3260 bp, Homo sapiens
  misc_feature (2572)..(2572): n is a, c, g, or t
  misc_feature (2595)..(2595): n is a, c, g, or t
aagaaaagaaaacagaatcctgagctggttatgattctatcattaccaccacttaggaaggacctggatccatgaaaagaccttacccactttagctctgaccccttcagtctttggaggtgaatatgagtctccctgacattcagtggaggaaactggggtgcggataggggtgttgctaccagctaggtcctccctaatgcatttgcccattccaggtcccagctgcagggcagccatgagcctggtggcctgtgagtgcctgcccagccccggcctggagcctgagccttgctcacgagcacggtcccaagctcacgtgtacctggagcagattcgcaacagggtggctctgggagtgcctgacatgacaaaacgtgactatctggtggatgcggccacgcagatccggctggccctggagcgcgatgttagtgaggactatgaggcggccttcaaccactatcagaatggcgtggacgtgctgctccgtggcatacacgttgaccccaacaaggagcgacgtgaggctgtgaagctgaaaattaccaaatacctgcggcgggcagaggagatcttcaactgccacctgcagcggccgctgagcagtggagccagccccagcgcgggtttcagcagcctgaggctccggcccattcgcacgctgagctctgccgtggagcagctgaggggctgcagggtggtcggggtcatcgagaaggtgcagctggtccaggacccggcaaccggagggacctttgtggtgaagagcctacccaggtgccacatggtgagcagggagcggctgaccatcatcccacacggagtcccctacatgacgaagctgctcaggtactttgtgagcgaggactccatcttcctgcacctggagcatgtgcaaggaggcactctctggtcccacctgctctcccaggcgcactcccgacattctgggctcagctctggctctacccaggagaggatgaaggctcagctcaaccccccacctcaacctcctgaccccagcgaggcttccctcaggccatgcccctggccaggacagaatcgccctggagcctcctaggacttctccgaaccttctcctagctggggaggccccatccaccagaccccagagggaggctgaaggtgaacccacagccaggaccagcacctctggctcctcggaccttccaaaggccccaggtggccacctgcaccttcaagctaggagggctggccagaactcagacgctgggccccctcgggggctcacttgggttcctgagggggccggcccggtgctagggggctgtggccgaggcatggatcagagctgcctgtcagcagatggggccggccggggctgtggcagggccacctggagtgtgagagaggagcaggtgaagcagtgggcggcagagatgctggtagcgctggaggcgctgcacgagcagggggtgctgtgccgggacctccaccccgggaacctgctcctggaccaggcaggtcacatccggctcacatattttggccagtggtcagaggtggagccccagtgctgcggggaggccgtggacaatctctacagcgccccagaggtgggtgggatttccgagctgacggaagcctgtgactggtggagctttgggtctctactgtatgaactgctgacgggaatggcactgtcccagagccacccttcaggaatccaggcccacacccagctccagctgcccgagtggctcagtcgcccagcggcctctctgctgactgagctgctgcagttcgagcctacccggcgcctgggcatgggagaaggtggtgtcagcaaactcaagtcccatccctttttcagtaccatccaatggagcaagctggtggggtaagagggcagagcgggtgacggaagcagctggcctggtctggatcgcctctcctccttgcctgacacccaacccagggctggccctctatcagcgggctttgggcgaggaatggagggcactgtctgtcctgctgggctcccactggggcctcagaattatggccaccacccaggaagggccagctcctggaaaagctggaggtgggggcagtcaaggcttgccctgctaagcagcttgaaccatctacccatcagtcaacagacccgttgagcatgtggactcaccatgttaaaggttgccttctgtggcactggcgctgagctgttgaccacctgctgcaccctactgtgaggttctgtgactcactcactgccatgttgtgccccactcaggacatctctggagactcatctcaggacactgatccactggctcagtggacccaaaccagactgtcctggctagtcctctcagtcacacagcgagtaggcctcttccaccagaagctgttcgtgcagctggggaggcccagaagcagggatgccatctgttgtgcagggagggatgaggtaggggacaggatgacccccacccccacccccccacccccgattcctgaccatgccccctatcttgtgatttcagacttgggagagcaaaagggaggggaagaaaataagagnaatggggggaggaaggaatgcangggtctgccccttagagcaagtctgaaaccagaatcaagagtcctcctccccagtgggcctgtgtgggggaagaggggcagcctgccccaggggtgcaagaggacagcaattcagcttccaggccaaagcagtttagacaaggtgtgcccatcaggactccctctcaggccctggctgtttaccatgtcactgcctactgtgacttcatgcccttttgggataagaaaccacaaaacgcatggaacaactatccatggctcttagccagaaatgtcttgcctctggtctctgaaaagctggggtgagtggttacctcaaagacaattgcctccagtttgggggctcctctcagggttcaccctgtcaccggggcgtgggaccgacctgggaaatttccactagagttttgccctcagctcctccctgccagcatcccagtcaccaccaggtggcgcttctgacacggtccacgtgcctggctctgaaggcccaactgtcagaccagacccctcactcatggtggggagacttgacttcctcgggctcttcaggagactgagacagagaagacaagtgaaagcgcagcctgtacatgactctctgtggtccacgtcctgcctctccctggggtttacacggccccaataaagcctgctctggccta

SEQ ID NO: 325662 - DNA, 1436 bp, Homo sapiens
  misc_feature (748)..(748): n is a, c, g, or t
  misc_feature (771)..(771): n is a, c, g, or t
tatctccacatgggcccactggggaggaggactcttgattctggtttcagacttgctctaagtaagagggcagagcgggtgacggaagcagctggcctggtctggatcgcctctcctccttgcctgacacccaacccagggctggccctctatcagcgggctttgggcgaggaatggagggcactgtctgtcctgctgggctcccactggggcctcagaattatggccaccacccaggaagggccagctcctggaaaagctggaggtgggggcagtcaaggcttgccctgctaagcagcttgaaccatctacccatcagtcaacagacccgttgagcatgtggactcaccatgttaaaggttgccttctgtggcactggcgctgagctgttgaccacctgctgcaccctactgtgaggttctgtgactcactcactgccatgttgtgccccactcaggacatctctggagactcatctcaggacactgatccactggctcagtggacccaaaccagactgtcctggctagtcctctcagtcacacagcgagtaggcctcttccaccagaagctgttcgtgcagctggggaggcccagaagcagggatgccatctgttgtgcagggagggatgaggtaggggacaggatgacccccacccccacccccccacccccgattcctgaccatgccccctatcttgtgatttcagacttgggagagcaaaagggaggggaagaaaataagagnaatggggggaggaaggaatgcangggtctgccccttagagcaagtctgaaaccagaatcaagagtcctcctccccagtgggcctgtgtgggggaagaggggcagcctgccccaggggtgcaagaggacagcaattcagcttccaggccaaagcagtttagacaaggtgtgcccatcaggactccctctcaggccctggctgtttaccatgtcactgcctactgtgacttcatgcccttttgggataagaaaccacaaaacgcatggaacaactatccatggctcttagccagaaatgtcttgcctctggtctctgaaaagctggggtgagtggttacctcaaagacaattgcctccagtttgggggctcctctcagggttcaccctgtcaccggggcgtgggaccgacctgggaaatttccactagagttttgccctcagctcctccctgccagcatcccagtcaccaccaggtggcgcttctgacacggtccacgtgcctggctctgaaggcccaactgtcagaccagacccctcactcatggtggggagacttgacttcctcgggctcttcaggagactgagacagagaagacaagtgaaagcgcagcctgtacatgactctctgtggtccacgtcctgcctctccctggggtttacacggccccaataaagcctgctctggccta

SEQ ID NO: 325663 - DNA, 579 bp, Homo sapiens
ggccggtacgtgagggggaggcctggcccgcggacccggctcccagctcgggcaggtacggtgttttgtccggtcccttctccaccctcccaggcgaggggccccctcggccgtccctccaccctgggaccgtgcaccttgcggctggggccccgtgggttgcacgcgccgctttctgtgtccaggcggggccggcggctctgcccggcaggaccctgcccggcggggtggaccctgaagccagtcctacccgggcaccccccagagcaaggcctcagagcctcaagttcccctgggcttggccgagcagggatggtgcggcctccctctgcctcctggccgcatcctggccgggattcagctccccgccggctgaggctgtgggtctccctccccgccccaccgcccatcctgctctctcctctttctctccaaatgacctggggttggaagttccgggtcctgcccattcccagtgggacctgggagagcaaaggcggggtagctttgtgggcctctctctgagccccttcccttcccgcagccacggctgtcatccctttggccgcctgggtcaca

SEQ ID NO: 325664 - DNA, 2841 bp, Homo sapiens
gcgctctggcgtgaagggccggtacgtgagggggaggcctggcccgcggacccggctcccagctcgggcagttcttacagcccagctctgtgctctgctctctgctggctccaggaggggtcctcactcgctgaccacactgacctcaggaccaagggaacaaaacacagcaggggcaatccatctggtccacggagaagtgctaaaccccaaagggtaaatgagattcccacaggaggagcagggaggagacaacaggcagggtggagggaacagcatgaggaacagcatttgagcccagcgtgtgtggcctccatgtgctgaatgcgtactggataccaagcttgctctacggaggccctgtgaaggtggctgtggatcacagatatcctcagctctctccagagctcaacacagtaccagatgctccagaaatgtttgctgaactgaatttgattggaaaggaaaacagagccccaggcctgcgcggtggctcacgtctataatcccagcactgtgggaggccgaggcagacggatcacttgaggtcaggagttcaagaccagcctggccaacatggtcccagctgcagggcagccatgagcctggtggcctgtgagtgcctgcccagccccggcctggagcctgagccttgctcacgagcacggtcccaagctcacgtgtacctggagcagattcgcaacagggtggctctgggagtgcctgacatgacaaaacgtgactatctggtggatgcggccacgcagatccggctggccctggagcgcgatgttagtgaggactatgaggcggccttcaaccactatcagaatggcgtggacgtgctgctccgtggcatacacgttgaccccaacaaggagcgacgtgaggctgtgaagctgaaaattaccaaatacctgcggcgggcagaggagatcttcaactgccacctgcagcggccgctgagcagtggagccagccccagcgcggtgcagctggtccaggacccggcaaccggagggacctttgtggtgaagagcctacccaggtgccacatggtgagcagggagcggctgaccatcatcccacacggagtcccctacatgacgaagctgctcaggtactttgtgagcgaggactccatcttcctgcacctggagcatgtgcaaggaggcactctctggtcccacctgctctcccaggcgcactcccgacattctgggctcagctctggctctacccaggagaggatgaaggctcagctcaaccccccacctcaacctcctgaccccagcgaggcttccctcaggccatgcccctggccaggacagaatcgccctggagcctcctaggacttctccgaaccttctcctagctggggaggccccatccaccagaccccagagggaggctgaaggtgaacccacagccaggaccagcacctctggctcctcggaccttccaaaggccccaggtggccacctgcaccttcaagctaggagggctggccagaactcagacgctgggccccctcgggggctcacttgggttcctgagggggccggcccggtgctagggggctgtggccgaggcatggatcagagctgcctgtcagcagatggggccggccggggctgtggcagggccacctggagtgtgagagaggagcaggtgaagcagtgggcggcagagatgctggtagcgctggaggcgctgcacgagcagggggtgctgtgccgggacctccaccccgggaacctgctcctggaccaggcaggtcacatccggctcacatattttggccagtggtcagaggtggagccccagtgctgcggggaggccgtggacaatctctacagcgccccagaggtgggtgggatttccgagctgacggaagcctgtgactggtggagctttgggtctctactgtatgaactgctgacgggaatggcactgtcccagagccacccttcaggaatccaggcccacacccagctccagctgcccgagtggctcagtcgcccagcggcctctctgctgactgagctgctgcagttcgagcctacccggcgcctgggcatgggagaaggtggtgtcagcaaactcaagtcccatccctttttcagtaccatccaatggagcaagctggtgggggacatctctggagactcatctcaggacactgatccactggctcagtggacccaaaccagactgtcctggctagtcctctcagtcacacagcgagtaggcctcttccaccagaagctgttcgtgcagctggggaggcccagaagcagggatgccatctgttgtgcagggagggatgaggactccctctcaggccctggctgtttaccatgtcactgcctactgtgacttcatgcccttttgggataagaaaccacaaaacgcatggaacaactatccatggctcttagccagaaatgtcttgcctctggtctctgaaaagctggggtgagtggttacctcaaagacaattgcctccagtttgggggctcctctcagggttcaccctgtcaccggggcgtgggaccgacctgggaaatttccactagagttttgccctcagctcctccctgccagcatcccagtcaccaccaggtggcgcttctgacacggtccacgtgcctggctctgaaggcccaactgtcagaccagacccctcactcatggtggggagacttgacttcctcgggctcttcaggagactgagacagagaagacaagtgaaagcgcagcctgtacatgactctctgtggtccacgtcctgcctctccctggggtttacacggccccaataaagcctgctctggccta

SEQ ID NO: 325665 - DNA, 3621 bp, Homo sapiens
  misc_feature (2933)..(2933): n is a, c, g, or t
  misc_feature (2956)..(2956): n is a, c, g, or t
gcgctctggcgtgaagggccggtacgtgagggggaggcctggcccgcggacccggctcccagctcgggcagttcttacagcccagctctgtgctctgctctctgctggctccaggaggggtcctcactcgctgaccacactgacctcaggaccaagggaacaaaacacagcaggggcaatccatctggtccacggagaagtgctaaaccccaaagggtaaatgagattcccacaggaggagcagggaggagacaacaggcagggtggagggaacagcatgaggaacagcatttgagcccagcgtgtgtggcctccatgtgctgaatgcgtactggataccaagcttgctctacggaggccctgtgaaggtggctgtggatcacagatatcctcagctctctccagagctcaacacagtaccagatgctccagaaatgtttgctgaactgaatttgattggaaaggaaaacagagccccaggcctgcgcggtggctcacgtctataatcccagcactgtgggaggccgaggcagacggatcacttgaggtcaggagttcaagaccagcctggccaacatggtcccagctgcagggcagccatgagcctggtggcctgtgagtgcctgcccagccccggcctggagcctgagccttgctcacgagcacggtcccaagctcacgtgtacctggagcagattcgcaacagggtggctctgggagtgcctgacatgacaaaacgtgactatctggtggatgcggccacgcagatccggctggccctggagcgcgatgttagtgaggactatgaggcggccttcaaccactatcagaatggcgtggacgtgctgctccgtggcatacacgttgaccccaacaaggagcgacgtgaggctgtgaagctgaaaattaccaaatacctgcggcgggcagaggagatcttcaactgccacctgcagcggccgctgagcagtggagccagccccagcgcgggtttcagcagcctgaggctccggcccattcgcacgctgagctctgccgtggagcagctgaggggctgcagggtggtcggggtcatcgagaaggtgcagctggtccaggacccggcaaccggagggacctttgtggtgaagagcctacccaggtgccacatggtgagcagggagcggctgaccatcatcccacacggagtcccctacatgacgaagctgctcaggtactttgtgagcgaggactccatcttcctgcacctggagcatgtgcaaggaggcactctctggtcccacctgctctcccaggcgcactcccgacattctgggctcagctctggctctacccaggagaggatgaaggctcagctcaaccccccacctcaacctcctgaccccagcgaggcttccctcaggccatgcccctggccaggacagaatcgccctggagcctcctaggacttctccgaaccttctcctagctggggaggccccatccaccagaccccagagggaggctgaaggtgaacccacagccaggaccagcacctctggctcctcggaccttccaaaggccccaggtggccacctgcaccttcaagctaggagggctggccagaactcagacgctgggccccctcgggggctcacttgggttcctgagggggccggcccggtgctagggggctgtggccgaggcatggatcagagctgcctgtcagcagatggggccggccggggctgtggcagggccacctggagtgtgagagaggagcaggtgaagcagtgggcggcagagatgctggtagcgctggaggcgctgcacgagcagggggtgctgtgccgggacctccaccccgggaacctgctcctggaccaggcaggtcacatccggctcacatattttggccagtggtcagaggtggagccccagtgctgcggggaggccgtggacaatctctacagcgccccagaggtgggtgggatttccgagctgacggaagcctgtgactggtggagctttgggtctctactgtatgaactgctgacgggaatggcactgtcccagagccacccttcaggaatccaggcccacacccagctccagctgcccgagtggctcagtcgcccagcggcctctctgctgactgagctgctgcagttcgagcctacccggcgcctgggcatgggagaaggtggtgtcagcaaactcaagtcccatccctttttcagtaccatccaatggagcaagctggtggggtaagagggcagagcgggtgacggaagcagctggcctggtctggatcgcctctcctccttgcctgacacccaacccagggctggccctctatcagcgggctttgggcgaggaatggagggcactgtctgtcctgctgggctcccactggggcctcagaattatggccaccacccaggaagggccagctcctggaaaagctggaggtgggggcagtcaaggcttgccctgctaagcagcttgaaccatctacccatcagtcaacagacccgttgagcatgtggactcaccatgttaaaggttgccttctgtggcactggcgctgagctgttgaccacctgctgcaccctactgtgaggttctgtgactcactcactgccatgttgtgccccactcaggacatctctggagactcatctcaggacactgatccactggctcagtggacccaaaccagactgtcctggctagtcctctcagtcacacagcgagtaggcctcttccaccagaagctgttcgtgcagctggggaggcccagaagcagggatgccatctgttgtgcagggagggatgaggtaggggacaggatgacccccacccccacccccccacccccgattcctgaccatgccccctatcttgtgatttcagacttgggagagcaaaagggaggggaagaaaataagagnaatggggggaggaaggaatgcangggtctgccccttagagcaagtctgaaaccagaatcaagagtcctcctccccagtgggcctgtgtgggggaagaggggcagcctgccccaggggtgcaagaggacagcaattcagcttccaggccaaagcagtttagacaaggtgtgcccatcaggactccctctcaggccctggctgtttaccatgtcactgcctactgtgacttcatgcccttttgggataagaaaccacaaaacgcatggaacaactatccatggctcttagccagaaatgtcttgcctctggtctctgaaaagctggggtgagtggttacctcaaagacaattgcctccagtttgggggctcctctcagggttcaccctgtcaccggggcgtgggaccgacctgggaaatttccactagagttttgccctcagctcctccctgccagcatcccagtcaccaccaggtggcgcttctgacacggtccacgtgcctggctctgaaggcccaactgtcagaccagacccctcactcatggtggggagacttgacttcctcgggctcttcaggagactgagacagagaagacaagtgaaagcgcagcctgtacatgactctctgtggtccacgtcctgcctctccctggggtttacacggccccaataaagcctgctctggccta

SEQ ID NO: 325666 - DNA, 3433 bp, Homo sapiens
  misc_feature (2233)..(2233): n is a, c, g, or t
  misc_feature (2256)..(2256): n is a, c, g, or t
gcgctctggcgtgaagggccggtacgtgagggggaggcctggcccgcggacccggctcccagctcgggcagttcttacagcccagctctgtgctctgctctctgctggctccaggaggggtcctcactcgctgaccacactgacctcaggaccaagggaacaaaacacagcaggggcaatccatctggtccacggagaagtgctaaaccccaaagggtaaatgagattcccacaggaggagcagggaggagacaacaggcagggtggagggaacagcatgaggaacagcatttgagcccagcgtgtgtggcctccatgtgctgaatgcgtactggataccaagcttgctctacggaggccctgtgaaggtggctgtggatcacagatatcctcagctctctccagagctcaacacagtaccagatgctccagaaatgtttgctgaactgaatttgattggaaaggaaaacagagccccaggcctgcgcggtggctcacgtctataatcccagcactgtgggaggccgaggcagacggatcacttgaggtcaggagttcaagaccagcctggccaacatggtcccagctgcagggcagccatgagcctggtggcctgtgagtgcctgcccagccccggcctggagcctgagccttgctcacgagcacggtcccaagctcacgtgtacctggagcagattcgcaacagggtggctctgggagtgcctgacatgacaaaacgtgactatctggtggatgcggccacgcagatccggctggccctggagcgcgatgttagtgaggactatgaggcggccttcaaccactatcagaatggcgtggacgtgctgctccgtggcatacacgttgaccccaacaaggagcgacgtgaggctgtgaagctgaaaattaccaaatacctgcggcgggcagaggagatcttcaactgccacctgcagcggccgctgagcagtggagccagccccagcgcggtgcagctggtccaggacccggcaaccggagggacctttgtggtgaagagcctacccaggtgccacatggtgagcagggagcggctgaccatcatcccacacggagtcccctacatgacgaagctgctcaggtactttgtgagcgaggactccatcttcctgcacctggagcatgtgcaaggtcacatccggctcacatattttggccagtggtcagaggtggagccccagtgctgcggggaggccgtggacaatctctacagcgccccagaggtgggtgggatttccgagctgacggaagcctgtgactggtggagctttgggtctctactgtatgaactgctgacgggaatggcactgtcccagagccacccttcaggaatccaggcccacacccagctccagctgcccgagtggctcagtcgcccagcggcctctctgctgactgagctgctgcagttcgagcctacccggcgcctgggcatgggagaaggtggtgtcagcaaactcaagtcccatccctttttcagtaccatccaatggagcaagctggtggggtaagagggcagagcgggtgacggaagcagctggcctggtctggatcgcctctcctccttgcctgacacccaacccagggctggccctctatcagcgggctttgggcgaggaatggagggcactgtctgtcctgctgggctcccactggggcctcagaattatggccaccacccaggaagggccagctcctggaaaagctggaggtgggggcagtcaaggcttgccctgctaagcagcttgaaccatctacccatcagtcaacagacccgttgagcatgtggactcaccatgttaaaggttgccttctgtggcactggcgctgagctgttgaccacctgctgcaccctactgtgaggttctgtgactcactcactgccatgttgtgccccactcaggacatctctggagactcatctcaggacactgatccactggctcagtggacccaaaccagactgtcctggctagtcctctcagtcacacagcgagtaggcctcttccaccagaagctgttcgtgcagctggggaggcccagaagcagggatgccatctgttgtgcagggagggatgaggtaggggacaggatgacccccacccccacccccccacccccgattcctgaccatgccccctatcttgtgatttcagacttgggagagcaaaagggaggggaagaaaataagagnaatggggggaggaaggaatgcangggtctgccccttagagcaagtctgaaaccagaatcaagagtcctcctccccagtgggcctgtgtgggggaagaggggcagcctgccccaggggtgcaagaggacagcaattcagcttccaggccaaagcagtttagacaaggtgtgcccatcaggactccctctcaggccctggctgtttaccatgtcactgcctactgtgacttcatgcccttttgggataagaaaccacaaaacgcatggaacaactatccatggctcttagccagaaatgtcttgcctctggtctctgaaaagctggggtgagtggttacctcaaagacaattgcctccagtttgggggctcctctcagggttcaccctgtcaccggggcgtgggaccgacctgggaaatttccactagagttttgccctcagctcctccctgccagcatcccagtcaccaccaggtggcgcttctgacacggtccacgtgcctggctctgaaggcccaactgtcagaccagacccctcactcatggtggggagacttgacttcctcgggctcttcaggagactgagacagagaagacaagtgaaagcgcagcctgtacatgactctctgtggtccacgtcctgcctctccctggggtttacacggccccaataaagcctgctctggcctaaaaaaaaaaaaaaaaaaaaaaaaaaaaaaaaaaaaaaaaaaaaaaataaaataaaaaaaaaacacaattaaaaaaaaaataacttataataatgttcaaacaactaatttaatcaaatatttatataaatataatttaatctcatcctttccctctctccccaaaatcctcctaaatcatttgctttctaattaaatttcccttttttcacatcttgctctttgtaaaatcctttttgtaccataactcaatccttttgacctaatacccccttttcccatttctttatctgtaaaaaccctcgcaccttgttttttgttaaaaacttcttgacccaattccctaaatctactctttactcttaataattctatctaaatgtctgttatccttttttttatcactcctttttgaaaacaaatttgccttttattaaaatttccttttaacattcaatattattccccctttgattctcctatatatcccctctgtcaccaaaaccctgtcgt

SEQ ID NO: 325667 - DNA, 1325 bp, Homo sapiens
gcgctctggcgtgaagggccggtacgtgagggggaggcctggcccgcggacccggctcccagctcgggcagttcttacagcccagctctgtgctctgctctctgctggctccaggaggggtcctcactcgctgaccacactgacctcaggaccaagggaacaaaacacagcaggggcaatccatctggtccacggagaagtgctaaaccccaaagggtaaatgagattcccacaggaggagcagggaggagacaacaggcagggtggagggaacagcatgaggaacagcatttgagcccagcgtgtgtggcctccatgtgctgaatgcgtactggataccaagcttgctctacggaggccctgtgaaggtggctgtggatcacagatatcctcagctctctccagagctcaacacagtaccagatgctccagaaatgtttgctgaactgaatttgattggaaaggaaaacagagccccaggcctgcgcggtggctcacgtctataatcccagcactgtgggaggccgaggcagacggatcacttgaggtcaggagttcaagaccagcctggccaacatggtcccagctgcagggcagccatgagcctggtggcctgtgagtgcctgcccagccccggcctggagcctgagccttgctcacgagcacggtcccaagctcacgtgtacctggagcagattcgcaacagggtggctctgggagtgcctgacatgacaaaacgtgactatctggtggatgcggccacgcagatccggctggccctggagcgcgatgttagtgaggactatgaggcggccttcaaccactatcagaatggcgtggacgtgctgctccgtggcatacacgttgaccccaacaaggagcgacgtgaggctgtgaagctgaaaattaccaaatacctgcggcgggcagaggagatcttcaactgccacctgcagcggccgctgagcagtggagccagccccagcgcgggtttcagcagcctgaggctccggcccattcgcacgctgagctctgccgtggagcagctgaggggctgcagggtggtcggggtcatcgagaaggtgcagctggtccaggacccggcaaccggagggacctttgtggtgaaggcaggtgccaccctgcccctgccactctgcattccccttggatctttctcagggctcttggaaactcctacccagaacctgcatttgaagcctgcactccctcccacaaaagctggttgttctgcctgaacatgccccactttccagatggacacacatgcatgcacacacacacatacacatacacatacacat

SEQ ID NO: 325668 - DNA, 453 bp, Homo sapiens
ggaagaaccacgtgattcaacctcttttgtttgcgctctaggaaattaaggctcataaagtgacataaggagtattccctttttttgtatcctctggaagaattttaataagattggagtgattttcctttcaagcatcagtagaattcaccagtaaaactgtctggagctgggtgcagtggcttacacctataatctcaactacttgagaggctcaagcaggaggatcacttgaggcaaggaattcaagaccagactgagcaacaagactccatctccaaaaaacaaaaaccaaacaaaacagaacagaacagcacagcaaaaccatctcggctgggtattttccttgtgtgaagtttgtaaaatacgactttggtttatttaatagttatgaaactgttcaattattttctttctccttgagtcagtttaataaaataataggttctagaa

SEQ ID NO: 325669 - DNA, 751 bp, Homo sapiens
gtttttgttgctacgtcttccttggttttttacgttgtgttaatgccgctgttttgggtacagtggggagtaggtacatgggtttaggatgctgcatttttgcccatggccttgattgaactccttagtcatttataacgtggttgggccggaaggcctgagaagatacgtaggtacaatcctcttttaaaaagaccacagaattagccaataatacattataaccagtagtctttgaatggcccgtttaaattaaattaaacgaattcatttttaaaataatataatgaacaccttctttaacttgacatgctaaccaagaactaaaatattatcaattaactttcatcagcttgtaagtggtccccatcttgtgccactgcctctccatcagaagtaactcccatcctgaatttgtgtttacacaactattatattgctttaatttcttttcacatttatatatattactaagcaatgtatttttacttttcttagttttgtgtgtatttccaaactctcatctagaggcctgggcctggtacatttttctttactcatctttattgaccgaagttacattttgttcattttcactgctacataaaaatccattatgtaccataatttatccattctccagctgccaagtctttgtgcaatttccagtcttttgctctttccaacagtgttggaaatcagcattgctttctggtgcccctgtgcaaaaatgtctcttgggtgtatttac

SEQ ID NO: 325670 - DNA, 1545 bp, Homo sapiens
agaagggagaccagtaagataggagtatataaatattccattgacattgtaaaaataaacatttcaaactaagagtcagcatatttaattaaatatcagaagtattatttattaaatgaggggaaaaatgatgcctacaccatgagtcaattttttctgaaaccactagtcatcataattaggaatgggaaataatatttgaaaagaggtggccaggcgcagtgactcacatctgtaatcccagcactttgggaggccaaggtaggcagataacctcagtcaggagttcaagaccagcctggccaatatggtgaaaccccgtctctactaaaaattcaaaaattagccagtcttagtgacacgcgcctgtagtcccagctactcgggaggctgcggcaggagaattgttcgaacccaggaagcagaggttgcagtgagctgagatcacaccactgcactccagcctgagcgacagagcaagactgtctcaaaaaaaaaaaaaaagggggtaaaatatatgctttctttcagctaatgtaattgcatatctagaaaaaaacaaatcaactggaaacaatttagagcaagatgatttagtcaggtgactcgttattgtgttaataaataaaagctttcctagacaaataaccacttaaaatataagaaaatatttctgtttacaacagtcatcaaaaatgatcaaatatctaaaaataagtgaaatgtgatacacatatgggaagaaaactttaaaactctcctgagagatattttttaaaaaccactaaaataactggaaagatatattttgttcttgagaaaaactaaattctgtaatttttccaaattataagtaagtatttcatttagaaatcccaactaaaatgccaacaggcttagtctggggaacttgaccaacacaaacatgggagacataaacagtctgagaatgagtaagaagaggaagactaggtgaaacaataactcagtatagagtgaattgtctataacttagagtactagagaaggaagcaccaattcaatggaagagaacagtctcaagagaccgaactacatctgagaatttagtatacaataaaggttggatttcagatcaatagggataatactggcatttcccaataaatgatgttgagataatcagcagctgtttggaaagaaagaaaactgaggctcttcctcactgtttctaccaaaatcaatgtatatgtactttaccagtatatatacagacttctttctagtatgaaatataaactgttaatagtggttacttttaaggagagagactaaggttgggttgggggaagagaaagaaattggtattattttatccttctatactgtgtgctttttttattattttcatgtatttcatttcttcaaaatgtaagaaatgttaaaaatgtatgtgcaaaacaatacaggccactgtactgtgatataatcagatttacattctgacaatgtagatttttttaaatcatgcattaaaacaaatcctgtttcttttaaaaaaaaaaa

SEQ ID NO: 325671 - DNA, 3389 bp, Homo sapiens
ggctccctaaataaatacatcaattttatttaaatcttacagcaatcatatgagacaaaagcttttaacacctgcactttatattcgaggaattaaagttctcagaggcgactaaagaccaaactcagggctgaggagttccaaagctgagttgagttgcaaatgaatcaccgaggaccaccggagctttctagcgaccctcgcaccagggaacgaacccctgtggtttaagggctccaacccacaacccagttcctttggcgggaaacagcaccctcccaaggccccgccccttcctggccccgccccgtcgtctctgggcccggctcctggagatgggtattattaatctgccttctatgggggacctggcccatctcgggtatcagccccgcccctactcgtccagtctccgaacgctctgcagccaatcggcgcccgagggtcggtccccgccttctcaagccccgccccctacccttatccctggcagcttccgctaaacgggctcagagccacgcggcacgcccgggaggctttctctggctggtaaccgctactcccggacaccagaccaccgccttccgtacacaggggcccgcatcccaccctcccggacctaagagcctgggtcccctgtttccggaggtccgcttcccggcccccagattctggcatcccagccctcagtgtccaagacccaggcagcccgggtccccgcctcccggatccaggcgtccgggatctgcgccaccagaacctagcctcctgcagacctccgccatctgggggcactcaacctcctggagccaagggccccacgtcccacccagagaaactctcgtattcccagctcctagggccaaggaacccgggcgctccgaactcccagctttcggacatctggcacacggggcagagcagagaagcctcagcgcccagcctggggaatttaaacactccagcttccaagagccaaggaacttcagtgctgtgaactcacaactctaaggagccctccaaagttccagtctccaggtgctgttactcaactcagtcctaggaacgtcgggtcctgggaaggagcccaagcgctcccagccagcttccaggcgctaagaaaccccggtgcttcccatcatggtggccgatcctcctcgagactccaaggggctcgcagcggcggagcccaccgccaacgggggcctggcgctggcctccatcgaggaccaaggcgcggcagcaggcggctactgcggttcccgggaccaggtgcgccgctgccttcgagccaacctgcttgtgctgctgacagtggtggccgtggtggccggcgtggcgctgggactgggggtgtcgggggccgggggtgcgctggcgttgggcccggagcgcttgagcgccttcgtcttcccgggcgagctgctgctgcgtctgctgcggatgatcatcttgccgctggtggtgtgcagcttgatcggcggcgccgccagcctggaccccggcgcgctcggccgtctgggcgcctgggcgctgctctttttcctggtcaccacgctgctggcgtcggcgctcggagtgggcttggcgctggctctgcagccgggcgccgcctccgccgccatcaacgcctccgtgggagccgcgggcagtgccgaaaatgcccccagcaaggaggtgctcgattcgttcctggatcttgcgagaaatatcttcccttccaacctggtgtcagcagcctttcgctcatactctaccacctatgaagagaggaatatcaccggaaccagggtgaaggtgcccgtggggcaggaggtggaggggatgaacatcctgggcttggtagtgtttgccatcgtctttggtgtggcgctgcggaagctggggcctgaaggggagctgcttatccgcttcttcaactccttcaatgaggccaccatggttctggtctcctggatcatgtggtacgcccctgtgggcatcatgttcctggtggctggcaagatcgtggagatggaggatgtgggtttactctttgcccgccttggcaagtacattctgtgctgcctgctgggtcacgccatccatgggctcctggtactgcccctcatctacttcctcttcacccgcaaaaacccctaccgcttcctgtggggcatcgtgacgccgctggccactgcctttgggacctcttccagttccgccacgctgccgctgatgatgaagtgcgtggaggagaataatggcgtggccaagcacatcagccgtttcatcctgcccatcggcgccaccgtcaacatggacggtgccgcgctcttccagtgcgtggccgcagtgttcattgcacagctcagccagcagtccttggacttcgtaaagatcatcaccatcctggtcacggccacagcgtccagcgtgggggcagcgggcatccctgctggaggtgtcctcactctggccatcatcctcgaagcagtcaacctcccggtcgaccatatctccttgatcctggctgtggactggctagtcgaccggtcctgtaccgtcctcaatgtagaaggtgacgctctgggggcaggactcctccaaaattacgtggaccgtacggagtcgagaagcacagagcctgagttgatacaagtgaagagtgagctgcccctggatccgctgccagtccccactgaggaaggaaaccccctcctcaaacactatcgggggcccgcaggggatgccacggtcgcctctgagaaggaatcagtcatgtaaaccccgggagggaccttccctgccctgctgggggtgctctttggacactggattatgaggaatggataaatggatgagctagggctctgggggtctgcctgcacactctggggagccaggggccccagcaccctccaggacaggagatctgggatgcctggctgctggagtacatgtgttcacaagggttactcctcaaaacccccagttctcactcatgtccccaactcaaggctagaaaacagcaagatggagaaataatgttctgctgcgtccccaccgtgacctgcctggcctcccctgtctcagggagcaggtcacaggtcaccatggggaattctagcccccactggggggatgttacaacaccatgctggttattttggcggctgtagttgtggggggatgtgtgtgtgcacgtgtgtgtgtgtgtgtgtgtgtgtgtgtgtgtgttctgtgacctcctgtccccatggtacgtcccaccctgtccccagatcccctattccctccacaataacagaaacactcccagggactctggggagaggctgaggacaaatacctgctgtcactccagaggacattttttttagcaataaaattgagtgtcaactatttaa

SEQ ID NO: 325672 - DNA, 330 bp, Homo sapiens
ctagttacttaaactcactaagggaaaagagatgataagattagtagcatcagagagatcagtggcagaataagggactgggatatattaatgtgaatggcaactcgtatgtgtgtatgtgtatgtgtgtgtgtgtgtgtgtgtgtgtgtgtgtgtgtgttctgtgacctcctgtccccatggtacgtcccaccctgtccccagatcccctattccctccacaataacagaaacactcccagggactctggggagaggctgaggacaaatacctgctgtcactccagaggacattttttttagcaataaaattgagtgtcaactatttaa

SEQ ID NO: 325673 - DNA, 3477 bp, Homo sapiens
ggctccctaaataaatacatcaattttatttaaatcttacagcaatcatatgagacaaaagcttttaacacctgcactttatattcgaggaattaaagttctcagaggcgactaaagaccaaactcagggctgaggagttccaaagctgagttgagttgcaaatgaatcaccgaggaccaccggagctttctagcgaccctcgcaccagggaacgaacccctgtggtttaagggctccaacccacaacccagttcctttggcgggaaacagcaccctcccaaggccccgccccttcctggccccgccccgtcgtctctgggcccggctcctggagatgggtattattaatctgccttctatgggggacctggcccatctcgggtatcagccccgcccctactcgtccagtctccgaacgctctgcagccaatcggcgcccgagggtcggtccccgccttctcaagccccgccccctacccttatccctggcagcttccgctaaacgggctcagagccacgcggcacgcccgggaggctttctctggctggtaaccgctactcccggacaccagaccaccgccttccgtacacaggggcccgcatcccaccctcccggacctaagagcctgggtcccctgtttccggaggtccgcttcccggcccccagattctggcatcccagccctcagtgtccaagacccaggcagcccgggtccccgcctcccggatccaggcgtccgggatctgcgccaccagaacctagcctcctgcagacctccgccatctgggggcactcaacctcctggagccaagggccccacgtcccacccagagaaactctcgtattcccagctcctagggccaaggaacccgggcgctccgaactcccagctttcggacatctggcacacggggcagagcagagaagcctcagcgcccagcctggggaatttaaacactccagcttccaagagccaaggaacttcagtgctgtgaactcacaactctaaggagccctccaaagttccagtctccaggtgctgttactcaactcagtcctaggaacgtcgggtcctgggaaggagcccaagcgctcccagccagcttccaggcgctaagaaaccccggtgcttcccatcatggtggccgatcctcctcgagactccaaggggctcgcagcggcggagcccaccgccaacgggggcctggcgctggcctccatcgaggaccaaggcgcggcagcaggcggctactgcggttcccgggaccaggtgcgccgctgccttcgagccaacctgcttgtgctgctgacagtggtggccgtggtggccggcgtggcgctgggactgggggtgtcgggggccgggggtgcgctggcgttgggcccggagcgcttgagcgccttcgtcttcccgggcgagctgctgctgcgtctgctgcggatgatcatcttgccgctggtggtgtgcagcttgatcggcggcgccgccagcctggaccccggcgcgctcggccgtctgggcgcctgggcgctgctctttttcctggtcaccacgctgctggcgtcggcgctcggagtgggcttggcgctggctctgcagccgggcgccgcctccgccgccatcaacgcctccgtgggagccgcgggcagtgccgaaaatgcccccagcaaggaggtgctcgattcgttcctggatcttgcgagaaatatcttcccttccaacctggtgtcagcagcctttcgctcatactctaccacctatgaagagaggaatatcaccggaaccagggtgaaggtgcccgtggggcaggaggtggaggggatgaacatcctgggcttggtagtgtttgccatcgtctttggtgtggcgctgcggaagctggggcctgaaggggagctgcttatccgcttcttcaactccttcaatgaggccaccatggttctggtctcctggatcatgtggtacgcccctgtgggcatcatgttcctggtggctggcaagatcgtggagatggaggatgtgggtttactctttgcccgccttggcaagtacattctgtgctgcctgctgggtcacgccatccatgggctcctggtactgcccctcatctacttcctcttcacccgcaaaaacccctaccgcttcctgtggggcatcgtgacgccgctggccactgcctttgggacctcttccagttccgccacgctgccgctgatgatgaagtgcgtggaggagaataatggcgtggccaagcacatcagccgtttcatcctgcccatcggcgccaccgtcaacatggacggtgccgcgctcttccagtgcgtggccgcagtgttcattgcacagctcagccagcagtccttggacttcgtaaagatcatcaccatcctggtcacggccacagcgtccagcgtgggggcagcgggcatccctgctggaggtgtcctcactctggccatcatcctcgaagcagtcaacctcccggtcgaccatatctccttgatcctggctgtggactggctagtcgaccggtcctgtaccgtcctcaatgtagaaggtgacgctctgggggcaggactcctccaaaattacgtggaccgtacggagtcgagaagcacagagcctgagttgatacaagtgaagagtgagctgcccctggatccgctgccagtccccactgaggaaggaaaccccctcctcaaacactatcgggggcccgcaggggatgccacggtcgcctctgagaaggaatcagtcatgtaaaccccgggagggaccttccctgccctgctgggggtgctctttggacactggattatgaggaatggataaatggatgagctagggctctgggggtctgcctgcacactctggggagccaggggccccagcaccctccaggacaggagatctgggatgcctggctgctggagtacatgtgttcacaagggttactcctcaaaacccccagttctcactcatgtccccaactcaaggctagaaaacagcaagatggagaaataatgttctgctgcgtccccaccgtgacctgcctggcctcccctgtctcagggagcaggtcacaggtcaccatggggaattctagcccccactggggggatgttacaacaccatgctggttattttggcggctgtagttgtggggggatgtgtgtgtgcacgtgtgtgtgtgtgtgtgtgtgtgtgtgtgtgtgttctgtgacctcctgtccccatggtacgtcccaccctgtccccagatcccctattccctccacaataacagaaacactcccagggactctggggagaggctgaggacaaatacctgctgtcactccagaggacattttttttagcaataaaattgagtgtcaactatttaaaaaaaaaaactttacactaaaaaaaaacctccagggggggcccggtaccccaattgccctattaggagtcgcattacaatttacttgc

SEQ ID NO: 325674 - DNA, 3243 bp, Homo sapiens
ggctccctaaataaatacatcaattttatttaaatcttacagcaatcatatgagacaaaagcttttaacacctgcactttatattcgaggaattaaagttctcagaggcgactaaagaccaaactcagggctgaggagttccaaagctgagttgagttgcaaatgaatcaccgaggaccaccggagctttctagcgaccctcgcaccagggaacgaacccctgtggtttaagggctccaacccacaacccagttcctttggcgggaaacagcaccctcccaaggccccgccccttcctggccccgccccgtcgtctctgggcccggctcctggagatgggtattattaatctgccttctatgggggacctggcccatctcgggtatcagccccgcccctactcgtccagtctccgaacgctctgcagccaatcggcgcccgagggtcggtccccgccttctcaagccccgccccctacccttatccctggcagcttccgctaaacgggctcagagccacgcggcacgcccgggaggctttctctggctggtaaccgctactcccggacaccagaccaccgccttccgtacacaggggcccgcatcccaccctcccggacctaagagcctgggtcccctgtttccggaggtccgcttcccggcccccagattctggcatcccagccctcagtgtccaagacccaggcactcctagggccaaggaacccgggcgctccgaactcccagctttcggacatctggcacacggggcagagcagagaagcctcagcgcccagcctggggaatttaaacactccagcttccaagagccaaggaacttcagtgctgtgaactcacaactctaaggagccctccaaagttccagtctccaggtgctgttactcaactcagtcctaggaacgtcgggtcctgggaaggagcccaagcgctcccagccagcttccaggcgctaagaaaccccggtgcttcccatcatggtggccgatcctcctcgagactccaaggggctcgcagcggcggagcccaccgccaacgggggcctggcgctggcctccatcgaggaccaaggcgcggcagcaggcggctactgcggttcccgggaccaggtgcgccgctgccttcgagccaacctgcttgtgctgctgacagtggtggccgtggtggccggcgtggcgctgggactgggggtgtcgggggccgggggtgcgctggcgttgggcccggagcgcttgagcgccttcgtcttcccgggcgagctgctgctgcgtctgctgcggatgatcatcttgccgctggtggtgtgcagcttgatcggcggcgccgccagcctggaccccggcgcgctcggccgtctgggcgcctgggcgctgctctttttcctggtcaccacgctgctggcgtcggcgctcggagtgggcttggcgctggctctgcagccgggcgccgcctccgccgccatcaacgcctccgtgggagccgcgggcagtgccgaaaatgcccccagcaaggaggtgctcgattcgttcctggatcttgcgagaaatatcttcccttccaacctggtgtcagcagcctttcgctcatactctaccacctatgaagagaggaatatcaccggaaccagggtgaaggtgcccgtggggcaggaggtggaggggatgaacatcctgggcttggtagtgtttgccatcgtctttggtgtggcgctgcggaagctggggcctgaaggggagctgcttatccgcttcttcaactccttcaatgaggccaccatggttctggtctcctggatcatgtggtacgcccctgtgggcatcatgttcctggtggctggcaagatcgtggagatggaggatgtgggtttactctttgcccgccttggcaagtacattctgtgctgcctgctgggtcacgccatccatgggctcctggtactgcccctcatctacttcctcttcacccgcaaaaacccctaccgcttcctgtggggcatcgtgacgccgctggccactgcctttgggacctcttccagttccgccacgctgccgctgatgatgaagtgcgtggaggagaataatggcgtggccaagcacatcagccgtttcatcctgcccatcggcgccaccgtcaacatggacggtgccgcgctcttccagtgcgtggccgcagtgttcattgcacagctcagccagcagtccttggacttcgtaaagatcatcaccatcctggtcacggccacagcgtccagcgtgggggcagcgggcatccctgctggaggtgtcctcactctggccatcatcctcgaagcagtcaacctcccggtcgaccatatctccttgatcctggctgtggactggctagtcgaccggtcctgtaccgtcctcaatgtagaaggtgacgctctgggggcaggactcctccaaaattacgtggaccgtacggagtcgagaagcacagagcctgagttgatacaagtgaagagtgagctgcccctggatccgctgccagtccccactgaggaaggaaaccccctcctcaaacactatcgggggcccgcaggggatgccacggtcgcctctgagaaggaatcagtcatgtaaaccccgggagggaccttccctgccctgctgggggtgctctttggacactggattatgaggaatggataaatggatgagctagggctctgggggtctgcctgcacactctggggagccaggggccccagcaccctccaggacaggagatctgggatgcctggctgctggagtacatgtgttcacaagggttactcctcaaaacccccagttctcactcatgtccccaactcaaggctagaaaacagcaagatggagaaataatgttctgctgcgtccccaccgtgacctgcctggcctcccctgtctcagggagcaggtcacaggtcaccatggggaattctagcccccactggggggatgttacaacaccatgctggttattttggcggctgtagttgtggggggatgtgtgtgtgcacgtgtgtgtgtgtgtgtgtgtgtgtgtgtgtgtgttctgtgacctcctgtccccatggtacgtcccaccctgtccccagatcccctattccctccacaataacagaaacactcccagggactctggggagaggctgaggacaaatacctgctgtcactccagaggacattttttttagcaataaaattgagtgtcaactatttaa

SEQ ID NO: 325675 - DNA, 3138 bp, Homo sapiens
ggctccctaaataaatacatcaattttatttaaatcttacagcaatcatatgagacaaaagcttttaacacctgcactttatattcgaggaattaaagttctcagaggcgactaaagaccaaactcagggctgaggagttccaaagctgagttgagttgcaaatgaatcaccgaggaccaccggagctttctagcgaccctcgcaccagggaacgaacccctgtggtttaagggctccaacccacaacccagttcctttggcgggaaacagcaccctcccaaggccccgccccttcctggccccgccccgtcgtctctgggcccggctcctggagatgggtattattaatctgccttctatgggggacctggcccatctcgggtatcagccccgcccctactcgtccagtctccgaacgctctgcagccaatcggcgcccgagggtcggtccccgccttctcaagccccgccccctacccttatccctggcagcttccgctaaacgggctcagagccacgcggcacgcccgggaggctttctctggctggtaaccgctactcccggacaccagaccaccgccttccgtacacaggggcccgcatcccaccctcccggacctaagagcctgggtcccctgtttccggaggtccgcttcccggcccccagattctggcatcccagccctcagtgtccaagacccaggcagcccgggtccccgcctcccggatccaggcgtccgggatctgcgccaccagaacctagcctcctgcagacctccgccatctgggggcactcaacctcctggagccaagggccccacgtcccacccagagaaactctcgtattcccagctcctagggccaaggaacccgggcgctccgaactcccagctttcggacatctggcacacggggcagagcagagaagcctcagcgcccagcctggggaatttaaacactccagcttccaagagccaaggaacttcagtgctgtgaactcacaactctaaggagccctccaaagttccagtctccaggtgctgttactcaactcagtcctaggaacgtcgggtcctgggaaggagcccaagcgctcccagccagcttccaggcgctaagaaaccccggtgcttcccatcatggtggccgatcctcctcgagactccaaggggctcgcagcggcggagcccaccgccaacgggggcctggcgctggcctccatcgaggaccaaggcgcggcagcaggcggctactgcggttcccgggaccaggtgcgccgctgccttcgagccaacctgcttgtggctgctggcgtcggcgctcggagtgggcttggcgctggctctgcagccgggcgccgcctccgccgccatcaacgcctccgtgggagccgcgggcagtgccgaaaatgcccccagcaaggaggtgctcgattcgttcctggatcttgcgagaaatatcttcccttccaacctggtgtcagcagcctttcgctcatactctaccacctatgaagagaggaatatcaccggaaccagggtgaaggtgcccgtggggcaggaggtggaggggatgaacatcctgggcttggtagtgtttgccatcgtctttggtgtggcgctgcggaagctggggcctgaaggggagctgcttatccgcttcttcaactccttcaatgaggccaccatggttctggtctcctggatcatgtggtacgcccctgtgggcatcatgttcctggtggctggcaagatcgtggagatggaggatgtgggtttactctttgcccgccttggcaagtacattctgtgctgcctgctgggtcacgccatccatgggctcctggtactgcccctcatctacttcctcttcacccgcaaaaacccctaccgcttcctgtggggcatcgtgacgccgctggccactgcctttgggacctcttccagttccgccacgctgccgctgatgatgaagtgcgtggaggagaataatggcgtggccaagcacatcagccgtttcatcctgcccatcggcgccaccgtcaacatggacggtgccgcgctcttccagtgcgtggccgcagtgttcattgcacagctcagccagcagtccttggacttcgtaaagatcatcaccatcctggtcacggccacagcgtccagcgtgggggcagcgggcatccctgctggaggtgtcctcactctggccatcatcctcgaagcagtcaacctcccggtcgaccatatctccttgatcctggctgtggactggctagtcgaccggtcctgtaccgtcctcaatgtagaaggtgacgctctgggggcaggactcctccaaaattacgtggaccgtacggagtcgagaagcacagagcctgagttgatacaagtgaagagtgagctgcccctggatccgctgccagtccccactgaggaaggaaaccccctcctcaaacactatcgggggcccgcaggggatgccacggtcgcctctgagaaggaatcagtcatgtaaaccccgggagggaccttccctgccctgctgggggtgctctttggacactggattatgaggaatggataaatggatgagctagggctctgggggtctgcctgcacactctggggagccaggggccccagcaccctccaggacaggagatctgggatgcctggctgctggagtacatgtgttcacaagggttactcctcaaaacccccagttctcactcatgtccccaactcaaggctagaaaacagcaagatggagaaataatgttctgctgcgtccccaccgtgacctgcctggcctcccctgtctcagggagcaggtcacaggtcaccatggggaattctagcccccactggggggatgttacaacaccatgctggttattttggcggctgtagttgtggggggatgtgtgtgtgcacgtgtgtgtgtgtgtgtgtgtgtgtgtgtgtgtgttctgtgacctcctgtccccatggtacgtcccaccctgtccccagatcccctattccctccacaataacagaaacactcccagggactctggggagaggctgaggacaaatacctgctgtcactccagaggacattttttttagcaataaaattgagtgtcaactatttaa

SEQ ID NO: 325676 - DNA, 3174 bp, Homo sapiens
ggctccctaaataaatacatcaattttatttaaatcttacagcaatcatatgagacaaaagcttttaacacctgcactttatattcgaggaattaaagttctcagaggcgactaaagaccaaactcagggctgaggagttccaaagctgagttgagttgcaaatgaatcaccgaggaccaccggagctttctagcgaccctcgcaccagggaacgaacccctgtggtttaagggctccaacccacaacccagttcctttggcgggaaacagcaccctcccaaggccccgccccttcctggccccgccccgtcgtctctgggcccggctcctggagatgggtattattaatctgccttctatgggggacctggcccatctcgggtatcagccccgcccctactcgtccagtctccgaacgctctgcagccaatcggcgcccgagggtcggtccccgccttctcaagccccgccccctacccttatccctggcagcttccgctaaacgggctcagagccacgcggcacgcccgggaggctttctctggctggtaaccgctactcccggacaccagaccaccgccttccgtacacaggggcccgcatcccaccctcccggacctaagagcctgggtcccctgtttccggaggtccgcttcccggcccccagattctggcatcccagccctcagtgtccaagacccaggcagcccgggtccccgcctcccggatccaggcgtccgggatctgcgccaccagaacctagcctcctgcagacctccgccatctgggggcactcaacctcctggagccaagggccccacgtcccacccagagaaactctcgtattcccagctcctagggccaaggaacccgggcgctccgaactcccagctttcggacatctggcacacggggcagagcagagaagcctcagcgcccagcctggggaatttaaacactccagcttccaagagccaaggaacttcagtgctgtgaactcacaactctaaggagccctccaaagttccagtctccaggtgctgttactcaactcagtcctaggaacgtcgggtcctgggaaggagcccaagcgctcccagccagcttccaggcgctaagaaaccccggtgcttcccatcatggtgggccgggggtgcgctggcgttgggcccggagcgcttgagcgccttcgtcttcccgggcgagctgctgctgcgtctgctgcggatgatcatcttgccgctggtggtgtgcagcttgatcggcggcgccgccagcctggaccccggcgcgctcggccgtctgggcgcctgggcgctgctctttttcctggtcaccacgctgctggcgtcggcgctcggagtgggcttggcgctggctctgcagccgggcgccgcctccgccgccatcaacgcctccgtgggagccgcgggcagtgccgaaaatgcccccagcaaggaggtgctcgattcgttcctggatcttgcgagaaatatcttcccttccaacctggtgtcagcagcctttcgctcatactctaccacctatgaagagaggaatatcaccggaaccagggtgaaggtgcccgtggggcaggaggtggaggggatgaacatcctgggcttggtagtgtttgccatcgtctttggtgtggcgctgcggaagctggggcctgaaggggagctgcttatccgcttcttcaactccttcaatgaggccaccatggttctggtctcctggatcatgtggtacgcccctgtgggcatcatgttcctggtggctggcaagatcgtggagatggaggatgtgggtttactctttgcccgccttggcaagtacattctgtgctgcctgctgggtcacgccatccatgggctcctggtactgcccctcatctacttcctcttcacccgcaaaaacccctaccgcttcctgtggggcatcgtgacgccgctggccactgcctttgggacctcttccagttccgccacgctgccgctgatgatgaagtgcgtggaggagaataatggcgtggccaagcacatcagccgtttcatcctgcccatcggcgccaccgtcaacatggacggtgccgcgctcttccagtgcgtggccgcagtgttcattgcacagctcagccagcagtccttggacttcgtaaagatcatcaccatcctggtcacggccacagcgtccagcgtgggggcagcgggcatccctgctggaggtgtcctcactctggccatcatcctcgaagcagtcaacctcccggtcgaccatatctccttgatcctggctgtggactggctagtcgaccggtcctgtaccgtcctcaatgtagaaggtgacgctctgggggcaggactcctccaaaattacgtggaccgtacggagtcgagaagcacagagcctgagttgatacaagtgaagagtgagctgcccctggatccgctgccagtccccactgaggaaggaaaccccctcctcaaacactatcgggggcccgcaggggatgccacggtcgcctctgagaaggaatcagtcatgtaaaccccgggagggaccttccctgccctgctgggggtgctctttggacactggattatgaggaatggataaatggatgagctagggctctgggggtctgcctgcacactctggggagccaggggccccagcaccctccaggacaggagatctgggatgcctggctgctggagtacatgtgttcacaagggttactcctcaaaacccccagttctcactcatgtccccaactcaaggctagaaaacagcaagatggagaaataatgttctgctgcgtccccaccgtgacctgcctggcctcccctgtctcagggagcaggtcacaggtcaccatggggaattctagcccccactggggggatgttacaacaccatgctggttattttggcggctgtagttgtggggggatgtgtgtgtgcacgtgtgtgtgtgtgtgtgtgtgtgtgtgtgtgtgttctgtgacctcctgtccccatggtacgtcccaccctgtccccagatcccctattccctccacaataacagaaacactcccagggactctggggagaggctgaggacaaatacctgctgtcactccagaggacattttttttagcaataaaattgagtgtcaactatttaa

SEQ ID NO: 325677 - DNA, 3335 bp, Homo sapiens
ggctccctaaataaatacatcaattttatttaaatcttacagcaatcatatgagacaaaagcttttaacacctgcactttatattcgaggaattaaagttctcagaggcgactaaagaccaaactcagggctgaggagttccaaagctgagttgagttgcaaatgaatcaccgaggaccaccggagctttctagcgaccctcgcaccagggaacgaacccctgtggtttaagggctccaacccacaacccagttcctttggcgggaaacagcaccctcccaaggccccgccccttcctggccccgccccgtcgtctctgggcccggctcctggagatgggtattattaatctgccttctatgggggacctggcccatctcgggtatcagccccgcccctactcgtccagtctccgaacgctctgcagccaatcggcgcccgagggtcggtccccgccttctcaagccccgccccctacccttatccctggcagcttccgctaaacgggctcagagccacgcggcacgcccgggaggctttctctggctggtaaccgctactcccggacaccagaccaccgccttccgtacacaggggcccgcatcccaccctcccggacctaagagcctgggtcccctgtttccggaggtccgcttcccggcccccagattctggcatcccagccctcagtgtccaagacccaggcagcccgggtccccgcctcccggatccaggcgtccgggatctgcgccaccagaacctagcctcctgcagacctccgccatctgggggcactcaacctcctggagccaagggccccacgtcccacccagagaaactctcgtattcccagctcctagggccaaggaacccgggcgctccgaactcccagctttcggacatctggcacacggggcagagcagagaagcctcagcgcccagcctggggaatttaaacactccagcttccaagagccaaggaacttcagtgctgtgaactcacaactctaaggagccctccaaagttccagtctccaggtgctgttactcaactcagtcctaggaacgtcgggtcctgggaaggagcccaagcgctcccagccagcttccaggcgctaagaaaccccggtgcttcccatcatggtggccgatcctcctcgagactccaaggggctcgcagcggcggagcccaccgccaacgggggcctggcgctggcctccatcgaggaccaaggcgcggcagcaggcggctactgcggttcccgggaccaggtgcgccgctgccttcgagccaacctgcttgtgctgctgacagtggtggccgtggtggccggcgtggcgctgggactgggggtgtcgggggccgggggtgcgctggcgttgggcccggagcgcttgagcgccttcgtcttcccgggcgagctgctgctgcgtctgctgcggatgatcatcttgccgctggtggtgtgcagcttgatcggcggcgccgccagcctggaccccggcgcgctcggccgtctgggcgcctgggcgctgctctttttcctggtcaccacgctgctggcgtcggcgctcggagtgggcttggcgctggctctgcagccgggcgccgcctccgccgccatcaacgcctccgtgggagccgcgggcagtgccgaaaatgcccccagcaaggaggtgctcgattcgttcctggatcttgcgagaaatatcttcccttccaacctggtgtcagcagcctttcgctcatactctaccacctatgaagagaggaatatcaccggaaccagggtgaaggtgcccgtggggcaggaggtggaggggatgaacatcctgggcttggtagtgtttgccatcgtctttggtgtggcgctgcggaagctggggcctgaaggggagctgcttatccgcttcttcaactccttcaatgaggccaccatggttctggtctcctggatcatgtggtacgcccctgtgggcatcatgttcctggtggctggcaagatcgtggagatggaggatgtgggtttactctttgcccgccttggcaagtacattctgtgctgcctgctgggtcacgccatccatgggctcctggtactgcccctcatctacttcctcttcacccgcaaaaacccctaccgcttcctgtggggcatcgtgacgccgctggccactgcctttgggacctcttccagttccgccacgctgccgctgatgatgaagtgcgtggaggagaataatggcgtggccaagcacatcagccgtttcatcctgcccatcggcgccaccgtcaacatggacggtgccgcgctcttccagtgcgtggccgcagtgttcattgcacagctcagccagcagtccttggacttcgtaaagatcatcaccatcctggtcacggccacagcgtccagcgtgggggcagcgggcatccctgctggaggtgtcctcactctggccatcatcctcgaagcagtcaacctcccggtcgaccatatctccttgatcctggctgtggactggctagtcgaccggtcctgtaccgtcctcaatgtagaaggtgacgctctgggggcaggactcctccaaaattacgtggaccgtacggagtcgagaagcacagagcctgagttgatacaagtgaagagtgagctgcccctggatccgctgccagtccccactgaggaaggaaaccccctcctcaaacactatcgggggcccgcaggggatgccacggtcgcctctgagaaggaatcagtcatgtaaaccccgggagggaccttccctgccctgctgggggtgctctttggacactggattatgaggaatggataaatggatgagctagggctctgggggtctgcctgcacactctggggagccaggggccccagcaccctccaggacaggagatctgggatgcctggctgctggagtacatgtgttcacaagggttactcctcaaaacccccagttctcactcatgtccccaactcaaggctagggcctcccctgtctcagggagcaggtcacaggtcaccatggggaattctagcccccactggggggatgttacaacaccatgctggttattttggcggctgtagttgtggggggatgtgtgtgtgcacgtgtgtgtgtgtgtgtgtgtgtgtgtgtgtgtgttctgtgacctcctgtccccatggtacgtcccaccctgtccccagatcccctattccctccacaataacagaaacactcccagggactctggggagaggctgaggacaaatacctgctgtcactccagaggacattttttttagcaataaaattgagtgtcaactatttaa

SEQ ID NO: 325678 - DNA, 3177 bp, Homo sapiens
ggctccctaaataaatacatcaattttatttaaatcttacagcaatcatatgagacaaaagcttttaacacctgcactttatattcgaggaattaaagttctcagaggcgactaaagaccaaactcagggctgaggagttccaaagctgagttgagttgcaaatgaatcaccgaggaccaccggagctttctagcgaccctcgcaccagggaacgaacccctgtggtttaagggctccaacccacaacccagttcctttggcgggaaacagcaccctcccaaggccccgccccttcctggccccgccccgtcgtctctgggcccggctcctggagatgggtattattaatctgccttctatgggggacctggcccatctcgggtatcagccccgcccctactcgtccagtctccgaacgctctgcagccaatcggcgcccgagggtcggtccccgccttctcaagccccgccccctacccttatccctggcagcttccgctaaacgggctcagagccacgcggcacgcccgggaggctttctctggctggtaaccgctactcccggacaccagaccaccgccttccgtacacaggggcccgcatcccaccctcccggacctaagagcctgggtcccctgtttccggaggtccgcttcccggcccccagattctggcatcccagccctcagtgtccaagacccaggcagcccgggtccccgcctcccggatccaggcgtccgggatctgcgccaccagaacctagcctcctgcagacctccgccatctgggggcactcaacctcctggagccaagggccccacgtcccacccagagaaactctcgtattcccagctcctagggccaaggaacccgggcgctccgaactcccagctttcggacatctggcacacggggcagagcagagaagcctcagcgcccagcctggggaatttaaacactccagcttccaagagccaaggaacttcagtgctgtgaactcacaactctaaggagccctccaaagttccagtctccaggtgctgttactcaactcagtcctaggaacgtcgggtcctgggaaggagcccaagcgctcccagccagcttccaggcgctaagaaaccccggtgcttcccatcatggtggccgatcctcctcgagactccaaggggctcgcagcggcggagcccaccgccaacgggggcctggcgctggcctccatcgaggaccaaggcgcggcagcaggcggctactgcggttcccgggaccaggtgcgccgctgccttcgagccaacctgcttgtgctgctgacagtggtggccgtggtggccggcgtggcgctgggactgggggtgtcgggggccgggggtgcgctggcgttgggcccggagcgcttgagcgccttcgtcttcccgggcgagctgctgctgcgtctgctgcggatgatcatcttgccgctggtggtgtgcagcttgatcggcggcgccgccagcctggaccccggcgcgctcggccgtctgggcgcctgggcgctgctctttttcctggtcaccacgctgctggcgtcggcgctcggagtgggcttggcgctggctctgcagccgggcgccgcctccgccgccatcaacgcctccgtgggagccgcgggcagtgccgaaaatgcccccagcaaggaggtgctcgattcgttcctggatcttgcgagaaatatcttcccttccaacctggtgtcagcagcctttcgctcatactctaccacctatgaagagaggaatatcaccggaaccagggtgaaggtgcccgtggggcaggaggtggaggggatgaacatcctgggcttggtagtgtttgccatcgtctttggtgtggcgctgcggaagctggggcctgaaggggagctgcttatccgcttcttcaactccttcaatgaggccaccatggttctggtctcctggatcatgtggtacgcccctgtgggcatcatgttcctggtggctggcaagatcgtggagatggaggatgtgggtttactctttgcccgccttggcaagtacattctgtgctgcctgctgggtcacgccatccatgggctcctggtactgcccctcatctacttcctcttcacccgcaaaaacccctaccgcttcctgtggggcatcgtgacgccgctggccactgcctttgggacctcttccagttccgccacgctgccgctgatgatgaagtgcgtggaggagaataatggcgtggccaagcacatcagccgtttcatcctgcccatcggcgccaccgtcaacatggacggtgccgcgctcttccagtgcgtggccgcagtgttcattgcacagctcagccagcagtccttggacttcgtaaagatcatcaccatcctggtcacggccacagcgtccagcgtgggggcagcgggcatccctgctggaggtgtcctcactctggccatcatcctcgaagcagtcaacctcccggtcgaccatatctccttgatcctggctgtggactggctagtcgaccggtcctgtaccgtcctcaatgtagaaggtgacgctctgggggcaggactcctccaaaattacgtggaccgtacggagtcgagaagcacagagcctgagttgatacaagtgaagagtgagctgcccctggatccgctgccagtccccactgaggaaggaaaccccctcctcaaacactatcgggggcccgcaggggatgccacggtcgcctctgagaaggaatcagtcatgtaaaccccgggagggaccttccctgccctgctgggggtgctctttggacactggattatgaggaatggataaatggatgagctagggctctgggggtctgcctgcacactctggggagccaggggccccagcaccctccaggacaggagatctgggatgcctggctgctggagtacatgtgttcacaagggttactcctcaaaacccccagttctcactcatgtccccaactcaaggctagaaaacagcaagatggagaaataatgttctgtcccaccctgtccccagatcccctattccctccacaataacagaaacactcccagggactctggggagaggctgaggacaaatacctgctgtcactccagaggacattttttttagcaataaaattgagtgtcaactatttaa

SEQ ID NO: 325679 - DNA, 1730 bp, Homo sapiens
aggaaaactcgacaggatattgaggggaggctccagccctcgggagtaaatatcttcccttccaacctggtgtcagcagcctttcgctcatactctaccacctatgaagagaggaatatcaccggaaccagggtgaaggtgcccgtggggcaggaggtggaggggatgaacatcctgggcttggtagtgtttgccatcgtctttggtgtggcgctgcggaagctggggcctgaaggggagctgcttatccgcttcttcaactccttcaatgaggccaccatggttctggtctcctggatcatgtggtacgcccctgtgggcatcatgttcctggtggctggcaagatcgtggagatggaggatgtgggtttactctttgcccgccttggcaagtacattctgtgctgcctgctgggtcacgccatccatgggctcctggtactgcccctcatctacttcctcttcacccgcaaaaacccctaccgcttcctgtggggcatcgtgacgccgctggccactgcctttgggacctcttccagttccgccacgctgccgctgatgatgaagtgcgtggaggagaataatggcgtggccaagcacatcagccgtttcatcctgcccatcggcgccaccgtcaacatggacggtgccgcgctcttccagtgcgtggccgcagtgttcattgcacagctcagccagcagtccttggacttcgtaaagatcatcaccatcctggtcacggccacagcgtccagcgtgggggcagcgggcatccctgctggaggtgtcctcactctggccatcatcctcgaagcagtcaacctcccggtcgaccatatctccttgatcctggctgtggactggctagtcgaccggtcctgtaccgtcctcaatgtagaaggtgacgctctgggggcaggactcctccaaaattacgtggaccgtacggagtcgagaagcacagagcctgagttgatacaagtgaagagtgagctgcccctggatccgctgccagtccccactgaggaaggaaaccccctcctcaaacactatcgggggcccgcaggggatgccacggtcgcctctgagaaggaatcagtcatgtaaaccccgggagggaccttccctgccctgctgggggtgctctttggacactggattatgaggaatggataaatggatgagctagggctctgggggtctgcctgcacactctggggagccaggggccccagcaccctccaggacaggagatctgggatgcctggctgctggagtacatgtgttcacaagggttactcctcaaaacccccagttctcactcatgtccccaactcaaggctagaaaacagcaagatggagaaataatgttctgctgcgtccccaccgtgacctgcctggcctcccctgtctcagggagcaggtcacaggtcaccatggggaattctagcccccactggggggatgttacaacaccatgctggttattttggcggctgtagttgtggggggatgtgtgtgtgcacgtgtgtgtgtgtgtgtgtgtgtgtgtgtgtgtgttctgtgacctcctgtccccatggtacgtcccaccctgtccccagatcccctattccctccacaataacagaaacactcccagggactctggggagaggctgaggacaaatacctgctgtcactccagaggacattttttttagcaataaaattgagtgtcaactatttaa

SEQ ID NO: 325680 - DNA, 1951 bp, Homo sapiens
gccagcattcctcaccccgaacccacaatgcctcagggctagcacgccagcctcttggggctgaaggaggctgactccccaagtcctgcaaaggggtgcaagcctagttccaaccctgccgggctgaggcatgagtaggggctgtgtttgcgtgcaggcgggcccccaaagcttccactcgctgccttaaaacgccaacccagcctctcagacaatgctgccctcccactatggtatctaataaccctctgtgtgtctgtctctgcagaaatatcttcccttccaacctggtgtcagcagcctttcgctcatactctaccacctatgaagagaggaatatcaccggaaccagggtgaaggtgcccgtggggcaggaggtggaggggatgaacatcctgggcttggtagtgtttgccatcgtctttggtgtggcgctgcggaagctggggcctgaaggggagctgcttatccgcttcttcaactccttcaatgaggccaccatggttctggtctcctggatcatgtggtacgcccctgtgggcatcatgttcctggtggctggcaagatcgtggagatggaggatgtgggtttactctttgcccgccttggcaagtacattctgtgctgcctgctgggtcacgccatccatgggctcctggtactgcccctcatctacttcctcttcacccgcaaaaacccctaccgcttcctgtggggcatcgtgacgccgctggccactgcctttgggacctcttccagttccgccacgctgccgctgatgatgaagtgcgtggaggagaataatggcgtggccaagcacatcagccgtttcatcctgcccatcggcgccaccgtcaacatggacggtgccgcgctcttccagtgcgtggccgcagtgttcattgcacagctcagccagcagtccttggacttcgtaaagatcatcaccatcctggtcacggccacagcgtccagcgtgggggcagcgggcatccctgctggaggtgtcctcactctggccatcatcctcgaagcagtcaacctcccggtcgaccatatctccttgatcctggctgtggactggctagtcgaccggtcctgtaccgtcctcaatgtagaaggtgacgctctgggggcaggactcctccaaaattacgtggaccgtacggagtcgagaagcacagagcctgagttgatacaagtgaagagtgagctgcccctggatccgctgccagtccccactgaggaaggaaaccccctcctcaaacactatcgggggcccgcaggggatgccacggtcgcctctgagaaggaatcagtcatgtaaaccccgggagggaccttccctgccctgctgggggtgctctttggacactggattatgaggaatggataaatggatgagctagggctctgggggtctgcctgcacactctggggagccaggggccccagcaccctccaggacaggagatctgggatgcctggctgctggagtacatgtgttcacaagggttactcctcaaaacccccagttctcactcatgtccccaactcaaggctagaaaacagcaagatggagaaataatgttctgctgcgtccccaccgtgacctgcctggcctcccctgtctcagggagcaggtcacaggtcaccatggggaattctagcccccactggggggatgttacaacaccatgctggttattttggcggctgtagttgtggggggatgtgtgtgtgcacgtgtgtgtgtgtgtgtgtgtgtgtgtgtgtgtgttctgtgacctcctgtccccatggtacgtcccaccctgtccccagatcccctattccctccacaataacagaaacactcccagggactctggggagaggctgaggacaaatacctgctgtcactccagaggacattttttttagcaataaaattgagtgtcaactatttaa

SEQ ID NO: 325681 - DNA, 1733 bp, Homo sapiens
ggctaacggtagcgacggccctcgcggtgctgtaacaccttcgcagcacgcagcgactggatgctccacgcagactcataattcgaccgtccatactctaccacctatgaagagaggaatatcaccggaaccagggtgaaggtgcccgtggggcaggaggtggaggggatgaacatcctgggcttggtagtgtttgccatcgtctttggtgtggcgctgcggaagctggggcctgaaggggagctgcttatccgcttcttcaactccttcaatgaggccaccatggttctggtctcctggatcatgtggtacgcccctgtgggcatcatgttcctggtggctggcaagatcgtggagatggaggatgtgggtttactctttgcccgccttggcaagtacattctgtgctgcctgctgggtcacgccatccatgggctcctggtactgcccctcatctacttcctcttcacccgcaaaaacccctaccgcttcctgtggggcatcgtgacgccgctggccactgcctttgggacctcttccagttccgccacgctgccgctgatgatgaagtgcgtggaggagaataatggcgtggccaagcacatcagccgtttcatcctgcccatcggcgccaccgtcaacatggacggtgccgcgctcttccagtgcgtggccgcagtgttcattgcacagctcagccagcagtccttggacttcgtaaagatcatcaccatcctggtcacggccacagcgtccagcgtgggggcagcgggcatccctgctggaggtgtcctcactctggccatcatcctcgaagcagtcaacctcccggtcgaccatatctccttgatcctggctgtggactggctagtcgaccggtcctgtaccgtcctcaatgtagaaggtgacgctctgggggcaggactcctccaaaattacgtggaccgtacggagtcgagaagcacagagcctgagttgatacaagtgaagagtgagctgcccctggatccgctgccagtccccactgaggaaggaaaccccctcctcaaacactatcgggggcccgcaggggatgccacggtcgcctctgagaaggaatcagtcatgtaaaccccgggagggaccttccctgccctgctgggggtgctctttggacactggattatgaggaatggataaatggatgagctagggctctgggggtctgcctgcacactctggggagccaggggccccagcaccctccaggacaggagatctgggatgcctggctgctggagtacatgtgttcacaagggttactcctcaaaacccccagttctcactcatgtccccaactcaaggctagaaaacagcaagatggagaaataatgttctgctgcgtccccaccgtgacctgcctggcctcccctgtctcagggagcaggtcacaggtcaccatggggaattctagcccccactggggggatgttacaacaccatgctggttattttggcggctgtagttgtggggggatgtgtgtgtgcacgtgtgtgtgtgtgtgtgtgtgtgtgtgtgtgtgttctgtgacctcctgtccccatggtacgtcccaccctgtccccagatcccctattccctccacaataacagaaacactcccagggactctggggagaggctgaggacaaatacctgctgtcactccagaggacattttttttagcaataaaattgagtgtcaactatttaa

SEQ ID NO: 325682 - DNA, 1477 bp, Homo sapiens
tcgactcagaggatccctcttgccgactgggactggtctcctggatcatgtggtacgcccctgtgggcatcatgttcctggtggctggcaagatcgtggagatggaggatgtgggtttactctttgcccgccttggcaagtacattctgtgctgcctgctgggtcacgccatccatgggctcctggtactgcccctcatctacttcctcttcacccgcaaaaacccctaccgcttcctgtggggcatcgtgacgccgctggccactgcctttgggacctcttccagttccgccacgctgccgctgatgatgaagtgcgtggaggagaataatggcgtggccaagcacatcagccgtttcatcctgcccatcggcgccaccgtcaacatggacggtgccgcgctcttccagtgcgtggccgcagtgttcattgcacagctcagccagcagtccttggacttcgtaaagatcatcaccatcctggtcacggccacagcgtccagcgtgggggcagcgggcatccctgctggaggtgtcctcactctggccatcatcctcgaagcagtcaacctcccggtcgaccatatctccttgatcctggctgtggactggctagtcgaccggtcctgtaccgtcctcaatgtagaaggtgacgctctgggggcaggactcctccaaaattacgtggaccgtacggagtcgagaagcacagagcctgagttgatacaagtgaagagtgagctgcccctggatccgctgccagtccccactgaggaaggaaaccccctcctcaaacactatcgggggcccgcaggggatgccacggtcgcctctgagaaggaatcagtcatgtaaaccccgggagggaccttccctgccctgctgggggtgctctttggacactggattatgaggaatggataaatggatgagctagggctctgggggtctgcctgcacactctggggagccaggggccccagcaccctccaggacaggagatctgggatgcctggctgctggagtacatgtgttcacaagggttactcctcaaaacccccagttctcactcatgtccccaactcaaggctagaaaacagcaagatggagaaataatgttctgctgcgtccccaccgtgacctgcctggcctcccctgtctcagggagcaggtcacaggtcaccatggggaattctagcccccactggggggatgttacaacaccatgctggttattttggcggctgtagttgtggggggatgtgtgtgtgcacgtgtgtgtgtgtgtgtgtgtgtgtgtgtgtgtgttctgtgacctcctgtccccatggtacgtcccaccctgtccccagatcccctattccctccacaataacagaaacactcccagggactctggggagaggctgaggacaaatacctgctgtcactccagaggacattttttttagcaataaaattgagtgtcaactatttaa

SEQ ID NO: 325683 - DNA, 2261 bp, Homo sapiens
ggctccctaaataaatacatcaattttatttaaatcttacagcaatcatatgagacaaaagcttttaacacctgcactttatattcgaggaattaaagttctcagaggcgactaaagaccaaactcagggctgaggagttccaaagctgagttgagttgcaaatgaatcaccgaggaccaccggagctttctagcgaccctcgcaccagggaacgaacccctgtggtttaagggctccaacccacaacccagttcctttggcgggaaacagcaccctcccaaggccccgccccttcctggccccgccccgtcgtctctgggcccggctcctggagatgggtattattaatctgccttctatgggggacctggcccatctcgggtatcagccccgcccctactcgtccagtctccgaacgctctgcagccaatcggcgcccgagggtcggtccccgccttctcaagccccgccccctacccttatccctggcagcttccgctaaacgggctcagagccacgcggcacgcccgggaggctttctctggctggtaaccgctactcccggacaccagaccaccgccttccgtacacaggggcccgcatcccaccctcccggacctaagagcctgggtcccctgtttccggaggtccgcttcccggcccccagattctggcatcccagccctcagtgtccaagacccaggcagcccgggtccccgcctcccggatccaggcgtccgggatctgcgccaccagaacctagcctcctgcagacctccgccatctgggggcactcaacctcctggagccaagggccccacgtcccacccagagaaactctcgtattcccagctcctagggccaaggaacccgggcgctccgaactcccagctttcggacatctggcacacggggcagagcagagaagcctcagcgcccagcctggggaatttaaacactccagcttccaagagccaaggaacttcagtgctgtgaactcacaactctaaggagccctccaaagttccagtctccaggtgctgttactcaactcagtcctaggaacgtcgggtcctgggaaggagcccaagcgctcccagccagcttccaggcgctaagaaaccccggtgcttcccatcatggtggccgatcctcctcgagactccaaggggctcgcagcggcggagcccaccgccaacgggggcctggcgctggcctccatcgaggaccaaggcgcggcagcaggcggctactgcggttcccgggaccaggtgcgccgctgccttcgagccaacctgcttgtgctgctgacagtggtggccgtggtggccggcgtggcgctgggactgggggtgtcgggggccgggggtgcgctggcgttgggcccggagcgcttgagcgccttcgtcttcccgggcgagctgctgctgcgtctgctgcggatgatcatcttgccgctggtggtgtgcagcttgatcggcggcgccgccagcctggaccccggcgcgctcggccgtctgggcgcctgggcgctgctctttttcctggtcaccacgctgctggcgtcggcgctcggagtgggcttggcgctggctctgcagccgggcgccgcctccgccgccatcaacgcctccgtgggagccgcgggcagtgccgaaaatgcccccagcaaggaggtgctcgattcgttcctggatcttgcgagaaatatcttcccttccaacctggtgtcagcagcctttcgctcatactctaccacctatgaagagaggaatatcaccggaaccagggtgaaggtgcccgtggggcaggaggtggaggggatgaacatcctgggcttggtagtgtttgccatcgtctttggtgtggcgctgcggaagctggggcctgaaggggagctgcttatccgcttcttcaactccttcaatgaggccaccatggttctggtctcctggatcatgtggtacgcccctgtgggcatcatgttcctggtggctggcaagatcgtggagatggaggatgtgggtttactctttgcccgccttggcaagtacattctgtgctgcctgcatgcgggacacaattacagtagggatgctgagcgcagccgctcatggaattcttcttgacgagctgggactcgtgtcgcctcttgtggggcagtatgacatcgctgctcactgcctgtgggacctttcacatgtgtgcgacacgcggccactgatgatgacagtgcgtggaggagaactaagatgtcgtg

SEQ ID NO: 325684 - DNA, 1845 bp, Homo sapiens
ggctccctaaataaatacatcaattttatttaaatcttacagcaatcatatgagacaaaagcttttaacacctgcactttatattcgaggaattaaagttctcagaggcgactaaagaccaaactcagggctgaggagttccaaagctgagttgagttgcaaatgaatcaccgaggaccaccggagctttctagcgaccctcgcaccagggaacgaacccctgtggtttaagggctccaacccacaacccagttcctttggcgggaaacagcaccctcccaaggccccgccccttcctggccccgccccgtcgtctctgggcccggctcctggagatgggtattattaatctgccttctatgggggacctggcccatctcgggtatcagccccgcccctactcgtccagtctccgaacgctctgcagccaatcggcgcccgagggtcggtccccgccttctcaagccccgccccctacccttatccctggcagcttccgctaaacgggctcagagccacgcggcacgcccgggaggctttctctggctggtaaccgctactcccggacaccagaccaccgccttccgtacacaggggcccgcatcccaccctcccggacctaagagcctgggtcccctgtttccggaggtccgcttcccggcccccagattctggcatcccagccctcagtgtccaagacccaggcagcccgggtccccgcctcccggatccaggcgtccgggatctgcgccaccagaacctagcctcctgcagacctccgccatctgggggcactcaacctcctggagccaagggccccacgtcccacccagagaaactctcgtattcccagctcctagggccaaggaacccgggcgctccgaactcccagctttcggacatctggcacacggggcagagcagagaagcctcagcgcccagcctggggaatttaaacactccagcttccaagagccaaggaacttcagtgctgtgaactcacaactctaaggagccctccaaagttccagtctccaggtgctgttactcaactcagtcctaggaacgtcgggtcctgggaaggagcccaagcgctcccagccagcttccaggcgctaagaaaccccggtgcttcccatcatggtggccgatcctcctcgagactccaaggggctcgcagcggcggagcccaccgccaacgggggcctggcgctggcctccatcgaggaccaaggcgcggcagcaggcggctactgcggttcccgggaccaggtgcgccgctgccttcgagccaacctgcttgtgctgctgacagtggtggccgtggtggccggcgtggcgctgggactgggggtgtcgggggccgggggtgcgctggcgttgggcccggagcgcttgagcgccttcgtcttcccgggcgagctgctgctgcgtctgctgcggatgatcatcttgccgctggtggtgtgcagcttgatcggcggcgccgccagcctggaccccggcgcgctcggccgtctgggcgcctgggcgctgctctttttcctggtcaccacgctgctggcgtcggcgctcggagtgggcttggcgctggctctgcagccgggcgccgcctccgccgccatcaacgcctccgtgggagccgcgggcagtgccgaaaatgcccccagcaaggaggtgctcgattcgttcctggatcttgcgagaaatatcttcccttccaacctggtgtcagcagcctttcgctcaactcccagggactctggggagaggctgaggacaaatacctgctgtcactccagaggacattttttttagcaataaaattgagtgtcaactatttaa

SEQ ID NO: 325685 - DNA, 1424 bp, Homo sapiens
ggctccctaaataaatacatcaattttatttaaatcttacagcaatcatatgagacaaaagcttttaacacctgcactttatattcgaggaattaaagttctcagaggcgactaaagaccaaactcagggctgaggagttccaaagctgagttgagttgcaaatgaatcaccgaggaccaccggagctttctagcgaccctcgcaccagggaacgaacccctgtggtttaagggctccaacccacaacccagttcctttggcgggaaacagcaccctcccaaggccccgccccttcctggccccgccccgtcgtctctgggcccggctcctggagatgggtattattaatctgccttctatgggggacctggcccatctcgggtatcagccccgcccctactcgtccagtctccgaacgctctgcagccaatcggcgcccgagggtcggtccccgccttctcaagccccgccccctacccttatccctggcagcttccgctaaacgggctcagagccacgcggcacgcccgggaggctttctctggctggtaaccgctactcccggacaccagaccaccgccttccgtacacaggggcccgcatcccaccctcccggacctaagagcctgggtcccctgtttccggaggtccgcttcccggcccccagattctggcatcccagccctcagtgtccaagacccaggcagcccgggtccccgcctcccggatccaggcgtccgggatctgcgccaccagaacctagcctcctgcagacctccgccatctgggggcactcaacctcctggagccaagggccccacgtcccacccagagaaactctcgtattcccagctcctagggccaaggaacccgggcgctccgaactcccagctttcggacatctggcacacggggcagagcagagaagcctcagcgcccagcctggggaatttaaacactccagcttccaagagccaaggaacttcagtgctgtgaactcacaactctaaggagccctccaaagttccagtctccaggtgctgttactcaactcagtcctaggaacgtcgggtcctgggaaggagcccaagcgctcccagccagcttccaggcgctaagaaaccccggtgcttcccatcatggtggccgatcctcctcgagactccaaggggctcgcagcggcggagcccaccgccaacgggggcctggcgctggcctccatcgaggaccaaggcgcggcagcaggcggctactgcggttcccgggaccaggtgcgccgctgccttcgagccaacctgcttgtgctgctgacagtggtggccgtggtggccggcgtggcgctgggactgggggtgtcggggccgggtgctgagtgggcggagcgtgacgcctgctcccgggactgtgcagatcgagtggagac

SEQ ID NO: 325686 - DNA, 736 bp, Homo sapiens
  misc_feature (1)..(1): n is a, c, g, or t
  misc_feature (18)..(19): n is a, c, g, or t
  misc_feature (27)..(27): n is a, c, g, or t
naacatgctggtaccccnncgagtatntggatatcgtcgaccaggcgtcgaaacactatcgggggcccgcaggggatgccacggtcgcctctgagaaggaatcagtcatgtaaaccccgggagggaccttccctgccctgctgggggtgctctttggacactggattatgaggaatggataaatggatgagctagggctctgggggtctgcctgcacactctggggagccaggggccccagcaccctccaggacaggagatctgggatgcctggctgctggagtacatgtgttcacaagggttactcctcaaaacccccagttctcactcatgtccccaactcaaggctagaaaacagcaagatggagaaataatgttctgctgcgtccccaccgtgacctgcctggcctcccctgtctcagggagcaggtcacaggtcaccatggggaattctagcccccactggggggatgttacaacaccatgctggttattttggcggctgtagttgtggggggatgtgtgtgtgcacgtgtgtgtgtgtgtgtgtgtgtgtgtgtgtgtgttctgtgacctcctgtccccatggtacgtcccaccctgtccccagatcccctattccctccacaataacagaaacactcccagggactctggggagaggctgaggacaaatacctgctgtcactccagaggacattttttttagcaataaaattgagtgtcaactatttaa

SEQ ID NO: 325687 - DNA, 619 bp, Homo sapiens
  misc_feature (30)..(30): n is a, c, g, or t
gcggccgctccaacatcagaatggtaacanggcacgagggacactggattatgaggaatggataaatggatgagctagggctctgggggtctgcctgcacactctggggagccaggggccccagcaccctccaggacaggagatctgggatgcctggctgctggagtacatgtgttcacaagggttactcctcaaaacccccagttctcactcatgtccccaactcaaggctagaaaacagcaagatggagaaataatgttctgctgcgtccccaccgtgacctgcctggcctcccctgtctcagggagcaggtcacaggtcaccatggggaattctagcccccactggggggatgttacaacaccatgctggttattttggcggctgtagttgtggggggatgtgtgtgtgcacgtgtgtgtgtgtgtgtgtgtgtgtgtgtgtgtgttctgtgacctcctgtccccatggtacgtcccaccctgtccccagatcccctattccctccacaataacagaaacactcccagggactctggggagaggctgaggacaaatacctgctgtcactccagaggacattttttttagcaataaaattgagtgtcaactatttaa

SEQ ID NO: 325688 - DNA, 2082 bp, Homo sapiens
ggctccctaaataaatacatcaattttatttaaatcttacagcaatcatatgagacaaaagcttttaacacctgcactttatattcgaggaattaaagttctcagaggcgactaaagaccaaactcagggctgaggagttccaaagctgagttgagttgcaaatgaatcaccgaggaccaccggagctttctagcgaccctcgcaccagggaacgaacccctgtggtttaagggctccaacccacaacccagttcctttggcgggaaacagcaccctcccaaggccccgccccttcctggccccgccccgtcgtctctgggcccggctcctggagatgggtattattaatctgccttctatgggggacctggcccatctcgggtatcagccccgcccctactcgtccagtctccgaacgctctgcagccaatcggcgcccgagggtcggtccccgccttctcaagccccgccccctacccttatccctggcagcttccgctaaacgggctcagagccacgcggcacgcccgggaggctttctctggctggtaaccgctactcccggacaccagaccaccgccttccgtacacaggggcccgcatcccaccctcccggacctaagagcctgggtcccctgtttccggaggtccgcttcccggcccccagattctggcatcccagccctcagtgtccaagacccaggcagcccgggtccccgcctcccggatccaggcgtccgggatctgcgccaccagaacctagcctcctgcagacctccgccatctgggggcactcaacctcctggagccaagggccccacgtcccacccagagaaactctcgtattcccagctcctagggccaaggaacccgggcgctccgaactcccagctttcggacatctggcacacggggcagagcagagaagcctcagcgcccagcctggggaatttaaacactccagcttccaagagccaaggaacttcagtgctgtgaactcacaactctaaggagccctccaaagttccagtctccaggtgctgttactcaactcagtcctaggaacgtcgggtcctgggaaggagcccaagcgctcccagccagcttccaggcgctaagaaaccccggtgcttcccatcatggtggccgatcctcctcgagactccaaggggctcgcagcggcggagcccaccgccaacgggggcctggcgctggccttcgtcttcccgggcgagctgctgctgcgtctgctgcggatgatcatcttgccgctggtggtgtgcagcttgatcggcggcgccgccagcctggaccccggcgcgctcggccgtctgggcgcctgggcgctgctctttttcctggtcaccacgctgctggcgtcggcgctcggagtgggcttggcgctggctctgcagccgggcgccgcctccgccgccatcaacgcctccgtgggagccgcgggcagtgccgaaaatgcccccagcaaggaggtgctcgattcgttcctggatcttgcgagaaatatcttcccttccaacctggtgtcagcagcctttcgctcatactctaccacctatgaagagaggaatatcaccggaaccagggtgaaggtgcccgtggggcaggaggtggaggggatgaacatcctgggcttggtagtgtttgccatcgtctttggtgtggcgctgcggaagctggggcctgaaggggagctgcttatccgcttcttcaactccttcaatgaggccaccatggttctggtctcctggatcatgtggtacgcccctgtgggcatcatggtcctggggtggcagaacggggcaatggggaggtgggtaacaccttggcccgcctggaagtaacatccggcggccgggggtcagcaaccaggccggaaggcctcaaatatttccttaccgaaaaaccacgtcggggggatcgaacgctggcgcttggacctagaccgcacggcgtaaaacgtgtgagcaaattgtcgccacacgcctagcaacgccaatagggacgcacctagcggatcaacaccactacaaataaatagaacggggggggataacaacaca

SEQ ID NO: 325689 - DNA, 966 bp, Homo sapiens
ggctccctaaataaatacatcaattttatttaaatcttacagcaatcatatgagacaaaagcttttaacacctgcactttatattcgaggaattaaagttctcagaggcgactaaagaccaaactcagggctgaggagttccaaagctgagttgagttgcaaatgaatcaccgaggaccaccggagctttctagcgaccctcgcaccagggaacgaacccctgtggtttaagggctccaacccacaacccagttcctttggcgggaaacagcaccctcccaaggccccgccccttcctggccccgccccgtcgtctctgggcccggctcctggagatgggtattattaatctgccttctatgggggacctggcccatctcgggtatcagccccgcccctactcgtccagtctccgaacgctctgcagccaatcggcgcccgagggtcggtccccgccttctcaagccccgccccctacccttatccctggcagcttccgctaaacgggctcagagccacgcggcacgcccgggaggctttctctggctggtaaccgctactcccggacaccagaccaccgccttccgtacacaggggcccgcatcccaccctcccggacctaagagcctgggtcccctgtttccggaggtccgcttcccggcccccagattctggcatcccagccctcagtgtccaagacccaggcagcccgggtccccgcctcccggatccaggcgtccgggatctgcgccaccagaacctagcctcctgcagacctccgccatctgggggcactcaacctcctggagccaagggccccacgtcccaccctgtccccagatcccctattccctccacaataacagaaacactcccagggactctggggagaggctgaggacaaatacctgctgtcactccagaggacattttttttagcaataaaattgagtgtcaactatttaa

SEQ ID NO: 325690 - DNA, 371 bp, Homo sapiens
ccagcagatgaaatgagatcacattgaaaggatgtggaagggcaggctttgagcattgttagcttggcatggggttgggaggccctggtaacgatggacactgactcttcccaaccccacctacatactctaccacctatgaagagaggaatatcaccggaaccagggtgaaggtgagagcagtgggaggcagcgggggctctacctctttgcctattgctataattttttggttttatttctgccttagtctttgctgtggaatttgattgacactctgcagtccttccccaatttctgtcttttctgccttctggataggtctctactttgtcccttttcccaccccaggtgcccaggctcttcctttc

SEQ ID NO: 325691 - DNA, 416 bp, Homo sapiens
taaatgtgtttacctctctgagcctcggttttccacctctggaaaatgggggtattgatcatcctgccccatggggttgccagcagatgaaatgagatcacattgaaaggatgtggaagggcaggctttgagcattgttagcttggcatggggttgggaggccctggtaacgatggacactgactcttcccaaccccacctacatactctaccacctatgaagagaggaatatcaccggaaccagggtgaaggtgagagcagtgggaggcagcgggggctctacctctttgcctattgctataattttttggttttatttctgccttagtctttgctgtggaatttgattgacactctgcagtccttccccaatttctgtcttttctgccttctggataggtctctactttgtccc

SEQ ID NO: 325692 - DNA, 828 bp, Homo sapiens
  misc_feature (788)..(788): n is a, c, g, or t
  misc_feature (797)..(798): n is a, c, g, or t
gccagcattcctcaccccgaacccacaatgcctcagggctagcacgccagcctcttggggctgaaggaggctgactccccaagtcctgcaaaggggtgcaagcctagttccaaccctgccgggctgaggcatgagtaggggctgtgtttgcgtgcaggcgggcccccaaagcttccactcgctgccttaaaacgccaacccagcctctcagacaatgctgccctcccactatggtatctaataaccctctgtgtgtctgtctctgcagaaatatcttcccttccaacctggtgtcagcagcctttcgctcatactctaccacctatgaagagaggaatatcaccggaaccagggtgaaggtgcccgtggggcaggaggtggaggggatgaacatcctgggcttggtagtgtttgccatcgtctttggtgtggcgctgcggaagctggggcctgaaggggagctgcttatccgcttcttcaactccttcaatgaggccaccatggttctggtctcctggatcatgtggtacgcccctgtgggcatcatgttcctggtggctggcaagatcgtggagatggaggatgtgggtttactctttgcccgccttggcaagtacattctgtgctgcctgctgggtcacgccatccatgggctcctggtactgcccctcatctacttcctcttcacccgcaaaaacccctaccgcttcctgtggggcatcgtgacgccgctggccactgcctttgggacctcttccagttcgcagctgcgtgatgatgaagggggnggaacatgnngggcaggccttcacggatcactgcattggg

SEQ ID NO: 325693 - DNA, 3778 bp, Homo sapiens
ggctccctaaataaatacatcaattttatttaaatcttacagcaatcatatgagacaaaagcttttaacacctgcactttatattcgaggaattaaagttctcagaggcgactaaagaccaaactcagggctgaggagttccaaagctgagttgagttgcaaatgaatcaccgaggaccaccggagctttctagcgaccctcgcaccagggaacgaacccctgtggtttaagggctccaacccacaacccagttcctttggcgggaaacagcaccctcccaaggccccgccccttcctggccccgccccgtcgtctctgggcccggctcctggagatgggtattattaatctgccttctatgggggacctggcccatctcgggtatcagccccgcccctactcgtccagtctccgaacgctctgcagccaatcggcgcccgagggtcggtccccgccttctcaagccccgccccctacccttatccctggcagcttccgctaaacgggctcagagccacgcggcacgcccgggaggctttctctggctggtaaccgctactcccggacaccagaccaccgccttccgtacacaggggcccgcatcccaccctcccggacctaagagcctgggtcccctgtttccggaggtccgcttcccggcccccagattctggcatcccagccctcagtgtccaagacccaggcagcccgggtccccgcctcccggatccaggcgtccgggatctgcgccaccagaacctagcctcctgcagacctccgccatctgggggcactcaacctcctggagccaagggccccacgtcccacccagagaaactctcgtattcccagctcctagggccaaggaacccgggcgctccgaactcccagctttcggacatctggcacacggggcagagcagagaagcctcagcgcccagcctggggaatttaaacactccagcttccaagagccaaggaacttcagtgctgtgaactcacaactctaaggagccctccaaagttccagtctccaggtgctgttactcaactcagtcctaggaacgtcgggtcctgggaaggagcccaagcgctcccagccagcttccaggcgctaagaaaccccggtgcttcccatcatggtggccgatcctcctcgagactccaaggggctcgcagcggcggagcccaccgccaacgggggcctggcgctggcctccatcgaggaccaaggcgcggcagcaggcggctactgcggttcccgggaccaggtgcgccgctgccttcgagccaacctgcttgtgctgctgacagtggtggccgtggtggccggcgtggcgctgggactgggggtgtcgggggccgggggtgcgctggcgttgggcccggagcgcttgagcgccttcgtcttcccgggcgagctgctgctgcgtctgctgcggatgatcatcttgccgctggtggtgtgcagcttgatcggcggcgccgccagcctggaccccggcgcgctcggccgtctgggcgcctgggcgctgctctttttcctggtcaccacgctgctggcgtcggcgctcggagtgggcttggcgctggctctgcagccgggcgccgcctccgccgccatcaacgcctccgtgggagccgcgggcagtgccgaaaatgcccccagcaaggaggtgctcgattcgttcctggatcttgcgagaaatatcttcccttccaacctggtgtcagcagcctttcgctcatactctaccacctatgaagagaggaatatcaccggaaccagggtgaaggtgcccgtggggcaggaggtggaggggatgaacatcctgggcttggtagtgtttgccatcgtctttggtgtggcgctgcggaagctggggcctgaaggggagctgcttatccgcttcttcaactccttcaatgaggccaccatggttctggtctcctggatcatgtggtacgcccctgtgggcatcatgttcctggtggctggcaagatcgtggagatggaggatgtgggtttactctttgcccgccttggcaagtacattctgtgctgcctgctgggtcacgccatccatgggctcctggtactgcccctcatctacttcctcttcacccgcaaaaacccctaccgcttcctgtggggcatcgtgacgccgctggccactgcctttgggacctcttccagttccgccacgctgccgctgatgatgaagtgcgtggaggagaataatggcgtggccaagcacatcagccgtttcatcctgcccatcggcgccaccgtcaacatggacggtgccgcgctcttccagtgcgtggccgcagtgttcattgcacagctcagccagcagtccttggacttcgtaaagatcatcaccatcctggtcacggccacagcgtccagcgtgggggcagcgggcatccctgctggaggtgtcctcactctggccatcatcctcgaagcagtcaacctcccggtcgaccatatctccttgatcctggctgtggactggctagtcgaccggtcctgtaccgtcctcaatgtagaaggtgacgctctgggggcaggactcctccaaaattacgtggaccgtacggagtcgagaagcacagagcctgagttgatacaagtgaagagtgagctgcccctggatccgctgccagtccccactgaggaaggaaaccccctcctcaaacactatcgggggcccgcaggggatgccacggtcgcctctgagaaggaatcagtcatgtaaaccccgggagggaccttccctgccctgctgggggtgctctttggacactggattatgaggaatggataaatggatgagctagggctctgggggtctgcctgcacactctggggagccaggggccccagcaccctccaggacaggagatctgggatgcctggctgctggagtacatgtgttcacaagggttactcctcaaaacccccagttctcactcatgtccccaactcaaggctagaaaacagcaagatggagaaataatgttctgctgcgtccccaccgtgacctgcctggcctcccctgtctcagggagcaggtcacaggtcaccatggggaattctagcccccactggggggatgttacaacaccatgctggttattttggcggctgtagttgtggggggatgtgtgtgtgcacgtgtgtgtgtgtgtgtgtgtgtgtgtgtgtgtgttctgtgacctcctgtccccatggtacgtcccaccctgtccccagatcccctattccctccacaataacagaaacactcccagggactctggggagaggctgaggacaaatacctgctgtcactccagaggacattttttttagcaataaaattgagtgtcaactatttaaaaaacacagctcaaacaacgaaaagaagaggaaacaagacacaagcacaaaaagaacaaaagcaaatgggaacaaacaagacaacaccgacggcgcggccgcgaaacaacgaacaacaacacaggacggagacagacaaataagcgaaccacccagccgataaggacaagcagagcgctacctagagcggaaaaacttcacaccccaacgcgcagcgcggcgacaacacacgtgcgggggacgagaacgaagcaccacccgaactagagagagaacgccaaaacagtgagggcacacatagggcaccaccccacagcaagaaggccgagacaaaacagcaggcagttgggaaccacagtacgcggcgggaggcagagagcatgaaatcg

SEQ ID NO: 325694 - DNA, 3378 bp, Homo sapiens
ggctccctaaataaatacatcaattttatttaaatcttacagcaatcatatgagacaaaagcttttaacacctgcactttatattcgaggaattaaagttctcagaggcgactaaagaccaaactcagggctgaggagttccaaagctgagttgagttgcaaatgaatcaccgaggaccaccggagctttctagcgaccctcgcaccagggaacgaacccctgtggtttaagggctccaacccacaacccagttcctttggcgggaaacagcaccctcccaaggccccgccccttcctggccccgccccgtcgtctctgggcccggctcctggagatgggtattattaatctgccttctatgggggacctggcccatctcgggtatcagccccgcccctactcgtccagtctccgaacgctctgcagccaatcggcgcccgagggtcggtccccgccttctcaagccccgccccctacccttatccctggcagcttccgctaaacgggctcagagccacgcggcacgcccgggaggctttctctggctggtaaccgctactcccggacaccagaccaccgccttccgtacacaggggcccgcatcccaccctcccggacctaagagcctgggtcccctgtttccggaggtccgcttcccggcccccagattctggcatcccagccctcagtgtccaagacccaggcagcccgggtccccgcctcccggatccaggcgtccgggatctgcgccaccagaacctagcctcctgcagacctccgccatctgggggcactcaacctcctggagccaagggccccacgtcccacccagagaaactctcgtattcccagctcctagggccaaggaacccgggcgctccgaactcccagctttcggacatctggcacacggggcagagcagagaagcctcagcgcccagcctggggaatttaaacactccagcttccaagagccaaggaacttcagtgctgtgaactcacaactctaaggagccctccaaagttccagtctccaggtgctgttactcaactcagtcctaggaacgtcgggtcctgggaaggagcccaagcgctcccagccagcttccaggcgctaagaaaccccggtgcttcccatcatggtggccgatcctcctcgagactccaaggggctcgcagcggcggagcccaccgccaacgggggcctggcgctggcctccatcgaggaccaaggcgcggcagcaggcggctactgcggttcccgggaccaggtgcgccgctgccttcgagccaacctgcttgtgctgctgacagtggtggccgtggtggccggcgtggcgctgggactgggggtgtcgggggccgggggtgcgctggcgttgggcccggagcgcttgagcgccttcgtcttcccgggcgagctgctgctgcgtctgctgcggatgatcatcttgccgctggtggtgtgcagcttgatcggcggcgccgccagcctggaccccggcgcgctcggccgtctgggcgcctgggcgctgctctttttcctggtcaccacgctgctggcgtcggcgctcggagtgggcttggcgctggctctgcagccgggcgccgcctccgccgccatcaacgcctccgtgggagccgcgggcagtgccgaaaatgcccccagcaaggaggtgctcgattcgttcctggatcttgcgagaaatatcttcccttccaacctggtgtcagcagcctttcgctcatactctaccacctatgaagagaggaatatcaccggaaccagggtgaaggtgcccgtggggcaggaggtggaggggatgaacatcctgggcttggtagtgtttgccatcgtctttggtgtggcgctgcggaagctggggcctgaaggggagctgcttatccgcttcttcaactccttcaatgaggccaccatggttctggtctcctggatcatgtggtacgcccctgtgggcatcatgttcctggtggctggcaagatcgtggagatggaggatgtgggtttactctttgcccgccttggcaagtacattctgtgctgcctgctgggtcacgccatccatgggctcctggtactgcccctcatctacttcctcttcacccgcaaaaacccctaccgcttcctgtggggcatcgtgacgccgctggccactgcctttgggacctcttccagttccgccacgctgccgctgatgatgaagtgcgtggaggagaataatggcgtggccaagcacatcagccgtttcatcctgcccatcggcgccaccgtcaacatggacggtgccgcgctcttccagtgcgtggccgcagtgttcattgcacagctcagccagcagtccttggacttcgtaaagatcatcaccatcctggtcacggccacagcgtccagcgtgggggcagcgggcatccctgctggaggtgtcctcactctggccatcatcctcgaagcagtcaacctcccggtcgaccatatctccttgatcctggctgtggactggctagtcgaccggtcctgtaccgtcctcaatgtagaaggtgacgctctgggggcaggactcctccaaaattacgtggaccgtacggagtcgagaagcacagagcctgagttgatacaagtgaagagtgagctgcccctggatccgctgccagtccccactgaggaaggaaaccccctcctcaaacactatcgggggcccgcaggggatgccacggtcgcctctgagaaggaatcagtcatgtaaaccccgggagggaccttccctgccctgctgggggtgctctttggacactggattatgaggaatggataaatggatgagctagggctctgggggtctgcctgcacactctggggagccaggggccccagcaccctccaggacaggagatctgggatgcctggctgctggagtacatgtgttcacaagggttactcctcaaaacccccagttctcactcatgtccccaactcaaggctagaaaacagcaagatggagaaataatgttctgctgcgtccccaccgtgacctgcctggcctcccctgtctcagggagcaggtcacaggtcaccatggggaattctagcccccactggggggatgttacaacaccatgctggttattttggcggctgtagttgtggggggatgtgtgtgtgcactgtgtgtgtgtgtgtgtgtgtgttctgtgacctcctgtccccatggtacgtcccaccctgtccccagatcccctattccctccacaataacagaaacactcccagggactctggggagaggctgaggacaaatacctgctgtcactccagaggacattttttttagcaataaaattgagtgtcaactatttaa

SEQ ID NO: 325695 - DNA, 3297 bp, Homo sapiens
ggctccctaaataaatacatcaattttatttaaatcttacagcaatcatatgagacaaaagcttttaacacctgcactttatattcgaggaattaaagttctcagaggcgactaaagaccaaactcagggctgaggagttccaaagctgagttgagttgcaaatgaatcaccgaggaccaccggagctttctagcgaccctcgcaccagggaacgaacccctgtggtttaagggctccaacccacaacccagttcctttggcgggaaacagcaccctcccaaggccccgccccttcctggccccgccccgtcgtctctgggcccggctcctggagatgggtattattaatctgccttctatgggggacctggcccatctcgggtatcagccccgcccctactcgtccagtctccgaacgctctgcagccaatcggcgcccgagggtcggtccccgccttctcaagccccgccccctacccttatccctggcagcttccgctaaacgggctcagagccacgcggcacgcccgggaggctttctctggctggtaaccgctactcccggacaccagaccaccgccttccgtacacaggggcccgcatcccaccctcccggacctaagagcctgggtcccctgtttccggaggtccgcttcccggcccccagattctggcatcccagccctcagtgtccaagacccaggcagcccgggtccccgcctcccggatccaggcgtccgggatctgcgccaccagaacctagcctcctgcagacctccgccatctgggggcactcaacctcctggagccaagggccccacgtcccacccagagaaactctcgtattcccagctcctagggccaaggaacccgggcgctccgaactcccagctttcggacatctggcacacggggcagagcagagaagcctcagcgcccagcctggggaatttaaacactccagcttccaagagccaaggaacttcagtgctgtgaactcacaactctaaggagccctccaaagttccagtctccaggtgctgttactcaactcagtcctaggaacgtcgggtcctgggaaggagcccaagcgctcccagccagcttccaggcgctaagaaaccccggtgcttcccatcatggtggccgatcctcctcgagactccaaggggctcgcagcggcggagcccaccgccaacgggggcctggcgctggcctccatcgaggaccaaggcgcggcagcaggcggctactgcggttcccgggaccaggtgcgccgctgccttcgagccaacctgcttgtgctgctgacagtggtggccgtggtggccggcgtggcgctgggactgggggtgtcgggggccgggggtgcgctggcgttgggcccggagcgcttgagcgccttcgtcttcccgggcgagctgctgctgcgtctgctgcggatgatcatcttgccgctggtggtgtgcagcttgatcggcggcgccgccagcctggaccccggcgcgctcggccgtctgggcgcctgggcgctgctctttttcctggtcaccacgctgctggcgtcggcgctcggagtgggcttggcgctggctctgcagccgggcgccgcctccgccgccatcaacgcctccgtgggagccgcgggcagtgccgaaaatgcccccagcaaggaggtgctcgattcgttcctggatcttgcgagaaatatcttcccttccaacctggtgtcagcagcctttcgctcatactctaccacctatgaagagaggaatatcaccggaaccagggtgaaggtgcccgtggggcaggaggtggaggggatgaacatcctgggcttggtagtgtttgccatcgtctttggtgtggcgctgcggaagctggggcctgaaggggagctgcttatccgcttcttcaactccttcaatgaggccaccatggttctggtctcctggatcatgtggtacgcccctgtgggcatcatgttcctggtggctggcaagatcgtggagatggaggatgtgggtttactctttgcccgccttggcaagtacattctgtgctgcctgctgggtcacgccatccatgggctcctggtactgcccctcatctacttcctcttcacccgcaaaaacccctaccgcttcctgtggggcatcgtgacgccgctggccactgcctttgggacctcttccagttccgccacgctgccgctgatgatgaagtgcgtggaggagaataatggcgtggccaagcacatcagccgtttcatcctgcccatcggcgccaccgtcaacatggacggtgccgcgctcttccagtgcgtggccgcagtgttcattgcacagctcagccagcagtccttggacttcgtaaagatcatcaccatcctggtcacggccacagcgtccagcgtgggggcagcgggcatccctgctggaggtgtcctcactctggccatcatcctcgaagcagtcaacctcccggtcgaccatatctccttgatcctggctgtggactggctagtcgaccggtcctgtaccgtcctcaatgtagaaggtgacgctctgggggcaggactcctccaaaattacgtggaccgtacggagtcgagaagcacagagcctgagttgatacaagtgaagagtgagctgcccctggatccgctgccagtccccactgaggaaggaaaccccctcctcaaacactatcgggggcccgcaggggatgccacggtcgcctctgagaaggaatcagtcatgtaaaccccgggagggaccttccctgccctgctgggggtgctctttggacactggattatgaggaatggataaatggatgagctagggctctgggggtctgcctgcacactctggggagccaggggccccagcaccctccaggacaggagatctgggatgcctggctgctggagtacatgtgttcacaagggttactcctcaaaacccccagttctcactcatgtccccaactcaaggctagaaaacagcaagatggagaaataatgttctgttacaacaccatgctggttattttggcggctgtagttgtggggggatgtgtgtgtgcacgtgtgtgtgtgtgtgtgtgtgtgtgtgtgtgtgttctgtgacctcctgtccccatggtacgtcccaccctgtccccagatcccctattccctccacaataacagaaacactcccagggactctggggagaggctgaggacaaatacctgctgtcactccagaggacattttttttagcaataaaattgagtgtcaactatttaa

SEQ ID NO: 325696 - DNA, 3286 bp, Homo sapiens
ggctccctaaataaatacatcaattttatttaaatcttacagcaatcatatgagacaaaagcttttaacacctgcactttatattcgaggaattaaagttctcagaggcgactaaagaccaaactcagggctgaggagttccaaagctgagttgagttgcaaatgaatcaccgaggaccaccggagctttctagcgaccctcgcaccagggaacgaacccctgtggtttaagggctccaacccacaacccagttcctttggcgggaaacagcaccctcccaaggccccgccccttcctggccccgccccgtcgtctctgggcccggctcctggagatgggtattattaatctgccttctatgggggacctggcccatctcgggtatcagccccgcccctactcgtccagtctccgaacgctctgcagccaatcggcgcccgagggtcggtccccgccttctcaagccccgccccctacccttatccctggcagcttccgctaaacgggctcagagccacgcggcacgcccgggaggctttctctggctggtaaccgctactcccggacaccagaccaccgccttccgtacacaggggcccgcatcccaccctcccggacctaagagcctgggtcccctgtttccggaggtccgcttcccggcccccagattctggcatcccagccctcagtgtccaagacccaggcagcccgggtccccgcctcccggatccaggcgtccgggatctgcgccaccagaacctagcctcctgcagacctccgccatctgggggcactcaacctcctggagccaagggccccacgtcccacccagagaaactctcgtattcccagctcctagggccaaggaacccgggcgctccgaactcccagctttcggacatctggcacacggggcagagcagagaagcctcagcgcccagcctggggaatttaaacactccagcttccaagagccaaggaacttcagtgctgtgaactcacaactctaaggagccctccaaagttccagtctccaggtgctgttactcaactcagtcctaggaacgtcgggtcctgggaaggagcccaagcgctcccagccagcttccaggcgctaagaaaccccggtgcttcccatcatggtggccgatcctcctcgagactccaaggggctcgcagcggcggagcccaccgccaacgggggcctggcgctggcctccatcgaggaccaaggcgcggcagcaggcggctactgcggttcccgggaccaggtgcgccgctgccttcgagccaacctgcttgtgctgctgacagtggtggccgtggtggccggcgtggcgctgggactgggggtgtcgggggccgggggtgcgctggcgttgggcccggagcgcttgagcgccttcgtcttcccgggcgagctgctgctgcgtctgctgcggatgatcatcttgccgctggtggtgtgcagcttgatcggcggcgccgccagcctggaccccggcgcgctcggccgtctgggcgcctgggcgctgctctttttcctggtcaccacgctgctggcgtcggcgctcggagtgggcttggcgctggctctgcagccgggcgccgcctccgccgccatcaacgcctccgtgggagccgcgggcagtgccgaaaatgcccccagcaaggaggtgctcgattcgttcctggatcttgcgagaaatatcttcccttccaacctggtgtcagcagcctttcgctcatactctaccacctatgaagagaggaatatcaccggaaccagggtgaaggtgcccgtggggcaggaggtggaggggatgaacatcctgggcttggtagtgtttgccatcgtctttggtgtggcgctgcggaagctggggcctgaaggggagctgcttatccgcttcttcaactccttcaatgaggccaccatggttctggtctcctggatcatgtggtacgcccctgtgggcatcatgttcctggtggctggcaagatcgtggagatggaggatgtgggtttactctttgcccgccttggcaagtacattctgtgctgcctgctgggtcacgccatccatgggctcctggtactgcccctcatctacttcctcttcacccgcaaaaacccctaccgcttcctgtggggcatcgtgacgccgctggccactgcctttgggacctcttccagttccgccacgctgccgctgatgatgaagtgcgtggaggagaataatggcgtggccaagcacatcagccgtttcatcctgcccatcggcgccaccgtcaacatggacggtgccgcgctcttccagtgcgtggccgcagtgttcattgcacagctcagccagcagtccttggacttcgtaaagatcatcaccatcctggtcacggccacagcgtccagcgtgggggcagcgggcatccctgctggaggtgtcctcactctggccatcatcctcgaagcagtcaacctcccggtcgaccatatctccttgatcctggctgtggactggctagtcgaccggtcctgtaccgtcctcaatgtagaaggtgacgctctgggggcaggactcctccaaaattacgtggaccgtacggagtcgagaagcacagagcctgagttgatacaagtgaagagtgagctgcccctggatccgctgccagtccccactgaggaaggaaaccccctcctcaaacactatcgggggcccgcaggggatgccacggtcgcctctgagaaggaatcagtcatgtaaaccccgggagggaccttccctgccctgctgggggtgctctttggacactggattatgaggaatggataaatggatgagctagggctctgggggtctgcctgcacactctggggagccaggggccccagcaccctccaggacaggagatctgggatgcctggctgctggagtacatgtgttcacaagggttactcctcaaaacccccagttctcactcatgtccccaactcaaggctagaaaacagcaagatggagaaataatgttctgttacaacaccatgctggttattttggcggctgtagttgtggggggatgtgtgtgtgcactgtgtgtgtgtgtgtgtgtgtgttctgtgacctcctgtccccatggtacgtcccaccctgtccccagatcccctattccctccacaataacagaaacactcccagggactctggggagaggctgaggacaaatacctgctgtcactccagaggacattttttttagcaataaaattgagtgtcaactatttaa

SEQ ID NO: 325697 - DNA, 3268 bp, Homo sapiens
ggctccctaaataaatacatcaattttatttaaatcttacagcaatcatatgagacaaaagcttttaacacctgcactttatattcgaggaattaaagttctcagaggcgactaaagaccaaactcagggctgaggagttccaaagctgagttgagttgcaaatgaatcaccgaggaccaccggagctttctagcgaccctcgcaccagggaacgaacccctgtggtttaagggctccaacccacaacccagttcctttggcgggaaacagcaccctcccaaggccccgccccttcctggccccgccccgtcgtctctgggcccggctcctggagatgggtattattaatctgccttctatgggggacctggcccatctcgggtatcagccccgcccctactcgtccagtctccgaacgctctgcagccaatcggcgcccgagggtcggtccccgccttctcaagccccgccccctacccttatccctggcagcttccgctaaacgggctcagagccacgcggcacgcccgggaggctttctctggctggtaaccgctactcccggacaccagaccaccgccttccgtacacaggggcccgcatcccaccctcccggacctaagagcctgggtcccctgtttccggaggtccgcttcccggcccccagattctggcatcccagccctcagtgtccaagacccaggcagcccgggtccccgcctcccggatccaggcgtccgggatctgcgccaccagaacctagcctcctgcagacctccgccatctgggggcactcaacctcctggagccaagggccccacgtcccacccagagaaactctcgtattcccagctcctagggccaaggaacccgggcgctccgaactcccagctttcggacatctggcacacggggcagagcagagaagcctcagcgcccagcctggggaatttaaacactccagcttccaagagccaaggaacttcagtgctgtgaactcacaactctaaggagccctccaaagttccagtctccaggtgctgttactcaactcagtcctaggaacgtcgggtcctgggaaggagcccaagcgctcccagccagcttccaggcgctaagaaaccccggtgcttcccatcatggtggccgatcctcctcgagactccaaggggctcgcagcggcggagcccaccgccaacgggggcctggcgctggcctccatcgaggaccaaggcgcggcagcaggcggctactgcggttcccgggaccaggtgcgccgctgccttcgagccaacctgcttgtgctgctgacagtggtggccgtggtggccggcgtggcgctgggactgggggtgtcgggggccgggggtgcgctggcgttgggcccggagcgcttgagcgccttcgtcttcccgggcgagctgctgctgcgtctgctgcggatgatcatcttgccgctggtggtgtgcagcttgatcggcggcgccgccagcctggaccccggcgcgctcggccgtctgggcgcctgggcgctgctctttttcctggtcaccacgctgctggcgtcggcgctcggagtgggcttggcgctggctctgcagccgggcgccgcctccgccgccatcaacgcctccgtgggagccgcgggcagtgccgaaaatgcccccagcaaggaggtgctcgattcgttcctggatcttgcgagaaatatcttcccttccaacctggtgtcagcagcctttcgctcatactctaccacctatgaagagaggaatatcaccggaaccagggtgaaggtgcccgtggggcaggaggtggaggggatgaacatcctgggcttggtagtgtttgccatcgtctttggtgtggcgctgcggaagctggggcctgaaggggagctgcttatccgcttcttcaactccttcaatgaggccaccatggttctggtctcctggatcatgtggtacgcccctgtgggcatcatgttcctggtggctggcaagatcgtggagatggaggatgtgggtttactctttgcccgccttggcaagtacattctgtgctgcctgctgggtcacgccatccatgggctcctggtactgcccctcatctacttcctcttcacccgcaaaaacccctaccgcttcctgtggggcatcgtgacgccgctggccactgcctttgggacctcttccagttccgccacgctgccgctgatgatgaagtgcgtggaggagaataatggcgtggccaagcacatcagccgtttcatcctgcccatcggcgccaccgtcaacatggacggtgccgcgctcttccagtgcgtggccgcagtgttcattgcacagctcagccagcagtccttggacttcgtaaagatcatcaccatcctggtcacggccacagcgtccagcgtgggggcagcgggcatccctgctggaggtgtcctcactctggccatcatcctcgaagcagtcaacctcccggtcgaccatatctccttgatcctggctgtggactggctagtcgaccggtcctgtaccgtcctcaatgtagaaggtgacgctctgggggcaggactcctccaaaattacgtggaccgtacggagtcgagaagcacagagcctgagttgatacaagtgaagagtgagctgcccctggatccgctgccagtccccactgaggaaggaaaccccctcctcaaacactatcgggggcccgcaggggatgccacggtcgcctctgagaaggaatcagtcatgtaaaccccgggagggaccttccctgccctgctgggggtgctctttggacactggattatgaggaatggataaatggatgagctagggctctgggggtctgcctgcacaatctgggatgcctggctgctggagtacatgtgttcacaagggttactcctcaaaacccccagttctcactcatgtccccaactcaaggctagaaaacagcaagatggagaaataatgttctgctgcgtccccaccgtgacctgcctggcctcccctgtctcagggagcaggtcacaggtcaccatggggaattgtgtgtgtgtgtgtgtgtgtgtgtgtgtgtgtgttctgtgacctcctgtccccatggtacgtcccaccctgtccccagatcccctattccctccacaataacagaaacactcccagggactctggggagaggctgaggacaaatacctgctgtcactccagaggacattttttttagcaataaaattgagtgtcaactatttaa

SEQ ID NO: 325698 - DNA, 1811 bp, Homo sapiens
gccagcattcctcaccccgaacccacaatgcctcagggctagcacgccagcctcttggggctgaaggaggctgactccccaagtcctgcaaaggggtgcaagcctagttccaaccctgccgggctgagaaatatcttcccttccaacctggtgtcagcagcctttcgctcatactctaccacctatgaagagaggaatatcaccggaaccagggtgaaggtgcccgtggggcaggaggtggaggggatgaacatcctgggcttggtagtgtttgccatcgtctttggtgtggcgctgcggaagctggggcctgaaggggagctgcttatccgcttcttcaactccttcaatgaggccaccatggttctggtctcctggatcatgtggtacgcccctgtgggcatcatgttcctggtggctggcaagatcgtggagatggaggatgtgggtttactctttgcccgccttggcaagtacattctgtgctgcctgctgggtcacgccatccatgggctcctggtactgcccctcatctacttcctcttcacccgcaaaaacccctaccgcttcctgtggggcatcgtgacgccgctggccactgcctttgggacctcttccagttccgccacgctgccgctgatgatgaagtgcgtggaggagaataatggcgtggccaagcacatcagccgtttcatcctgcccatcggcgccaccgtcaacatggacggtgccgcgctcttccagtgcgtggccgcagtgttcattgcacagctcagccagcagtccttggacttcgtaaagatcatcaccatcctggtcacggccacagcgtccagcgtgggggcagcgggcatccctgctggaggtgtcctcactctggccatcatcctcgaagcagtcaacctcccggtcgaccatatctccttgatcctggctgtggactggctagtcgaccggtcctgtaccgtcctcaatgtagaaggtgacgctctgggggcaggactcctccaaaattacgtggaccgtacggagtcgagaagcacagagcctgagttgatacaagtgaagagtgagctgcccctggatccgctgccagtccccactgaggaaggaaaccccctcctcaaacactatcgggggcccgcaggggatgccacggtcgcctctgagaaggaatcagtcatgtaaaccccgggagggaccttccctgccctgctgggggtgctctttggacactggattatgaggaatggataaatggatgagctagggctctgggggtctgcctgcacactctggggagccaggggccccagcaccctccaggacaggagatctgggatgcctggctgctggagtacatgtgttcacaagggttactcctcaaaacccccagttctcactcatgtccccaactcaaggctagaaaacagcaagatggagaaataatgttctgctgcgtccccaccgtgacctgcctggcctcccctgtctcagggagcaggtcacaggtcaccatggggaattctagcccccactggggggatgttacaacaccatgctggttattttggcggctgtagttgtggggggatgtgtgtgtgcacgtgtgtgtgtgtgtgtgtgtgtgtgtgtgtgtgttctgtgacctcctgtccccatggtacgtcccaccctgtccccagatcccctattccctccacaataacagaaacactcccagggactctggggagaggctgaggacaaatacctgctgtcactccagaggacattttttttagcaataaaattgagtgtcaactatttaa

SEQ ID NO: 325699 - DNA, 1873 bp, Homo sapiens
gccagcattcctcaccccgaacccacaatgcctcagggctagcacgccagcctcttggggctgaaggaggctgactccccaagtcctgcaaaggggtgcaagcctagttccaaccctgccgggctgaggcatgagtaggggctgtgtttgcgtgcaggcgggcccccaaagcttccactcgctgccttaaaacgccaacccagcctctcagacaatgctgccctcccactatgtactctaccacctatgaagagaggaatatcaccggaaccagggtgaaggtgcccgtggggcaggaggtggaggggatgaacatcctgggcttggtagtgtttgccatcgtctttggtgtggcgctgcggaagctggggcctgaaggggagctgcttatccgcttcttcaactccttcaatgaggccaccatggttctggtctcctggatcatgtggtacgcccctgtgggcatcatgttcctggtggctggcaagatcgtggagatggaggatgtgggtttactctttgcccgccttggcaagtacattctgtgctgcctgctgggtcacgccatccatgggctcctggtactgcccctcatctacttcctcttcacccgcaaaaacccctaccgcttcctgtggggcatcgtgacgccgctggccactgcctttgggacctcttccagttccgccacgctgccgctgatgatgaagtgcgtggaggagaataatggcgtggccaagcacatcagccgtttcatcctgcccatcggcgccaccgtcaacatggacggtgccgcgctcttccagtgcgtggccgcagtgttcattgcacagctcagccagcagtccttggacttcgtaaagatcatcaccatcctggtcacggccacagcgtccagcgtgggggcagcgggcatccctgctggaggtgtcctcactctggccatcatcctcgaagcagtcaacctcccggtcgaccatatctccttgatcctggctgtggactggctagtcgaccggtcctgtaccgtcctcaatgtagaaggtgacgctctgggggcaggactcctccaaaattacgtggaccgtacggagtcgagaagcacagagcctgagttgatacaagtgaagagtgagctgcccctggatccgctgccagtccccactgaggaaggaaaccccctcctcaaacactatcgggggcccgcaggggatgccacggtcgcctctgagaaggaatcagtcatgtaaaccccgggagggaccttccctgccctgctgggggtgctctttggacactggattatgaggaatggataaatggatgagctagggctctgggggtctgcctgcacactctggggagccaggggccccagcaccctccaggacaggagatctgggatgcctggctgctggagtacatgtgttcacaagggttactcctcaaaacccccagttctcactcatgtccccaactcaaggctagaaaacagcaagatggagaaataatgttctgctgcgtccccaccgtgacctgcctggcctcccctgtctcagggagcaggtcacaggtcaccatggggaattctagcccccactggggggatgttacaacaccatgctggttattttggcggctgtagttgtggggggatgtgtgtgtgcacgtgtgtgtgtgtgtgtgtgtgtgtgtgtgtgtgttctgtgacctcctgtccccatggtacgtcccaccctgtccccagatcccctattccctccacaataacagaaacactcccagggactctggggagaggctgaggacaaatacctgctgtcactccagaggacattttttttagcaataaaattgagtgtcaactatttaa

SEQ ID NO: 325700 - DNA, 2291 bp, Homo sapiens
ggctccctaaataaatacatcaattttatttaaatcttacagcaatcatatgagacaaaagcttttaacacctgcactttatattcgaggaattaaagttctcagaggcgactaaagaccaaactcagggctgaggagttccaaagctgagttgagttgcaaatgaatcaccgaggaccaccggagctttctagcgaccctcgcaccagggaacgaacccctgtggtttaagggctccaacccacaacccagttcctttggcgggaaacagcaccctcccaaggccccgccccttcctggccccgccccgtcgtctctgggcccggctcctggagatgggtattattaatctgccttctatgggggacctggcccatctcgggtatcagccccgcccctactcgtccagtctccgaacgctctgcagccaatcggcgcccgagggtcggtccccgccttctcaagccccgccccctacccttatccctggcagcttccgctaaacgggctcagagccacgcggcacgcccgggaggctttctctggctggtaaccgctactcccggacaccagaccaccgccttccgtacacaggggcccgcatcccaccctcccggacctaagagcctgggtcccctgtttccggaggtccgcttcccggcccccagattctggcatcccagccctcagtgtccaagacccaggcagcccgggtccccgcctcccggatccaggcgtccgggatctgcgccaccagaacctagcctcctgcagacctccgccatctgggggcactcaacctcctggagccaagggccccacgtcccacccagagaaactctcgtattcccagctcctagggccaaggaacccgggcgctccgaactcccagctttcggacatctggcacacggggcagagcagagaagcctcagcgcccagcctggggaatttaaacactccagcttccaagagccaaggaacttcagtgctgtgaactcacaactctaaggagccctccaaagttccagtctccaggtgctgttactcaactcagtcctaggaacgtcgggtcctgggaaggagcccaagcgctcccagccagcttccaggcgctaagaaaccccggtgcttcccatcatggtggccgatcctcctcgagactccaaggggctcgcagcggcggagcccaccgccaacgggggcctggcgctggcctccatcgaggaccaaggcgcggcagcaggcggctactgcggttcccgggaccaggtgcgccgctgccttcgagccaacctgcttgtgctgctgacagtggtggccgtggtggccggcgtggcgctgggactgggggtgtcgggggccgggggtgcgctggcgttgggcccggagcgcttgagcgccttcgtcttcccgggcgagctgctgctgcgtctgctgcggatgatcatcttgccgctggtggtgtgcagcttgatcggcggcgccgccagcctggaccccggcgcgctcggccgtctgggcgcctgggcgctgctctttttcctggtcaccacgctgctggcgtcggcgctcggagtgggcttggcgctggctctgcagccgggcgccgcctccgccgccatcaacgcctccgtgggagccgcgggcagtgccgaaaatgcccccagcaaggaggtgctcgattcgttcctggatcttgcgagaaatatcttcccttccaacctggtgtcagcagcctttcgctcatactctaccacctatgaagagaggaatatcaccggaaccagggtgaaggtgcccgtggggcaggaggtggaggggatgaacatcctgggcttggtagtgtttgccatcgtctttggtgtggcgctgcggaagctggggcctgaaggggagctgcttatccgcttcttcaactccttcaatgaggccaccatggttctggtctcctggatcatgtggtacgcccctgtgggcatcatgttcctggtggctggcaagatcgtggagatggaggatgtgggtttactctttgcccgccttggcaagtacattctgtgctgcctgctgggtcacgccatccatgggctcctggtactgcccctcatctacttcctcttcacccgcaaaaacccctaccgcttcctgtggggcatcgtgacgccgctggccactgcctttgggacctcttccagttccggcagctgcgtgatgatgaatgcgtggggcgcacagggggggccagcatagcgtatcggccatgcgcaggcaatgaggcggcccagggg

SEQ ID NO: 325701 - DNA, 2075 bp, Homo sapiens
ggctccctaaataaatacatcaattttatttaaatcttacagcaatcatatgagacaaaagcttttaacacctgcactttatattcgaggaattaaagttctcagaggcgactaaagaccaaactcagggctgaggagttccaaagctgagttgagttgcaaatgaatcaccgaggaccaccggagctttctagcgaccctcgcaccagggaacgaacccctgtggtttaagggctccaacccacaacccagttcctttggcgggaaacagcaccctcccaaggccccgccccttcctggccccgccccgtcgtctctgggcccggctcctggagatgggtattattaatctgccttctatgggggacctggcccatctcgggtatcagccccgcccctactcgtccagtctccgaacgctctgcagccaatcggcgcccgagggtcggtccccgccttctcaagccccgccccctacccttatccctggcagcttccgctaaacgggctcagagccacgcggcacgcccgggaggctttctctggctggtaaccgctactcccggacaccagaccaccgccttccgtacacaggggcccgcatcccaccctcccggacctaagagcctgggtcccctgtttccggaggtccgcttcccggcccccagattctggcatcccagccctcagtgtccaagacccaggcagcccgggtccccgcctcccggatccaggcgtccgggatctgcgccaccagaacctagcctcctgcagacctccgccatctgggggcactcaacctcctggagccaagggccccacgtcccacccagagaaactctcgtattcccagctcctagggccaaggaacccgggcgctccgaactcccagctttcggacatctggcacacggggcagagcagagaagcctcagcgcccagcctggggaatttaaacactccagcttccaagagccaaggaacttcagtgctgtgaactcacaactctaaggagccctccaaagttccagtctccaggtgctgttactcaactcagtcctaggaacgtcgggtcctgggaaggagcccaagcgctcccagccagcttccaggcgctaagaaaccccggtgcttcccatcatggtggccgatcctcctcgagactccaaggggctcgcagcggcggagcccaccgccaacgggggcctggcgctggcctccatcgaggaccaaggcgcggcagcaggcggctactgcggttcccgggaccaggtgcgccgctgccttcgagccaacctgcttgtgctgctgacagtggtggccgtggtggccggcgtggcgctgggactgggggtgtcgggggccgggggtgcgctggcgttgggcccggagcgcttgagcgccttcgtcttcccgggcgagctgctgctgcgtctgctgcggatgatcatcttgccgctggtggtgtgcagcttgatcggcggcgccgccagcctggaccccggcgcgctcggccgtctgggcgcctgggcgctgctctttttcctggtcaccacgctgctggcgtcggcgctcggagtgggcttggcgctggctctgcagccgggcgccgcctccgccgccatcaacgcctccgtgggagccgcgggcagtgccgaaaatgcccccagcaaggaggtgctcgattcgttcctggatcttgcgagaaatatcttcccttccaacctggtgtcagcagcctttcgctcatactctaccacctatgaagagaggaatatcaccggaaccagggtgaaggtgcccgtggggcaggaggtggaggggatgaacatcctgggcttggtagtttgtggggggatgtgtgtgtgcacgtgtgtgtgtgtgtgtgtgtgtgtgtgtgtgtgttctgtgacctcctgtccccatggtacgtcccaccctgtccccagatcccctattccctccacaataacagaaacactcccagggactctggggagaggctgaggacaaatacctgctgtcactccagaggacattttttttagcaataaaattgagtgtcaactatttaa

SEQ ID NO: 325702 - DNA, 1712 bp, Homo sapiens
ggctccctaaataaatacatcaattttatttaaatcttacagcaatcatatgagacaaaagcttttaacacctgcactttatattcgaggaattaaagttctcagaggcgactaaagaccaaactcagggctgaggagttccaaagctgagttgagttgcaaatgaatcaccgaggaccaccggagctttctagcgaccctcgcaccagggaacgaacccctgtggtttaagggctccaacccacaacccagttcctttggcgggaaacagcaccctcccaaggccccgccccttcctggccccgccccgtcgtctctgggcccggctcctggagatgggtattattaatctgccttctatgggggacctggcccatctcgggtatcagccccgcccctactcgtccagtctccgaacgctctgcagccaatcggcgcccgagggtcggtccccgccttctcaagccccgccccctacccttatccctggcagcttccgctaaacgggctcagagccacgcggcacgcccgggaggctttctctggctggtaaccgctactcccggacaccagaccaccgccttccgtacacaggggcccgcatcccaccctcccggacctaagagcctgggtcccctgtttccggaggtccgcttcccggcccccagattctggcatcccagccctcagtgtccaagacccaggcagcccgggtccccgcctcccggatccaggcgtccgggatctgcgccaccagaacctagcctcctgcagacctccgccatctgggggcactcaacctcctggagccaagggccccacgtcccacccagagaaactctcgtattcccagctcctagggccaaggaacccgggcgctccgaactcccagctttcggacatctggcacacggggcagagcagagaagcctcagcgcccagcctggggaatttaaacactccagcttccaagagccaaggaacttcagtgctgtgaactcacaactctaaggagccctccaaagttccagtctccaggtgctgttactcaactcagtcctaggaacgtcgggtcctgggaaggagcccaagcgctcccagccagcttccaggcgctaagaaaccccggtgcttcccatcatggtggccgatcctcctcgagactccaaggggctcgcagcggcggagcccaccgccaacgggggcctggcgctggcctccatcgaggaccaaggcgcggcagcaggcggctactgcggttcccgggaccaggtgcgccgctgccttcgagccaacctgcttgtgctgctgacagtggtggccgtggtggccggcgtggcgctgggactgggggtgtcgggggccgggggtgcgctggcgttgggcccggagcgcttgagcgccttcgtcttcccgggcgagctgctgctgcgtctgctgcggatgatcatcttgccgctggtggtgtgcagcttgatcggcggcgccgccagcctggaccccggcgcgctcggccgtctgggcgcctgggcgctgctctttttcctggtcaccacgctgctggcgtcggcgctcggagtgggcttggcgctggctctgcagccgggcgccgctcgcgcatcaagctcgtggaccgggcaggcaaaatgccccagagggtgtcattcgtccggtctggaaaaattcctcacggtagagttgttactccttta

SEQ ID NO: 325703 - DNA, 4130 bp, Homo sapiens
gtgggggtgcagtgacgacagatgggtgtgacggctgccagattcctgagacccgccctgcggtggggctacacccagccagggagtctccagaggtgaggctgttgtttaaaaacctggagccgggaggggagacccccacattcaagaggagctttcaggcgatctggagaaagaacggcagaacacacagcaaggaaaggtcctttctggggatcaccccattggctgaagatgagaccattcttcctcttgtgttttgccctgcctggcctcctgcatgcccaacaagcctgctcccgtggggcctgctatccacctgttggggacctgcttgttgggaggacccggtttctccgagcttcatctacctgtggactgaccaagcctgagacctactgcacccagtatggcgagtggcagatgaaatgctgcaagtgtgactccaggcagcctcacaactactacagtcaccgagtagagaatgtggcttcatcctccggccccatgcgctggtggcagtcccagaatgatgtgaaccctgtctctctgcagctggacctggacaggagattccagcttcaagaagtcatgatggagttccaggggcccatgcccgccggcatgctgattgagcgctcctcagacttcggtaagacctggcgagtgtaccagtacctggctgccgactgcacctccaccttccctcgggtccgccagggtcggcctcagagctggcaggatgttcggtgccagtccctgcctcagaggcctaatgcacgcctaaatggggggaaggtccaacttaaccttatggatttagtgtctgggattccagcaactcaaagtcaaaaaattcaagaggtgggggagatcacaaacttgagagtcaatttcaccaggctggcccctgtgccccaaaggggctaccaccctcccagcgcctactatgctgtgtcccagctccgtctgcaggggagctgcttctgtcacggccatgctgatcgctgcgcacccaagcctggggcctctgcaggcccctccaccgctgtgcaggtccacgatgtctgtgtctgccagcacaacactgccggcccaaattgtgagcgctgtgcacccttctacaacaaccggccctggagaccggcggagggccaggacgcccatgaatgccaaaggtgcgactgcaatgggcactcagagacatgtcactttgaccccgctgtgtttgccgccagccagggggcatatggaggtgtgtgtgacaattgccgggaccacaccgaaggcaagaactgtgagcggtgtcagctgcactatttccggaaccggcgcccgggagcttccattcaggagacctgcatctcctgcgagtgtgatccggatggggcagtgccaggggctccctgtgacccagtgaccgggcagtgtgtgtgcaaggagcatgtgcagggagagcgctgtgacctatgcaagccgggcttcactggactcacctacgccaacccgcagggctgccaccgctgtgactgcaacatcctggggtcccggagggacatgccgtgtgacgaggagagtgggcgctgcctttgtctgcccaacgtggtgggtcccaaatgtgaccagtgtgctccctaccactggaagctggccagtggccagggctgtgaaccgtgtgcctgcgacccgcacaactccctcagcccacagtgcaaccagttcacagggcagtgcccctgtcgggaaggctttggtggcctgatgtgcagcgctgcagccatccgccagtgtccagaccggacctatggagacgtggccacaggatgccgagcctgtgactgtgatttccggggaacagagggcccgggctgcgacaaggcatcaggccgctgcctctgccgccctggcttgaccgggccccgctgtgaccagtgccagcgaggctactgcaatcgctacccggtgtgcgtggcctgccacccttgcttccagacctatgatgcggacctccgggagcaggccctgcgctttggtagactccgcaatgccaccgccagcctgtggtcagggcctgggctggaggaccgtggcctggcctcccggatcctagatgcaaagagtaagattgagcagatccgagcagttctcagcagccccgcagtcacagagcaggaggtggctcaggtggccagtgccatcctctccctcaggcgaactctccagggcctgcagctggatctgcccctggaggaggagacgttgtcccttccgagagacctggagagtcttgacagaagcttcaatggtctccttactatgtatcagaggaagagggagcagtttgaaaaaataagcagtgctgatccttcaggagccttccggatgctgagcacagcctacgagcagtcagcccaggctgctcagcaggtctccgacagctcgcgccttttggaccagctcagggacagccggagagaggcagagaggctggtgcggcaggcgggaggaggaggaggcaccggcagccccaagcttgtggccctgaggctggagatgtcttcgttgcctgacctgacacccaccttcaacaagctctgtggcaactccaggcagatggcttgcaccccaatatcatgccctggtgagctatgtccccaagacaatggcacagcctgtggctcccgctgcaggggtgtccttcccagggccggtggggccttcttgatggcggggcaggtggctgagcagctgcggggcttcaatgcccagctccagcggaccaggcagatgattagggcagccgaggaatctgcctcacagattcaatccagtgcccagcgcttggagacccaggtgagcgccagccgctcccagatggaggaagatgtcagacgcacacggctcctaatccagcaggtccgggacttcctaacagaccccgacactgatgcagccactatccaggaggtcagcgaggccgtgctggccctgtggctgcccacagactcagctactgttctgcagaagatgaatgagatccaggccattgcagccaggctccccaacgtggacttggtgctgtcccagaccaagcaggacattgcgcgtgcccgccggttgcaggctgaggctgaggaagccaggagccgagcccatgcagtggagggccaggtggaagatgtggttgggaacctgcggcaggggacagtggcactgcaggaagctcaggacaccatgcaaggcaccagccgctcccttcggcttatccaggacagggttgctgaggttcagcaggtactgcggccagcagaaaagctggtgacaagcatgaccaagcagctgggtgacttctggacacggatggaggagctccgccaccaagcccggcagcagggggcagaggcagtccaggcccagcagcttgcggaaggtgccagcgagcaggcattgagtgcccaagagggatttgagagaataaaacaaaagtatgctgagttgaaggaccggttgggtcagagttccatgctgggtgagcagggtgcccggatccagagtgtgaagacagaggcagaggagctgtttggggagaccatggagatgatggacaggatgaaagacatggagttggagctgctgcggggcagccaggccatcatgctgcgctcagcggacctgacaggactggagaagcgtgtggagcagatccgtgaccacatcaatgggcgcgtgctctactatgccacctgcaagtgatgctacagcttccagcccgttgccccactcatctgccgcctttgcttttggttgggggcagattgggttggaatgctttccatctccaggagactttcatgcagcctaaagtacagcctggaccacccctggtgtgtagctagtaagattaccctgagctgcagctgagcctgagccaatgggacagttacacttgacagacaaagatggtggagattggcatgccattgaaactaagagctctcaagtcaaggaagctgggctgggcagtatcccccgcctttagttctccactggggaggaatcctggaccaagcacaaaaacttaacaaaagtgatgtaaaaatgaaaagccaaataaaaatctttggaaaaga

SEQ ID NO: 325704 - DNA, 609 bp, Homo sapiens
agtgcagccgaggcggggtgggcacaggtaggaggaggcagacaggatagatcccccgggcaagtcagagttcccattttacactaaagtccagagattttaggtgacctgcttaaggtgccacagcaagtgcaagatagttttttttctcttttactgaacatccacatgtaagctgggttggttacaaatgcttcctaggtaggtcttggcatagaggatgatccgcagaatcgtggggctgctgagaggttcccttggggccttaccccttctgacctagagtgtatgtcaacagattagggcagccgaggaatctgcctcacagattcaatccagtgcccagcgcttggagacccaggtgagcgccagccgctcccagatggaggaagatgtcagacgcacacggctcctaatccagcaggtccgggacttcctaacaggtgagcccagtctccaccccaccttggctgctgttccagtcctgcctgtcccgcattcccatgttcagtgcatcagccagccctccctccctagtcccaggcctgcaacatccagcctccacttctccttggcaccatggccatgaccttctcgttctcccgtctg

SEQ ID NO: 325705 - DNA, 448 bp, Homo sapiens
gtgggggtgcagtgacgacagatgggtgtgacggctgccagattcctgagacccgccctgcggtggggctacacccagccagggagtctccagaggtgaggctgttgtttaaaaacctggagccgggaggggagacccccacattcaagaggagctttcaggcgatctggagaaagaacggcagaacacacagcaaggaaaggtcctttctggggatcaccccattggctgaagatgagaccattcttcctcttgtgttttgccctgcctggcctcctgcatgcccaacaagcctgctcccgtggggcctgctatccacctgttggggacctgcttgttgggaggacccggtttctccgagcttcatctacctgtggactgaccaagcacaaaaacttaacaaaagtgatgtaaaaatgaaaagccaaataaaaatctttggaaaaga

SEQ ID NO: 325706 - DNA, 4016 bp, Homo sapiens
gggcgggaggaggactgtatctctggatgcctggggcctggtttcagggcctgatttattcctcttcctgggagctcactcaggaaaggtcctttctggggatcaccccattggctgaagatgagaccattcttcctcttgtgttttgccctgcctggcctcctgcatgcccaacaagcctgctcccgtggggcctgctatccacctgttggggacctgcttgttgggaggacccggtttctccgagcttcatctacctgtggactgaccaagcctgagacctactgcacccagtatggcgagtggcagatgaaatgctgcaagtgtgactccaggcagcctcacaactactacagtcaccgagtagagaatgtggcttcatcctccggccccatgcgctggtggcagtcccagaatgatgtgaaccctgtctctctgcagctggacctggacaggagattccagcttcaagaagtcatgatggagttccaggggcccatgcccgccggcatgctgattgagcgctcctcagacttcggtaagacctggcgagtgtaccagtacctggctgccgactgcacctccaccttccctcgggtccgccagggtcggcctcagagctggcaggatgttcggtgccagtccctgcctcagaggcctaatgcacgcctaaatggggggaaggtccaacttaaccttatggatttagtgtctgggattccagcaactcaaagtcaaaaaattcaagaggtgggggagatcacaaacttgagagtcaatttcaccaggctggcccctgtgccccaaaggggctaccaccctcccagcgcctactatgctgtgtcccagctccgtctgcaggggagctgcttctgtcacggccatgctgatcgctgcgcacccaagcctggggcctctgcaggcccctccaccgctgtgcaggtccacgatgtctgtgtctgccagcacaacactgccggcccaaattgtgagcgctgtgcacccttctacaacaaccggccctggagaccggcggagggccaggacgcccatgaatgccaaaggtgcgactgcaatgggcactcagagacatgtcactttgaccccgctgtgtttgccgccagccagggggcatatggaggtgtgtgtgacaattgccgggaccacaccgaaggcaagaactgtgagcggtgtcagctgcactatttccggaaccggcgcccgggagcttccattcaggagacctgcatctcctgcgagtgtgatccggatggggcagtgccaggggctccctgtgacccagtgaccgggcagtgtgtgtgcaaggagcatgtgcagggagagcgctgtgacctatgcaagccgggcttcactggactcacctacgccaacccgcagggctgccaccgctgtgactgcaacatcctggggtcccggagggacatgccgtgtgacgaggagagtgggcgctgcctttgtctgcccaacgtggtgggtcccaaatgtgaccagtgtgctccctaccactggaagctggccagtggccagggctgtgaaccgtgtgcctgcgacccgcacaactccctcagcccacagtgcaaccagttcacagggcagtgcccctgtcgggaaggctttggtggcctgatgtgcagcgctgcagccatccgccagtgtccagaccggacctatggagacgtggccacaggatgccgagcctgtgactgtgatttccggggaacagagggcccgggctgcgacaaggcatcaggccgctgcctctgccgccctggcttgaccgggccccgctgtgaccagtgccagcgaggctactgcaatcgctacccggtgtgcgtggcctgccacccttgcttccagacctatgatgcggacctccgggagcaggccctgcgctttggtagactccgcaatgccaccgccagcctgtggtcagggcctgggctggaggaccgtggcctggcctcccggatcctagatgcaaagagtaagattgagcagatccgagcagttctcagcagccccgcagtcacagagcaggaggtggctcaggtggccagtgccatcctctccctcaggcgaactctccagggcctgcagctggatctgcccctggaggaggagacgttgtcccttccgagagacctggagagtcttgacagaagcttcaatggtctccttactatgtatcagaggaagagggagcagtttgaaaaaataagcagtgctgatccttcaggagccttccggatgctgagcacagcctacgagcagtcagcccaggctgctcagcaggtctccgacagctcgcgccttttggaccagctcagggacagccggagagaggcagagaggctggtgcggcaggcgggaggaggaggaggcaccggcagccccaagcttgtggccctgaggctggagatgtcttcgttgcctgacctgacacccaccttcaacaagctctgtggcaactccaggcagatggcttgcaccccaatatcatgccctggtgagctatgtccccaagacaatggcacagcctgtggctcccgctgcaggggtgtccttcccagggccggtggggccttcttgatggcggggcaggtggctgagcagctgcggggcttcaatgcccagctccagcggaccaggcagatgattagggcagccgaggaatctgcctcacagattcaatccagtgcccagcgcttggagacccaggtgagcgccagccgctcccagatggaggaagatgtcagacgcacacggctcctaatccagcaggtccgggacttcctaacagaccccgacactgatgcagccactatccaggaggtcagcgaggccgtgctggccctgtggctgcccacagactcagctactgttctgcagaagatgaatgagatccaggccattgcagccaggctccccaacgtggacttggtgctgtcccagaccaagcaggacattgcgcgtgcccgccggttgcaggctgaggctgaggaagccaggagccgagcccatgcagtggagggccaggtggaagatgtggttgggaacctgcggcaggggacagtggcactgcaggaagctcaggacaccatgcaaggcaccagccgctcccttcggcttatccaggacagggttgctgaggttcagcaggtactgcggccagcagaaaagctggtgacaagcatgaccaagcagctgggtgacttctggacacggatggaggagctccgccaccaagcccggcagcagggggcagaggcagtccaggcccagcagcttgcggaaggtgccagcgagcaggcattgagtgcccaagagggatttgagagaataaaacaaaagtatgctgagttgaaggaccggttgggtcagagttccatgctgggtgagcagggtgcccggatccagagtgtgaagacagaggcagaggagctgtttggggagaccatggagatgatggacaggatgaaagacatggagttggagctgctgcggggcagccaggccatcatgctgcgctcagcggacctgacaggactggagaagcgtgtggagcagatccgtgaccacatcaatgggcgcgtgctctactatgccacctgcaagtgatgctacagcttccagcccgttgccccactcatctgccgcctttgcttttggttgggggcagattgggttggaatgctttccatctccaggagactttcatgcagcctaaagtacagcctggaccacccctggtgtgtagctagtaagattaccctgagctgcagctgagcctgagccaatgggacagttacacttgacagacaaagatggtggagattggcatgccattgaaactaagagctctcaagtcaaggaagctgggctgggcagtatcccccgcctttagttctccactggggaggaatcctggaccaagcacaaaaacttaacaaaagtgatgtaaaaatgaaaagccaaataaaaatctttggaaaaga

SEQ ID NO: 325707 - DNA, 4039 bp, Homo sapiens
gggcgggaggaggactgtatctctggatgcctggggcctggtttcagggcctgatttattcctcttcctgggagctcactcaggaaaggtcctttctggggatcaccccattggctgaagatgagaccattcttcctcttgtgttttgccctgcctggcctcctgcatgcccaacaagcctgctcccgtggggcctgctatccacctgttggggacctgcttgttgggaggacccggtttctccgagcttcatctacctgtggactgaccaagcctgagacctactgcacccagtatggcgagtggcagatgaaatgctgcaagtgtgactccaggcagcctcacaactactacagtcaccgagtagagaatgtggcttcatcctccggccccatgcgctggtggcagtcccagaatgatgtgaaccctgtctctctgcagctggacctggacaggagattccagcttcaagaagtcatgatggagttccaggggcccatgcccgccggcatgctgattgagcgctcctcagacttcggtaagacctggcgagtgtaccagtacctggctgccgactgcacctccaccttccctcgggtccgccagggtcggcctcagagctggcaggatgttcggtgccagtccctgcctcagaggcctaatgcacgcctaaatggggggaaggtccaacttaaccttatggatttagtgtctgggattccagcaactcaaagtcaaaaaattcaagaggtgggggagatcacaaacttgagagtcaatttcaccaggctggcccctgtgccccaaaggggctaccaccctcccagcgcctactatgctgtgtcccagctccgtctgcaggggagctgcttctgtcacggccatgctgatcgctgcgcacccaagcctggggcctctgcaggcccctccaccgctgtgcaggtccacgatgtctgtgtctgccagcacaacactgccggcccaaattgtgagcgctgtgcacccttctacaacaaccggccctggagaccggcggagggccaggacgcccatgaatgccaaaggtgcgactgcaatgggcactcagagacatgtcactttgaccccgctgtgtttgccgccagccagggggcatatggaggtgtgtgtgacaattgccgggaccacaccgaaggcaagaactgtgagcggtgtcagctgcactatttccggaaccggcgcccgggagcttccattcaggagacctgcatctcctgcgagtgtgatccggatggggcagtgccaggggctccctgtgacccagtgaccgggcagtgtgtgtgcaaggagcatgtgcagggagagcgctgtgacctatgcaagccgggcttcactggactcacctacgccaacccgcagggctgccaccgctgtgactgcaacatcctggggtcccggagggacatgccgtgtgacgaggagagtgggcgctgcctttgtctgcccaacgtggtgggtcccaaatgtgaccagtgtgctccctaccactggaagctggccagtggccagggctgtgaaccgtgtgcctgcgacccgcacaactccctcagcccacagtgcaaccagttcacagggcagtgcccctgtcgggaaggctttggtggcctgatgtgcagcgctgcagccatccgccagtgtccagaccggacctatggagacgtggccacaggatgccgagcctgtgactgtgatttccggggaacagagggcccgggctgcgacaaggcatcaggccgctgcctctgccgccctggcttgaccgggccccgctgtgaccagtgccagcgaggctactgcaatcgctacccggtgtgcgtggcctgccacccttgcttccagacctatgatgcggacctccgggagcaggccctgcgctttggtagactccgcaatgccaccgccagcctgtggtcagggcctgggctggaggaccgtggcctggcctcccggatcctagatgcaaagagtaagattgagcagatccgagcagttctcagcagccccgcagtcacagagcaggaggtggctcaggtggccagtgccatcctctccctcaggcgaactctccagggcctgcagctggatctgcccctggaggaggagacgttgtcccttccgagagacctggagagtcttgacagaagcttcaatggtctccttactatgtatcagaggaagagggagcagtttgaaaaaataagcagtgctgatccttcaggagccttccggatgctgagcacagcctacgagcagtcagcccaggctgctcagcaggtctccgacagctcgcgccttttggaccagctcagggacagccggagagaggcagagaggctggtgcggcaggcgggaggaggaggaggcaccggcagccccaagcttgtggccctgaggctggagatgtcttcgttgcctgacctgacacccaccttcaacaagctctgtggcaactccaggcagatggcttgcaccccaatatcatgccctggtgagctatgtccccaagacaatggcacagcctgtggctcccgctgcaggggtgtccttcccagggccggtggggccttcttgatggcggggcaggtggctgagcagctgcggggcttcaatgcccagctccagcggaccaggcagatgattagggcagccgaggaatctgcctcacagattcaatccagtgcccagcgcttggagacccaggtgagcgccagccgctcccagatggaggaagatgtcagacgcacacggctcctaatccagcaggtccgggacttcctaacagaccccgacactgatgcagccactatccaggaggtcagcgaggccgtgctggccctgtggctgcccacagactcagctactgttctgcagaagatgaatgagatccaggccattgcagccaggctccccaacgtggacttggtgctgtcccagaccaagcaggacattgcgcgtgcccgccggttgcaggctgaggctgaggaagccaggagccgagcccatgcagtggagggccaggtggaagatgtggttgggaacctgcggcaggggacagtggcactgcaggaagctcaggacaccatgcaaggcaccagccgctcccttcggcttatccaggacagggttgctgaggttcagcaggtactgcggccagcagaaaagctggtgacaagcatgaccaagcagctgggtgacttctggacacggatggaggagctccgccaccaagcccggcagcagggggcagaggcagtccaggcccagcagcttgcggaaggtgccagcgagcaggcattgagtgcccaagagggatttgagagaataaaacaaaagtatgctgagttgaaggaccggttgggtcagagttccatgctgggtgagcagggtgcccggatccagagtgtgaagacagaggcagaggagctgtttggggagaccatggagatgatggacaggatgaaagacatggagttggagctgctgcggggcagccaggccatcatgctgcgctcagcggacctgacaggactggagaagcgtgtggagcagatccgtgaccacatcaatgggcgcgtgctctactatgccacctgcaagtgatgctacagcttccagcccgttgccccactcatctgccgcctttgcttttggttgggggcagattgggttggaatgctttccatctccaggagactttcatgcagcctaaagtacagcctggaccacccctggtgtgtagctagtaagattaccctgagctgcagctgagcctgagccaatgggacagttacacttgacagacaaagatggtggagattggcatgccattgaaactaagagctctcaagtcaaggaagctgggctgggcagtatcccccgcctttagttctccactggggaggaatcctggaccaagcacaaaaacttaacaaaagtgatgtaaaaatgaaaagccaaataaaaatctttggaaaagagcctggaggttcaacgaggaaaa

SEQ ID NO: 325708 - DNA, 1632 bp, Homo sapiens
tgatacaactcgagctcggtaccgcttcagcccgtgccccactcatctgccgctttgcttttggttgggggcagaagggttggaatgctttccatctccaggagactttcatgcagcctaaagtacagcctggaccacccctggtgagctatgtccccaagacaatggcacagcctgtggctcccgctgcaggggtgtccttcccagggccggtggggccttcttgatggcggggcaggtggctgagcagctgcggggcttcaatgcccagctccagcggaccaggcagatgattagggcagccgaggaatctgcctcacagattcaatccagtgcccagcgcttggagacccaggtgagcgccagccgctcccagatggaggaagatgtcagacgcacacggctcctaatccagcaggtccgggacttcctaacagaccccgacactgatgcagccactatccaggaggtcagcgaggccgtgctggccctgtggctgcccacagactcagctactgttctgcagaagatgaatgagatccaggccattgcagccaggctccccaacgtggacttggtgctgtcccagaccaagcaggacattgcgcgtgcccgccggttgcaggctgaggctgaggaagccaggagccgagcccatgcagtggagggccaggtggaagatgtggttgggaacctgcggcaggggacagtggcactgcaggaagctcaggacaccatgcaaggcaccagccgctcccttcggcttatccaggacagggttgctgaggttcagcaggtactgcggccagcagaaaagctggtgacaagcatgaccaagcagctgggtgacttctggacacggatggaggagctccgccaccaagcccggcagcagggggcagaggcagtccaggcccagcagcttgcggaaggtgccagcgagcaggcattgagtgcccaagagggatttgagagaataaaacaaaagtatgctgagttgaaggaccggttgggtcagagttccatgctgggtgagcagggtgcccggatccagagtgtgaagacagaggcagaggagctgtttggggagaccatggagatgatggacaggatgaaagacatggagttggagctgctgcggggcagccaggccatcatgctgcgctcagcggacctgacaggactggagaagcgtgtggagcagatccgtgaccacatcaatgggcgcgtgctctactatgccacctgcaagtgatgctacagcttccagcccgttgccccactcatctgccgcctttgcttttggttgggggcagattgggttggaatgctttccatctccaggagactttcatgcagcctaaagtacagcctggaccacccctggtgtgtagctagtaagattaccctgagctgcagctgagcctgagccaatgggacagttacacttgacagacaaagatggtggagattggcatgccattgaaactaagagctctcaagtcaaggaagctgggctgggcagtatcccccgcctttagttctccactggggaggaatcctggaccaagcacaaaaacttaacaaaagtgatgtaaaaatgaaaagccaaataaaaatctttggaaaaga

SEQ ID NO: 325709 - DNA, 3814 bp, Homo sapiens
gtgggggtgcagtgacgacagatgggtgtgacggctgccagattcctgagacccgccctgcggtggggctacacccagccagggagtctccagaggtgaggctgttgtttaaaaacctggagccgggaggggagacccccacattcaagaggagctttcaggcgatctggagaaagaacggcagaacacacagcaaggaaaggtcctttctggggatcaccccattggctgaagatgagaccattcttcctcttgtgttttgccctgcctggcctcctgcatgcccaacaagcctgctcccgtggggcctgctatccacctgttggggacctgcttgttgggaggacccggtttctccgagcttcatctacctgtggactgaccaagcctgagacctactgcacccagtatggcgagtggcagatgaaatgctgcaagtgtgactccaggcagcctcacaactactacagtcaccgagtagagaatgtggcttcatcctccggccccatgcgctggtggcagtcccagaatgatgtgaaccctgtctctctgcagctggacctggacaggagattccagcttcaagaagtcatgatggagttccaggggcccatgcccgccggcatgctgattgagcgctcctcagacttcggtaagacctggcgagtgtaccagtacctggctgccgactgcacctccaccttccctcgggtccgccagggtcggcctcagagctggcaggatgttcggtgccagtccctgcctcagaggcctaatgcacgcctaaatggggggaaggtccaacttaaccttatggatttagtgtctgggattccagcaactcaaagtcaaaaaattcaagaggtgggggagatcacaaacttgagagtcaatttcaccaggctggcccctgtgccccaaaggggctaccaccctcccagcgcctactatgctgtgtcccagctccgtctgcaggggagctgcttctgtcacggccatgctgatcgctgcgcacccaagcctggggcctctgcaggcccctccaccgctgtgcaggtccacgatgtctgtgtctgccagcacaacactgccggcccaaattgtgagcgctgtgcacccttctacaacaaccggccctggagaccggcggagggccaggacgcccatgaatgccaaaggtgcgactgcaatgggcactcagagacatgtcactttgaccccgctgtgtttgccgccagccagggggcatatggaggtgtgtgtgacaattgccgggaccacaccgaaggcaagaactgtgagcggtgtcagctgcactatttccggaaccggcgcccgggagcttccattcaggagacctgcatctcctgcgagtgtgatccggatggggcagtgccaggggctccctgtgacccagtgaccgggcagtgtgtgtgcaaggagcatgtgcagggagagcgctgtgacctatgcaagccgggcttcactggactcacctacgccaacccgcagggctgccaccgctgtgactgcaacatcctggggtcccggagggacatgccgtgtgacgaggagagtgggcgctgcctttgtctgcccaacgtggtgggtcccaaatgtgaccagtgtgctccctaccactggaagctggccagtggccagggctgtgaaccgtgtgcctgcgacccgcacaactccctcagcccacagtgcaaccagttcacagggcagtgcccctgtcgggaaggctttggtggcctgatgtgcagcgctgcagccatccgccagtgtccagaccggacctatggagacgtggccacaggatgccgagcctgtgactgtgatttccggggaacagagggcccgggctgcgacaaggcatcaggccgctgcctctgccgccctggcttgaccgggccccgctgtgaccagtgccagcgaggctactgcaatcgctacccggtgtgcgtggcctgccacccttgcttccagacctatgatgcggacctccgggagcaggccctgcgctttggtagactccgcaatgccaccgccagcctgtggtcagggcctgggctggaggaccgtggcctggcctcccggatcctagatgcaaagagtaagattgagcagatccgagcagttctcagcagccccgcagtcacagagcaggaggtggctcaggtggccagtgccatcctctccctcaggcgaactctccagggcctgcagctggatctgcccctggaggaggagacgttgtcccttccgagagacctggagagtcttgacagaagcttcaatggtctccttactatgtatcagaggaagagggagcagtttgaaaaaataagcagtgctgatccttcaggagccttccggatgctgagcacagcctacgagcagtcagcccaggctgctcagcaggtctccgacagctcgcgccttttggaccagctcagggacagccggagagaggcagagaggctggtgcggcaggcgggaggaggaggaggcaccggcagccccaagcttgtggccctgaggctggagatgtcttcgttgcctgacctgacacccaccttcaacaagctctgtggcaactccaggcagatggcttgcaccccaatatcatgccctggtgagctatgtccccaagacaatggcacagcctgtggctcccgctgcaggggtgtccttcccagggccggtggggccttcttgatggcggggcaggtggctgagcagctgcggggcttcaatgcccagctccagcggaccaggcagatgattagggcagccgaggaatctgcctcacagattcaatccagtgcccagcgcttggagacccaggtgagcgccagccgctcccagatggaggaagatgtcagacgcacacggctcctaatccagcaggtccgggacttcctaacagaccccgacactgatgcagccactatccaggaggtcagcgaggccgtgctggccctgtggctgcccacagactcagctactgttctgcagaagatgaatgagatccaggccattgcagccaggctccccaacgtggacttggtgctgtcccagaccaagcaggacattgcgcgtgcccgccggttgcaggctgaggctgaggaagccaggagccgagcccatgcagtggagggccaggtggaagatgtggttgggaacctgcggcaggggacagtggcactgcaggaagctcaggacaccatgcaaggcaccagccgctcccttcggcttatccaggacagggttgctgaggttcagcaggtactgcggccagcagaaaagctggtgacaagcatgaccaagcagctgggtgacttctggacacggatggaggagctccgccaccaagcccggcagcagggggcagaggcagtccaggcccagcagcttgcggaaggtgccagcgagcaggcattgagtgcccaagagggatttgagagaataaggcactaggagatgggaaatagtgtggatagagaattacaaggatatcaaaggatgttgacctatttcaaaacttaggttgggccaatccattacctaagaaagggaaaggaaactcaggacttaaataagtactcttagtattaaaaatcagtgacaccaggagttaaataatttctgatatgatccgaattattagtaaccattctggctctttcttctaaggaaaatgtcctgtaggagtcaaaaaagtgactttcacctaaacttcccgaattcggcatactcctcataacttaaggatggcttgtccaatataattcacgtaaaccgtgat

SEQ ID NO: 325710 - DNA, 3063 bp, Homo sapiens
gtgggggtgcagtgacgacagatgggtgtgacggctgccagattcctgagacccgccctgcggtggggctacacccagccagggagtctccagaggtgaggctgttgtttaaaaacctggagccgggaggggagacccccacattcaagaggagctttcaggcgatctggagaaagaacggcagaacacacagcaaggaaaggtcctttctggggatcaccccattggctgaagatgagaccattcttcctcttgtgttttgccctgcctggcctcctgcatgcccaacaagcctgctcccgtggggcctgctatccacctgttggggacctgcttgttgggaggacccggtttctccgagcttcatctacctgtggactgaccaagcctgagacctactgcacccagtatggcgagtggcagatgaaatgctgcaagtgtgactccaggcagcctcacaactactacagtcaccgagtagagaatgtggcttcatcctccggccccatgcgctggtggcagtcccagaatgatgtgaaccctgtctctctgcagctggacctggacaggagattccagcttcaagaagtcatgatggagttccaggggcccatgcccgccggcatgctgattgagcgctcctcagacttcggtaagacctggcgagtgtaccagtacctggctgccgactgcacctccaccttccctcgggtccgccagggtcggcctcagagctggcaggatgttcggtgccagtccctgcctcagaggcctaatgcacgcctaaatggggggaaggtccaacttaaccttatggatttagtgtctgggattccagcaactcaaagtcaaaaaattcaagaggtgggggagatcacaaacttgagagtcaatttcaccaggctggcccctgtgccccaaaggggctaccaccctcccagcgcctactatgctgtgtcccagctccgtctgcaggggagctgcttctgtcacggccatgctgatcgctgcgcacccaagcctggggcctctgcaggcccctccaccgctgtgcaggtccacgatgtctgtgtctgccagcacaacactgccggcccaaattgtgagcgctgtgcacccttctacaacaaccggccctggagaccggcggagggccaggacgcccatgaatgccaaaggtgcgactgcaatgggcactcagagacatgtcactttgaccccgctgtgtttgccgccagccagggggcatatggaggtgtgtgtgacaattgccgggaccacaccgaaggcaagaactgtgagcggtgtcagctgcactatttccggaaccggcgcccgggagcttccattcaggagacctgcatctcctgcgagtgtgatccggatggggcagtgccaggggctccctgtgacccagtgaccgggcagtgtgtgtgcaaggagcatgtgcagggagagcgctgtgacctatgcaagccgggcttcactggactcacctacgccaacccgcagggctgccaccgctgtgactgcaacatcctggggtcccggagggacatgccgtgtgacgaggagagtgggcgctgcctttgtctgcccaacgtggtgggtcccaaatgtgaccagtgtgctccctaccactggaagctggccagtggccagggctgtgaaccgtgtgcctgcgacccgcacaactccctcagcccacagtgcaaccagttcacagggcagtgcccctgtcgggaaggctttggtggcctgatgtgcagcgctgcagccatccgccagtgtccagaccggacctatggagacgtggccacaggatgccgagcctgtgactgtgatttccggggaacagagggcccgggctgcgacaaggcatcaggccgctgcctctgccgccctggcttgaccgggccccgctgtgaccagtgccagcgaggctactgcaatcgctacccggtgtgcgtggcctgccacccttgcttccagacctatgatgcggacctccgggagcaggccctgcgctttggtagactccgcaatgccaccgccagcctgtggtcagggcctgggctggaggaccgtggcctggcctcccggatcctagatgcaaagagtaagattgagcagatccgagcagttctcagcagccccgcagtcacagagcaggaggtggctcaggtggccagtgccatcctctccctcaggcgaactctccagggcctgcagctggatctgcccctggaggaggagacgttgtcccttccgagagacctggagagtcttgacagaagcttcaatggtctccttactatgtatcagaggaagagggagcagtttgaaaaaataagcagtgctgatccttcaggagccttccggatgctgagcacagcctacgagcagtcagcccaggctgctcagcaggtctccgacagctcgcgccttttggaccagctcagggacagccggagagaggcagagaggctggtgcggcaggcgggaggaggaggaggcaccggcagccccaagcttgtggccctgaggctggagatgtcttcgttgcctgacctgacacccaccttcaacaagctctgtggcaactccaggcagatggcttgcaccccaatatcatgccctggtgagctatgtccccaagacaatggcacagcctgtggctcccgctgcaggggtgtccttcccagggccggtggggccttcttgatggcggggcaggtggctgagcagctgcggggcttcaatgcccagctccagcggaccaggcagatgattagggcagccgaggaatctgcctcacagattcaatccagtgcccagcgcttggagacccaggtgagcgccagccgctcccagatggaggaagatgtcagacgcacacggctcctaatccagcaggtccgggacttcctaacagaccccgacactgatagcagcctacggggcaatgccccctaggctagtaagtttattcaatgcaaaagaatacctctccaattataactgaggtggctgaccacgtacacgaacaaatccgactctaaa

SEQ ID NO: 325711 - DNA, 2676 bp, Homo sapiens
gtgggggtgcagtgacgacagatgggtgtgacggctgccagattcctgagacccgccctgcggtggggctacacccagccagggagtctccagaggtgaggctgttgtttaaaaacctggagccgggaggggagacccccacattcaagaggagctttcaggcgatctggagaaagaacggcagaacacacagcaaggaaaggtcctttctggggatcaccccattggctgaagatgagaccattcttcctcttgtgttttgccctgcctggcctcctgcatgcccaacaagcctgctcccgtggggcctgctatccacctgttggggacctgcttgttgggaggacccggtttctccgagcttcatctacctgtggactgaccaagcctgagacctactgcacccagtatggcgagtggcagatgaaatgctgcaagtgtgactccaggcagcctcacaactactacagtcaccgagtagagaatgtggcttcatcctccggccccatgcgctggtggcagtcccagaatgatgtgaaccctgtctctctgcagctggacctggacaggagattccagcttcaagaagtcatgatggagttccaggggcccatgcccgccggcatgctgattgagcgctcctcagacttcggtaagacctggcgagtgtaccagtacctggctgccgactgcacctccaccttccctcgggtccgccagggtcggcctcagagctggcaggatgttcggtgccagtccctgcctcagaggcctaatgcacgcctaaatggggggaaggtccaacttaaccttatggatttagtgtctgggattccagcaactcaaagtcaaaaaattcaagaggtgggggagatcacaaacttgagagtcaatttcaccaggctggcccctgtgccccaaaggggctaccaccctcccagcgcctactatgctgtgtcccagctccgtctgcaggggagctgcttctgtcacggccatgctgatcgctgcgcacccaagcctggggcctctgcaggcccctccaccgctgtgcaggtccacgatgtctgtgtctgccagcacaacactgccggcccaaattgtgagcgctgtgcacccttctacaacaaccggccctggagaccggcggagggccaggacgcccatgaatgccaaaggtgcgactgcaatgggcactcagagacatgtcactttgaccccgctgtgtttgccgccagccagggggcatatggaggtgtgtgtgacaattgccgggaccacaccgaaggcaagaactgtgagcggtgtcagctgcactatttccggaaccggcgcccgggagcttccattcaggagacctgcatctcctgcgagtgtgatccggatggggcagtgccaggggctccctgtgacccagtgaccgggcagtgtgtgtgcaaggagcatgtgcagggagagcgctgtgacctatgcaagccgggcttcactggactcacctacgccaacccgcagggctgccaccgctgtgactgcaacatcctggggtcccggagggacatgccgtgtgacgaggagagtgggcgctgcctttgtctgcccaacgtggtgggtcccaaatgtgaccagtgtgctccctaccactggaagctggccagtggccagggctgtgaaccgtgtgcctgcgacccgcacaactccctcagcccacagtgcaaccagttcacagggcagtgcccctgtcgggaaggctttggtggcctgatgtgcagcgctgcagccatccgccagtgtccagaccggacctatggagacgtggccacaggatgccgagcctgtgactgtgatttccggggaacagagggcccgggctgcgacaaggcatcaggccgctgcctctgccgccctggcttgaccgggccccgctgtgaccagtgccagcgaggctactgcaatcgctacccggtgtgcgtggcctgccacccttgcttccagacctatgatgcggacctccgggagcaggccctgcgctttggtagactccgcaatgccaccgccagcctgtggtcagggcctgggctggaggaccgtggcctggcctcccggatcctagatgcaaagagtaagattgagcagatccgagcagttctcagcagccccgcagtcacagagcaggaggtggctcaggtggccagtgccatcctctccctcaggcgaactctccagggcctgcagctggatctgcccctggaggaggagacgttgtcccttccgagagacctggagagtcttgacagaagcttcaatggtctccttactatgtatcagaggaagagggagcagtttgaaaaaataagcagtgctgatccttcaggagccttccggatgctgagcacagcctacgagcagtcagcccaggctgctcagcaggtctccgacagctcgcgccttttggaccagctcagggacagccggagagaggcagagaggctggtgcggcaggcgggaggaggaggaggcaccggcagccccaagcttgtggccctgaggctggagatgtcttcgttgcctgacctgacacccaccttcaacaaggtgacttggggcatggagtcccacttcctggagcccacaccccagcttgtcacacaccaactgctgccacctgcgatcctatta

SEQ ID NO: 325712 - DNA, 1164 bp, Homo sapiens
gtgggggtgcagtgacgacagatgggtgtgacggctgccagattcctgagacccgccctgcggtggggctacacccagccagggagtctccagaggtgaggctgttgtttaaaaacctggagccgggaggggagacccccacattcaagaggagctttcaggcgatctggagaaagaacggcagaacacacagcaaggaaaggtcctttctggggatcaccccattggctgaagatgagaccattcttcctcttgtgttttgccctgcctggcctcctgcatgcccaacaagcctgctcccgtggggcctgctatccacctgttggggacctgcttgttgggaggacccggtttctccgagcttcatctacctgtggactgaccaagcctgagacctactgcacccagtatggcgagtggcagatgaaatgctgcaagtgtgactccaggcagcctcacaactactacagtcaccgagtagagaatgtggcttcatcctccggccccatgcgctggtggcagtcccagaatgatgtgaaccctgtctctctgcagctggacctggacaggagattccagcttcaagaagtcatgatggagttccaggggcccatgcccgccggcatgctgattgagcgctcctcagacttcggtaagacctggcgagtgtaccagtacctggctgccgactgcacctccaccttccctcgggtccgccagggtcggcctcagagctggcaggatgttcggtgccagtccctgcctcagaggcctaatgcacgcctaaatggggggaaggtaggtagagggaatcctgaaaagtaggcctggggagaaatccctgatgtcccactgttcacacagccacacggactcctgagaagggacggaaacaccctcgccagctccccttgctgactttcctgaattcccaccagtaatgacccctgtggccaccctcaaaacatttgctgcttatcctctttgctgaggaaggatatttcagcaacaccttggggccaccgcattactcacccctgccgtcttccacagccccctcccccgtgactcattggctcatccctctagtgggaagatgaaatcgaccctactttgatatgaggactttgggatgctagttagatgcaagtgagcaaattacac

SEQ ID NO: 325713 - DNA, 4204 bp, Homo sapiens
  misc_feature (4049)..(4049): n is a, c, g, or t
  misc_feature (4054)..(4055): n is a, c, g, or t
  misc_feature (4061)..(4061): n is a, c, g, or t
  misc_feature (4063)..(4063): n is a, c, g, or t
  misc_feature (4070)..(4070): n is a, c, g, or t
  misc_feature (4075)..(4075): n is a, c, g, or t
gggcgggaggaggactgtatctctggatgcctggggcctggtttcagggcctgatttattcctcttcctgggagctcactcaggaaaggtcctttctggggatcaccccattggctgaagatgagaccattcttcctcttgtgttttgccctgcctggcctcctgcatgcccaacaagcctgctcccgtggggcctgctatccacctgttggggacctgcttgttgggaggacccggtttctccgagcttcatctacctgtggactgaccaagcctgagacctactgcacccagtatggcgagtggcagatgaaatgctgcaagtgtgactccaggcagcctcacaactactacagtcaccgagtagagaatgtggcttcatcctccggccccatgcgctggtggcagtcccagaatgatgtgaaccctgtctctctgcagctggacctggacaggagattccagcttcaagaagtcatgatggagttccaggggcccatgcccgccggcatgctgattgagcgctcctcagacttcggtaagacctggcgagtgtaccagtacctggctgccgactgcacctccaccttccctcgggtccgccagggtcggcctcagagctggcaggatgttcggtgccagtccctgcctcagaggcctaatgcacgcctaaatggggggaaggtccaacttaaccttatggatttagtgtctgggattccagcaactcaaagtcaaaaaattcaagaggtgggggagatcacaaacttgagagtcaatttcaccaggctggcccctgtgccccaaaggggctaccaccctcccagcgcctactatgctgtgtcccagctccgtctgcaggggagctgcttctgtcacggccatgctgatcgctgcgcacccaagcctggggcctctgcaggcccctccaccgctgtgcaggtccacgatgtctgtgtctgccagcacaacactgccggcccaaattgtgagcgctgtgcacccttctacaacaaccggccctggagaccggcggagggccaggacgcccatgaatgccaaaggtgcgactgcaatgggcactcagagacatgtcactttgaccccgctgtgtttgccgccagccagggggcatatggaggtgtgtgtgacaattgccgggaccacaccgaaggcaagaactgtgagcggtgtcagctgcactatttccggaaccggcgcccgggagcttccattcaggagacctgcatctcctgcgagtgtgatccggatggggcagtgccaggggctccctgtgacccagtgaccgggcagtgtgtgtgcaaggagcatgtgcagggagagcgctgtgacctatgcaagccgggcttcactggactcacctacgccaacccgcagggctgccaccgctgtgactgcaacatcctggggtcccggagggacatgccgtgtgacgaggagagtgggcgctgcctttgtctgcccaacgtggtgggtcccaaatgtgaccagtgtgctccctaccactggaagctggccagtggccagggctgtgaaccgtgtgcctgcgacccgcacaactccctcagcccacagtgcaaccagttcacagggcagtgcccctgtcgggaaggctttggtggcctgatgtgcagcgctgcagccatccgccagtgtccagaccggacctatggagacgtggccacaggatgccgagcctgtgactgtgatttccggggaacagagggcccgggctgcgacaaggcatcaggccgctgcctctgccgccctggcttgaccgggccccgctgtgaccagtgccagcgaggctactgcaatcgctacccggtgtgcgtggcctgccacccttgcttccagacctatgatgcggacctccgggagcaggccctgcgctttggtagactccgcaatgccaccgccagcctgtggtcagggcctgggctggaggaccgtggcctggcctcccggatcctagatgcaaagagtaagattgagcagatccgagcagttctcagcagccccgcagtcacagagcaggaggtggctcaggtggccagtgccatcctctccctcaggcgaactctccagggcctgcagctggatctgcccctggaggaggagacgttgtcccttccgagagacctggagagtcttgacagaagcttcaatggtctccttactatgtatcagaggaagagggagcagtttgaaaaaataagcagtgctgatccttcaggagccttccggatgctgagcacagcctacgagcagtcagcccaggctgctcagcaggtctccgacagctcgcgccttttggaccagctcagggacagccggagagaggcagagaggctggtgcggcaggcgggaggaggaggaggcaccggcagccccaagcttgtggccctgaggctggagatgtcttcgttgcctgacctgacacccaccttcaacaagctctgtggcaactccaggcagatggcttgcaccccaatatcatgccctggtgagctatgtccccaagacaatggcacagcctgtggctcccgctgcaggggtgtccttcccagggccggtggggccttcttgatggcggggcaggtggctgagcagctgcggggcttcaatgcccagctccagcggaccaggcagatgattagggcagccgaggaatctgcctcacagattcaatccagtgcccagcgcttggagacccaggtgagcgccagccgctcccagatggaggaagatgtcagacgcacacggctcctaatccagcaggtccgggacttcctaacagaccccgacactgatgcagccactatccaggaggtcagcgaggccgtgctggccctgtggctgcccacagactcagctactgttctgcagaagatgaatgagatccaggccattgcagccaggctccccaacgtggacttggtgctgtcccagaccaagcaggacattgcgcgtgcccgccggttgcaggctgaggctgaggaagccaggagccgagcccatgcagtggagggccaggtggaagatgtggttgggaacctgcggcaggggacagtggcactgcaggaagctcaggacaccatgcaaggcaccagccgctcccttcggcttatccaggacagggttgctgaggttcagcaggtactgcggccagcagaaaagctggtgacaagcatgaccaagcagctgggtgacttctggacacggatggaggagctccgccaccaagcccggcagcagggggcagaggcagtccaggcccagcagcttgcggaaggtgccagcgagcaggcattgagtgcccaagagggatttgagagaataaaacaaaagtatgctgagttgaaggaccggttgggtcagagttccatgctgggtgagcagggtgcccggatccagagtgtgaagacagaggcagaggagctgtttggggagaccatggagatgatggacaggatgaaagacatggagttggagctgctgcggggcagccaggccatcatgctgcgctcagcggacctgacaggactggagaagcgtgtggagcagatccgtgaccacatcaatgggcgcgtgctctactatgccacctgcaagtgatgctacagcttccagcccgttgccccactcatctgccgcctttgcttttggttgggggcagattgggttggaatgctttccatctccaggagactttcatgcagcctaaagtacagcctggaccacccctggtgtgtagctagtaagattaccctgagctgcagctgagcctgagccaatgggacagttacacttgacagacaaagatggtggagattggcatgccattgaaactaagagctctcaagtcaaggaagctgggctgggcagtatcccccgcctttagttctccactggggaggaatcctggaccaagcacaaaaacttaacaaaagtgatgtaaaaatgaaaagccaaataaaaatctttggaaaagaaaaaaacaaaacacaaaaaaaacaacaacaaanaaaannacaaananaaaaaanaaacnacaaaaaaaaacacacaaacaaccaaacacacaaccaaccacacacaacacaagagcgggcgggcgggcgccgccaactcaacaatccccccgcagagggggcgccaccactacatcgcacccccccca

SEQ ID NO: 325714 - DNA, 3978 bp, Homo sapiens
taggggtttgcactgttgtacccagtttgctttgctgtgtcctaggaaaggtcctttctggggatcaccccattggctgaagatgagaccattcttcctcttgtgttttgccctgcctggcctcctgcatgcccaacaagcctgctcccgtggggcctgctatccacctgttggggacctgcttgttgggaggacccggtttctccgagcttcatctacctgtggactgaccaagcctgagacctactgcacccagtatggcgagtggcagatgaaatgctgcaagtgtgactccaggcagcctcacaactactacagtcaccgagtagagaatgtggcttcatcctccggccccatgcgctggtggcagtcccagaatgatgtgaaccctgtctctctgcagctggacctggacaggagattccagcttcaagaagtcatgatggagttccaggggcccatgcccgccggcatgctgattgagcgctcctcagacttcggtaagacctggcgagtgtaccagtacctggctgccgactgcacctccaccttccctcgggtccgccagggtcggcctcagagctggcaggatgttcggtgccagtccctgcctcagaggcctaatgcacgcctaaatggggggaaggtccaacttaaccttatggatttagtgtctgggattccagcaactcaaagtcaaaaaattcaagaggtgggggagatcacaaacttgagagtcaatttcaccaggctggcccctgtgccccaaaggggctaccaccctcccagcgcctactatgctgtgtcccagctccgtctgcaggggagctgcttctgtcacggccatgctgatcgctgcgcacccaagcctggggcctctgcaggcccctccaccgctgtgcaggtccacgatgtctgtgtctgccagcacaacactgccggcccaaattgtgagcgctgtgcacccttctacaacaaccggccctggagaccggcggagggccaggacgcccatgaatgccaaaggtgcgactgcaatgggcactcagagacatgtcactttgaccccgctgtgtttgccgccagccagggggcatatggaggtgtgtgtgacaattgccgggaccacaccgaaggcaagaactgtgagcggtgtcagctgcactatttccggaaccggcgcccgggagcttccattcaggagacctgcatctcctgcgagtgtgatccggatggggcagtgccaggggctccctgtgacccagtgaccgggcagtgtgtgtgcaaggagcatgtgcagggagagcgctgtgacctatgcaagccgggcttcactggactcacctacgccaacccgcagggctgccaccgctgtgactgcaacatcctggggtcccggagggacatgccgtgtgacgaggagagtgggcgctgcctttgtctgcccaacgtggtgggtcccaaatgtgaccagtgtgctccctaccactggaagctggccagtggccagggctgtgaaccgtgtgcctgcgacccgcacaactccctcagcccacagtgcaaccagttcacagggcagtgcccctgtcgggaaggctttggtggcctgatgtgcagcgctgcagccatccgccagtgtccagaccggacctatggagacgtggccacaggatgccgagcctgtgactgtgatttccggggaacagagggcccgggctgcgacaaggcatcaggccgctgcctctgccgccctggcttgaccgggccccgctgtgaccagtgccagcgaggctactgcaatcgctacccggtgtgcgtggcctgccacccttgcttccagacctatgatgcggacctccgggagcaggccctgcgctttggtagactccgcaatgccaccgccagcctgtggtcagggcctgggctggaggaccgtggcctggcctcccggatcctagatgcaaagagtaagattgagcagatccgagcagttctcagcagccccgcagtcacagagcaggaggtggctcaggtggccagtgccatcctctccctcaggcgaactctccagggcctgcagctggatctgcccctggaggaggagacgttgtcccttccgagagacctggagagtcttgacagaagcttcaatggtctccttactatgtatcagaggaagagggagcagtttgaaaaaataagcagtgctgatccttcaggagccttccggatgctgagcacagcctacgagcagtcagcccaggctgctcagcaggtctccgacagctcgcgccttttggaccagctcagggacagccggagagaggcagagaggctggtgcggcaggcgggaggaggaggaggcaccggcagccccaagcttgtggccctgaggctggagatgtcttcgttgcctgacctgacacccaccttcaacaagctctgtggcaactccaggcagatggcttgcaccccaatatcatgccctggtgagctatgtccccaagacaatggcacagcctgtggctcccgctgcaggggtgtccttcccagggccggtggggccttcttgatggcggggcaggtggctgagcagctgcggggcttcaatgcccagctccagcggaccaggcagatgattagggcagccgaggaatctgcctcacagattcaatccagtgcccagcgcttggagacccaggtgagcgccagccgctcccagatggaggaagatgtcagacgcacacggctcctaatccagcaggtccgggacttcctaacagaccccgacactgatgcagccactatccaggaggtcagcgaggccgtgctggccctgtggctgcccacagactcagctactgttctgcagaagatgaatgagatccaggccattgcagccaggctccccaacgtggacttggtgctgtcccagaccaagcaggacattgcgcgtgcccgccggttgcaggctgaggctgaggaagccaggagccgagcccatgcagtggagggccaggtggaagatgtggttgggaacctgcggcaggggacagtggcactgcaggaagctcaggacaccatgcaaggcaccagccgctcccttcggcttatccaggacagggttgctgaggttcagcaggtactgcggccagcagaaaagctggtgacaagcatgaccaagcagctgggtgacttctggacacggatggaggagctccgccaccaagcccggcagcagggggcagaggcagtccaggcccagcagcttgcggaaggtgccagcgagcaggcattgagtgcccaagagggatttgagagaataaaacaaaagtatgctgagttgaaggaccggttgggtcagagttccatgctgggtgagcagggtgcccggatccagagtgtgaagacagaggcagaggagctgtttggggagaccatggagatgatggacaggatgaaagacatggagttggagctgctgcggggcagccaggccatcatgctgcgctcagcggacctgacaggactggagaagcgtgtggagcagatccgtgaccacatcaatgggcgcgtgctctactatgccacctgcaagtgatgctacagcttccagcccgttgccccactcatctgccgcctttgcttttggttgggggcagattgggttggaatgctttccatctccaggagactttcatgcagcctaaagtacagcctggaccacccctggtgtgtagctagtaagattaccctgagctgcagctgagcctgagccaatgggacagttacacttgacagacaaagatggtggagattggcatgccattgaaactaagagctctcaagtcaaggaagctgggctgggcagtatcccccgcctttagttctccactggggaggaatcctggaccaagcacaaaaacttaacaaaagtgatgtaaaaatgaaaagccaaataaaaatctttggaaaaga

SEQ ID NO: 325715 - DNA, 1338 bp, Homo sapiens
tgaaagggggcagcagctccttgggacaccacggtagaggggccactgtgggtgccttccacaagtgctgctcagctaggagaggcctcgtatctctggggaggttagtgggctcctacagtcaaatgcgtgttgtcttccagaccccgacactgatgcagccactatccaggaggtcagcgaggccgtgctggccctgtggctgcccacagactcagctactgttctgcagaagatgaatgagatccaggccattgcagccaggctccccaacgtggacttggtgctgtcccagaccaagcaggacattgcgcgtgcccgccggttgcaggctgaggctgaggaagccaggagccgagcccatgcagtggagggccaggtggaagatgtggttgggaacctgcggcaggggacagtggcactgcaggaagctcaggacaccatgcaaggcaccagccgctcccttcggcttatccaggacagggttgctgaggttcagcaggtactgcggccagcagaaaagctggtgacaagcatgaccaagcagctgggtgacttctggacacggatggaggagctccgccaccaagcccggcagcagggggcagaggcagtccaggcccagcagcttgcggaaggtgccagcgagcaggcattgagtgcccaagagggatttgagagaataaaacaaaagtatgctgagttgaaggaccggttgggtcagagttccatgctgggtgagcagggtgcccggatccagagtgtgaagacagaggcagaggagctgtttggggagaccatggagatgatggacaggatgaaagacatggagttggagctgctgcggggcagccaggccatcatgctgcgctcagcggacctgacaggactggagaagcgtgtggagcagatccgtgaccacatcaatgggcgcgtgctctactatgccacctgcaagtgatgctacagcttccagcccgttgccccactcatctgccgcctttgcttttggttgggggcagattgggttggaatgctttccatctccaggagactttcatgcagcctaaagtacagcctggaccacccctggtgtgtagctagtaagattaccctgagctgcagctgagcctgagccaatgggacagttacacttgacagacaaagatggtggagattggcatgccattgaaactaagagctctcaagtcaaggaagctgggctgggcagtatcccccgcctttagttctccactggggaggaatcctggaccaagcacaaaaacttaacaaaagtgatgtaaaaatgaaaagccaaataaaaatctttggaaaaga

SEQ ID NO: 325716 - DNA, 3114 bp, Homo sapiens
gtgggggtgcagtgacgacagatgggtgtgacggctgccagattcctgagacccgccctgcggtggggctacacccagccagggagtctccagaggtgaggctgttgtttaaaaacctggagccgggaggggagacccccacattcaagaggagctttcaggcgatctggagaaagaacggcagaacacacagcaaggaaaggtcctttctggggatcaccccattggctgaagatgagaccattcttcctcttgtgttttgccctgcctggcctcctgcatgcccaacaagcctgctcccgtggggcctgctatccacctgttggggacctgcttgttgggaggacccggtttctccgagcttcatctacctgtggactgaccaagcctgagacctactgcacccagtatggcgagtggcagatgaaatgctgcaagtgtgactccaggcagcctcacaactactacagtcaccgagtagagaatgtggcttcatcctccggccccatgcgctggtggcagtcccagaatgatgtgaaccctgtctctctgcagctggacctggacaggagattccagcttcaagaagtcatgatggagttccaggggcccatgcccgccggcatgctgattgagcgctcctcagacttcggtaagacctggcgagtgtaccagtacctggctgccgactgcacctccaccttccctcgggtccgccagggtcggcctcagagctggcaggatgttcggtgccagtccctgcctcagaggcctaatgcacgcctaaatggggggaaggtccaacttaaccttatggatttagtgtctgggattccagcaactcaaagtcaaaaaattcaagaggtgggggagatcacaaacttgagagtcaatttcaccaggctggcccctgtgccccaaaggggctaccaccctcccagcgcctactatgctgtgtcccagctccgtctgcaggggagctgcttctgtcacggccatgctgatcgctgcgcacccaagcctggggcctctgcaggcccctccaccgctgtgcaggtccacgatgtctgtgtctgccagcacaacactgccggcccaaattgtgagcgctgtgcacccttctacaacaaccggccctggagaccggcggagggccaggacgcccatgaatgccaaaggtgcgactgcaatgggcactcagagacatgtcactttgaccccgctgtgtttgccgccagccagggggcatatggaggtgtgtgtgacaattgccgggaccacaccgaaggcaagaactgtgagcggtgtcagctgcactatttccggaaccggcgcccgggagcttccattcaggagacctgcatctcctgcgagtgtgatccggatggggcagtgccaggggctccctgtgacccagtgaccgggcagtgtgtgtgcaaggagcatgtgcagggagagcgctgtgacctatgcaagccgggcttcactggactcacctacgccaacccgcagggctgccaccgctgtgactgcaacatcctggggtcccggagggacatgccgtgtgacgaggagagtgggcgctgcctttgtctgcccaacgtggtgggtcccaaatgtgaccagtgtgctccctaccactggaagctggccagtggccagggctgtgaaccgtgtgcctgcgacccgcacaactccctcagcccacagtgcaaccagttcacagggcagtgcccctgtcgggaaggctttggtggcctgatgtgcagcgctgcagccatccgccagtgtccagaccggacctatggagacgtggccacaggatgccgagcctgtgactgtgatttccggggaacagagggcccgggctgcgacaaggcatcaggccgctgcctctgccgccctggcttgaccgggccccgctgtgaccagtgccagcgaggctactgcaatcgctacccggtgtgcgtggcctgccacccttgcttccagacctatgatgcggacctccgggagcaggccctgcgctttggtagactccgcaatgccaccgccagcctgtggtcagggcctgggctggaggaccgtggcctggcctcccggatcctagatgcaaagagtaagattgagcagatccgagcagttctcagcagccccgcagtcacagagcaggaggtggctcaggtggccagtgccatcctctccctcaggcgaactctccagggcctgcagctggatctgcccctggaggaggagacgttgtcccttccgagagacctggagagtcttgacagaagcttcaatggtctccttactatgtatcagaggaagagggagcagtttgaaaaaataagcagtgctgatccttcaggagccttccggatgctgagcacagcctacgagcagtcagcccaggctgctcagcaggtctccgacagctcgcgccttttggaccagctcagggacagccggagagaggcagagaggctggtgcggcaggcgggaggaggaggaggcaccggcagccccaagcttgtggccctgaggctggagatgtcttcgttgcctgacctgacacccaccttcaacaagctctgtggcaactccaggcagatggcttgcaccccaatatcatgccctggtgagctatgtccccaagacaatggcacagcctgtggctcccgctgcaggggtgtccttcccagggccggtggggccttcttgatggcggggcaggtggctgagcagctgcggggcttcaatgcccagctccagcggaccaggcagatgattagggcagccgaggaatctgcctcacagattcaatccagtgcccagcgcttggagacccaggtgagcgccagccgctcccagatggagtaagattaccctgagctgcagctgagcctgagccaatgggacagttacacttgacagacaaagatggtggagattggcatgccattgaaactaagagctctcaagtcaaggaagctgggctgggcagtatcccccgcctttagttctccactggggaggaatcctggaccaagcacaaaaacttaacaaaagtgatgtaaaaatgaaaagccaaataaaaatctttggaaaaga

SEQ ID NO: 325717 - DNA, 1104 bp, Homo sapiens
gtgggggtgcagtgacgacagatgggtgtgacggctgccagattcctgagacccgccctgcggtggggctacacccagccagggagtctccagaggtgaggctgttgtttaaaaacctggagccgggaggggagacccccacattcaagaggagctttcaggcgatctggagaaagaacggcagaacacacagcaaggaaaggtcctttctggggatcaccccattggctgaagatgagaccattcttcctcttgtgttttgccctgcctggcctcctgcatgcccaacaagcctgctcccgtggggcctgctatccacctgttggggacctgcttgttgggaggacccggtttctccgagcttcatctacctgtggactgaccaagcctgagacctactgcacccagtatggcgagtggcagatgaaatgctgcaagtgtgactccaggcagcctcacaactactacagtcaccgagtagagaatgtggcttcatcctccggccccatgcgctggtggcagtcccagaatgatgtgaaccctgtctctctgcagctggacctggacaggagattccagcttcaagaagtcatgatggagttccaggggcccatgcccgccggcatgctgattgagcgctcctcagacttcggtaagacctggcgagtgtaccagtacctggctgccgactgcacctccaccttccctcgggtccgccagggtcggcctcagagctggcaggatgttcggtgccagtccctgcctcagaggcctaatgcacgcctaaatggggggaaggtccaacttaaccttatggatttagtgtctgggattccagcaactcaaagtcaaaaaattcaagaggtgggggagatcacaaacttgagagtcaatttcaccaggctggcccctgtgccccaaaggggctaccaccctcccagcgcctactatgcattgaaactaagagctctcaagtcaaggaagctgggctgggcagtatcccccgcctttagttctccactggggaggaatcctggaccaagcacaaaaacttaacaaaagtgatgtaaaaatgaaaagccaaataaaaatctttggaaaaga

SEQ ID NO: 325718 - DNA, 453 bp, Homo sapiens
gccccagtgcctcccctctgcacactgcccctgtctccacaggggcccatgcccgccggcatgctgattgagcgctcctcagacttcggtaagacctggcgagtgtaccagtacctggctgccgactgcacctccaccttccctcgggtccgccagggtcggcctcagagctggcaggatgttcggtgccagtccctgcctcagaggcctaatgcacgcctaaatggggggaaggtaggtagagggaatcctgaaaagtaggcctggggagaaatccctgatgtcccactgttcacacagccacacggactcctgagaagggacggaaacaccctcgccagctccccttgctgactttcctgaattcccaccagtaatgacccctgtggccaccctcaaaacatttgctgcttatcctctttgctgaggaaggatatttcagcaacaccttgg

SEQ ID NO: 325719 - DNA, 341 bp, Homo sapiens
tatactttctcaggatttggttattttggaaggacttctttttatctgatagtacaattttgctgatggtattattcccatttgacagcttttttattattattataaatttaacaatatcagtttccttttgacatgcaaaaatgttttaaataaattcactggttatctcatgagactatgcttataaacggaacatcatttttatcttcagcacccaaaattctattcttatatgtgatttttgaaattttgcttatttgggtgttataaatatatttgtgtgtatctaagtttgttttttcagctttttcatgtttacgtattttcttgtaataaat

SEQ ID NO: 325720 - DNA, 406 bp, Homo sapiens
tgatatttctaggccacatggtttgtctgcaagatttttcaaattgttgcaaatgtccaaaaaaattttcaacatattactgagaaaacatttgtgtagaagtggacctgtgcagctcaaacctgtgtcattcagggtcagctgtactttagtctagaggatggatcaacatatacccaatgacctacaagaatgttttggatcaagtggagatacaaaggagaaggcagccatgtcctgaccattgtctttctttcccatcctggctggagagagcacagtggggaagagaaataagagagaagacaacccaaaccttaactctcatgcagtactgggcggtggtgagctcaaaggctttgccatcagacccctgggttcatatcccagctccaccacttgcaaa

SEQ ID NO: 325721 - DNA, 352 bp, Homo sapiens
gtgaactcagacatgatcgtgggagttgcttcggccatgaaatgtgtaccgagatggtgtgtttcccttcccagcagcagctttaagagcttgtgcatggtttggcattctctcttttccttctgccaccgagactgcagtattccagatatgagccaatcctctcacttaaatcctgaaatgtggacaacatggaatcaagtcagagccaactggttccggacacgggtatgaaagagaaataaatcttttctgttgtaagccacagagattgtgggattgttgccacagtatgacctggttaaccttgacaggtacagggctccacacacactgttttctttcttctcct

SEQ ID NO: 325722 - DNA, 325 bp, Homo sapiens
caggtgactgagatgtacatccaaagaaggggataggaggccaaatgagctgataccctcctgcaggtgtgaaccacttgtgtgaggacagaggaaaagatgtatgtttgtcagccgggtgtggtggctcacacctgtaatcctagcactttgggaggctgaggtgggcagatcacctgaggtcaggagttcaagactagcctggccaacataacgaaaccccgtctctaccaaaagtacaaaaattagccaggcgtggtggcgtgtgcctgtaatcccagctactcaggaggctgaggcaggagaattgcttgaacccaggagg

SEQ ID NO: 325723 - DNA, 296 bp, Homo sapiens
aatctaatcaacaaaataactaattggaaaatgaattataagccgggtgcttataatttgcacctctctttgggagaccgaggcgcatagatcacaaggtcaggagatgaaggccatcctggccaacacggtgaaaccccatctctactaaaaatacaaaaattagctgggcgtggtgagctcgcacctgtaatcaagctattcaggaggctgaggcaggagaatcacttgaacccgggaggcggaggttgcagtgagccaagatctcgccactgcactccagcctgagtgagaga

SEQ ID NO: 325724 - DNA, 560 bp, Homo sapiens
cattctttttctttattcagtggattgttagttcttctgctgttaggaagccactatgtctggacgtggaaagcaaggcggcaaagctcgggcaaaagctaaaacgcgttcttccagggccggtcttcagtttccagttggccgtgtgcaccgcctcctccgcaaaggcaactactccgaacgagtcggggccggcgctccagtgtacctggcagcggtgctggaatatctgacggccgagatcttagagctagctggcaacgcggctcgcgacaataagaagacccgcatcatcccgcgccacctgcagctagccatccgcaacgacgaggagctaaataagcttctaggtcgcgtgaccatcgcgcagggcggtgtcctgcccaacatccaggccgtattgctgcctaagaagacggagagccaccataaggccaagggcaagtgaaatgattactagtcaaatccgtcagtgatcccgagtcccagaaaccaaaggctcttttcagagccacccaccttttctgtaaagtgctggaatacacatacgatgcctgaaa

SEQ ID NO: 325725 - DNA, 524 bp, Homo sapiens
gaggcccaacatccaggccgtattgctgcctaagaagacggagagccgccataaggccaagggcaagtgaaatgcttccagggccggtcttcagtttccagttggccgtgtgcaccgcctcctccgcaaaggcaactactccgaacgagtcggggccggcgctccagtgtacctggcagcggtgctggaatatctgacggccgagatcttagagctagctggcaacgcggctcgcgacaataagaagacccgcatcatcccgcgccacctgcagctagccatccgcaacgacgaggagctaaataagcttctaggtcgcgtgaccatcgcgcagggcggtgtcctgcccaacatccaggccgtattgctgcctaagaagacggagagccaccataaggccaagggcaagtgaaatgattactagtcaaatccgtcagtgatcccgagtcccagaaaccaaaggctcttttcagagccacccaccttttctgtaaagtgctggaatacacatacgatgcctgaaa

SEQ ID NO: 325726 - DNA, 1030 bp, Homo sapiens
cattctttttctttattcagtggattgttagttcttctgctgttaggaagccactatgtctggacgtggaaagcaaggcggcaaagctcgggcaaaagctaaaacgcgttcttccagggccggtcttcagtttccagttggccgtgtgcaccgcctcctccgcaaaggcaactactccgaacgagtcggggccggcgctccagtgtacctggcagcggtgctggaatatctgacggccgagatcttagagctagctggcaacgcggctcgcgacaataagaagacccgcatcatcccgcgccacctgcagctagccatccgcaacgacgaggagctaaataagcttctaggtcgcgtgaccatcgcgcagggcggtgtcctgcccaacatccaggccgtattgctgcctaagaagacggagagccaccataaggccaagggcaagtgaaatgattactagtcaaatccgtcagtgatcccgagtcccagaaaccaaaggctcttttcagagccacccaccttttctgtaaagtgctggaatacacatacgatgcctgaaaaaaaaaaaaaaaaaaaaaaaaaagaaaaaccccgagaagagtttctcccctttgggggggagggggcgcccaaagaggggggcagagcgggggcgttaggggggaaaaaaaattcccccgggggaaggggggcgcctaactccaagcacaccggggataggggttcccccagtcccttacaggcgacacaggcagaggggcggttccccttcaccaaagagagaccccggggaaaagaagaggagcgcgcgccaaaaggggcaccaacagaggcggcggcgggaagaatcaaaggaaaagccccgcggggaggaagtcagagggacaatggcgcgtccctggggattaggccagagatcaaccggtgaaagcgccgacaagccgggcgagggaaagcgcccctgaacgaggcggaggcaacgggcaaatgagcgatccccgggacgagtataggccaaaactcgggaggg

SEQ ID NO: 325727 - DNA, 371 bp, Homo sapiens
gagctcggtaccccgtgtttatcgatgccacctgacactaatcaaaagaaaactgaagtgtctgtattagtattagacaaagtaagtatcatagtccattgtgtggtactataacaaaatacctgagactgggtaatttatagaaaacagaaatgtatttcttcacagttctggaaactgagaagtccaaaatcaagacaccagcatctgttgagggacttcttgtggcatcctcacatggttgggggtagaaatggcaaaagggggacaaatgctgtcttcttacgtagaaaaaagagaacacactgccacaagctcttttataacagtattaatacagttatgaggggagagccctcatcacctaaaca

SEQ ID NO: 325728 - DNA, 489 bp, Homo sapiens
gtgtgcgcggtcgatctagaggaccccattccattaacaaaagagattgtgaaattagatgaaagattagatgctgtctaccaaaaatccactttaaatataaatacacaagtaggttaatattaacaggatgggaaaagatataccacctgacactaatcaaaagaaaactgaagtgtctgtattagtattagacaaagtaagtatcatagtccattgtgtggtactataacaaaatacctgagactgggtaatttatagaaaacagaaatgtatttcttcacagttctggaaactgagaagtccaaaatcaagacaccagcatctgttgagggacttcttgtggcatcctcacatggttgggggtagaaatggcaaaagggggacaaatgctgtcttcttacgtagaaaaaagagaacacactgccacaagctcttttataacagtattaatacagttatgaggggagagccctcatcacctaaaca

SEQ ID NO: 325729 - DNA, 4612 bp, Homo sapiens
  misc_feature (626)..(626): n is a, c, g, or t
cgcaggtggcaggcaggtggggctggtacagcccgcgccgcctctgctgcagccgctgccgtctactccttgcgcgctggcactccgcagcctttaaggttcgcgcgggggccaggcaagagttagccatgaagagcctcaagtcccgcctgaggaggcaggacgtgcccggccccgcgtcgtctggcgccgccgccgccagcgcgcatgcagcagattggaataaatatgatgaccgattgatgaaagcagcagaaaggggggatgtagaaaaagtgacgtcaatccttgctaaaaagggggtcaatccaggcaaactagatgtggaaggcagatctgtcttccatgttgtgacctcaaaggggaatcttgagtgtttgaatgccatccttatacatggagttgatattacaaccagtgacactgcagggagaaatgctcttcacctggctgctaagtatggacatgcattgtgcctacaaaaacttctacagtacaattgtcccactgagcatgcagacctgcagggaagaactgcacttcacgatgccgcaatggcagattgtccttctagcatacagctgctttgtgaccatggggcctctgtgaatgccaaagatgtagangggcggacaccacttgttctggctactcagatgagtaggccaacaatatgtcaactgctgatagatagaggagcggatgttaattccagagacaaacaaaacagaactgccctcatgctaggttgcgaatatggttgcagagatgcagtagaagtcttaattaaaaatggtgctgatataagcttgctggatgcgcttggccatgatagttcttactatgcaagaattggtgacaatctggacattctaaccttgttgaagactgcatcggaaaataccaacaaagggagagaactttggaagaaagggccatctttgcaacagcgaaatttgacacacatgcaagatgaagtaaatgtgaagtcacatcagagggagcatcaaaatattcaggatttggagattgaaaatgaagatttgaaagagaggttgagaaaaattcagcaagaacaaagaatacttttggataaagtcaatggtttacagttacagctgaatgaggaagttatggttgctgatgatctggaaagcgagagagaaaagctgaagtcccttttggcagctaaagaaaagcaacatgaagaaagcttaaggactattgaggctctgaaaaatagatttaaatattttgagagtgatcatttaggatcaggaagtcatttcagtaaccgaaaagaagatatgcttcttaaacaaggtcagatgtatatggcagactcacagtgtacttccccaggtataccagcccatatgcaaagcagatctatgttaagacctctggaactatctttacccagtcaaacgtcatactctgaaaatgaaattttaaagaaagagttagaagcaatgcgaactttctgtgagtcagcaaaacaagaccgactgaagctccaaaatgaactggcacacaaagtggcagaatgcaaagctttagcattagaatgtgaaagggtcaaggaggattcagatgaacagataaagcaattagaagatgcattaaaagatgtgcagaagaggatgtatgagtcagaaggtaaagttaaacaaatgcagacccattttcttgcccttaaagaacacttaacaagtgaagcagcctcagggaatcacagactaaccgaggaactgaaggatcagttgaaagacttgaaagtaaaatatgaaggtgcttcagcagaagtggggaaattaagaaaccaaatcaaacaaaatgagatgatagtagaagagtttaagagggatgaaggcaagctgatagaagaaaataagcgattacagaaggaacttagtatgtgtgaaatggagcgagagaagaaaggaagaaaggtcacagagatggaaggccaggcaaaagaattgtcagcgaagttggccctttccattccagctgaaaaatttgaaaacatgaagagctcattatcaaatgaagtgaatgagaaagcaaaaaaattagtagaaatggaaagagaacatgaaaaatcacttagtgaaattagacagttaaagagagaacttgagaatgttaaggccaagcttgctcagcacgtcaaaccagaggaacatgaacaggttaagagcagattagaacagaaatcaggagaacttgggaagaagatcactgagttaacattgaaaaatcagacactacaaaaggaaattgaaaaagtttatttggataataagctcctcaaggagcaagcacataacttaacaattgaaatgaaaaatcattatgttcctttaaaagtaagtgaagacatgaaaaagtcacatgatgcaattattgatgatcttaatagaaagcttttagatgtaacacaaaaatatacagaaaagaagttggaaatggagaaattgctactggaaaatgacagcttaagtaaggatgtaagccgcctagaaactgtgtttgtacctcctgagaaacatgaaaaagagataatagctctgaaatccaatattgttgaacttaagaaacagctgtctgaacttaagaaaaaatgtggtgaagaccaggagaaaatacacgctctcacatctgaaaacactaacttgaagaagatgatgagtaatcagtatgtgccagttaaaacccatgaagaggttaaaatgacactgaatgacacgttagccaaaactaacagagaattattagatgtgaagaaaaaatttgaagatataaatcaggaatttgtaaaaataaaagataagaatgaaatattaaaaagaaacctggaaaacactcagaaccaaataaaagctgagtacatcagcctggcagagcacgaggcaaagatgagctcgctaagtcagagcatgagaaaggtgcaggatagtaatgctgaaatcttggccaactacagaaaaggccaagaagagattgtgacactgcatgccgaaattaaagcccagaagaaggagctcgacacaatacaagaatgcattaaggtaaaatatgccccaattgtcagctttgaggagtgcgagagaaaatttaaagcaacagagaaagaactaaaagaccagttatcagagcagacacaaaagtatagtgtcagtgaagaagaagtcaagaaaaacaagcaagagaatgacaagttaaagaaggagatttttacccttcagaaagatttgagagataagacagttctcattgagaagtctcatgaaatggaaagagcattaagcagaaaaacagacgagctaaacaaacagttaaaagacttgtcacagaaatacacggaagtaaagaatgtgaaagagaagctagtagaagaaaatgccaaacagacttctgagatacttgcagtgcaaaatcttttgcaaaaacaacatgttccattggaacaggttgaggctctgaaaaaatctcttaatggcacaattgaaaatctaaaggaagaactgaagagtatgcaaaggtgttacgagaaagagcagcagacagtgaccaaactgcatcaattgttggagaatcaaaagaactcttctgtacccctggcagagcatttgcagattaaagaagcatttgagaaagaagttggaatcataaaagccagcttgagagaaaaggaagaagaaagccaaaacaaaatggaagaagtctccaaacttcagtcggaggttcagaatactaaacaagcattaaaaaaattagagactagagaggtagttgacttgtctaaatataaagcaacaaaaagtgatttggagacacagatttctagcttaaatgaaaaattggccaatctgaatagaaagtatgaggaagtatgtgaggaagttttgcatgccaaaaagaaggaaatatctgcaaaagatgagaaggaattactgcatttcagcattgagcaagaaattaaggatcagaaggaacgatgtgataagtccttaacaacaatcacagagttacaaagaagaatacaagaatctgctaaacaaatagaagcaaaagataataagataactgaactgcttaatgatgtggaaagattaaaacaggcactcaatggcctttcccaactcacctacacaagtgggaaccccaccaagaggcagagccagctgattgacactctgcagcaccaagtgaaatctctggagcaacagctggccgatgctgacagacagcaccaagaagtaattgcaatttatcggacacaccttcttagtgctgcacagggtcacatggatgaagatgttcaggaggctctgctccagatcatacaaatgcggcaggggcttgtgtgctagccgttagcactgactgccagtatctgttttatcttgctggtgctgaacattctttgtgcaactccatggtctttctgggccttactgtgctggtataattaaaataaaatatattttgttctattggtaggtttttttttaaaattagatgaatatgttagtctttttcaatatcagtttgaatcttattttctgtatgtgttaattttacaaataggcaaacaacataactt

SEQ ID NO: 325730 - DNA, 419 bp, Homo sapiens
gaaattctgcatctggtaggtccaaggtagtttgttgttagaagtagcaggatcgccttaataataataatagttttgtagcatgaagcctgagcattgtccaaagtttggaaatgtgaacgctgatagtcacatctgtccatctttccacatttctaggatgctgacagacagcaccaagaagtaattgcaatttatcggacacaccttcttagtgctgcacagggtcacatggatgaagatgttcaggaggctctgctccagatcatacaaatgcggcaggggcttgtgtgctagccgttagcactgactgccagtatctgttttatcttgctggtgctgaacattctttgtgcaactccatggtctttctgggccttactgtgctggtataattaaaataaaatatattttgttct

SEQ ID NO: 325731 - DNA, 530 bp, Homo sapiens
gaaattctgcatctggtaggtccaaggtagtttgttgttagaagtagcaggatcgccttaataataataatagttttgtagcatgaagcctgagcattgtccaaagtttggaaatgtgaacgctgatagtcacatctgtccatctttccacatttctaggatgctgacagacagcaccaagaagtaattgcaatttatcggacacaccttcttagtgctgcacagggtcacatggatgaagatgttcaggaggctctgctccagatcatacaaatgcggcaggggcttgtgtgctagccgttagcactgactgccagtatctgttttatcttgctggtgctgaacattctttgtgcaactccatggtctttctgggccttactgtgctggtataattaaaataaaatatattttgttctattggtaggtttttttttaaaattagatgaatatgttagtctttttcaatatcagtttgaatcttattttctgtatgtgttaattttacaaataggcaaacaacataactt

SEQ ID NO: 325732 - DNA, 444 bp, Homo sapiens
ggcctgggtgaaaagtagagagtaggggtaaagctggacatgcaaaggattggtttaaggaatactgtctaagggttagctgtcaatggttggagaagaaggagatcctccttcctctcacccatacattttttcttctttcctctttatcaatgatcacagaccattgagtctctgcaaatccagttcatctagctgaattatctcataaagcaattagaagatgcattaaaagatgtgcagaagaggatgtatgagtcagaaggtaaagttaaacaaatgcagacccattttcttgcccttaaagaacacttaacaagtgaagcagcctcagggaatcacagactaaccgaggaactgaaggatcagttgaaagacttgaaagtaaaattagttctgtggctgtgaatgttataattcaggagatttgtagggagattagta

SEQ ID NO: 325733 - DNA, 7056 bp, Homo sapiens
  misc_feature (829)..(829): n is a, c, g, or t
tgcagtgttgaggcagcaggatgcagagtgctgttcaagttttccagtggggtccctcaaagggacaactttgaaagatagctagcttccaaagaataagaaatagatagagttactgtacctgacttggggctgctcttaatcaagttctgcattgcaaggaagataatattcgagcgttatgaaggcggagaaggatcctgaagacgaagaaaatatcgttagagatccaagctaagtgtagcacagcatgtgagggactgagtcacttgtcaggagtttgtctgagagtttgctttgtgagcttacagagatttgtaacttaatgcaaagtagtttgccattagcaacaagaaactaaatcctgtctatgatgaactgttggttttcttgtactcctaagaacagacatgcagcagattggaataaatatgatgaccgattgatgaaagcagcagaaaggggggatgtagaaaaagtgacgtcaatccttgctaaaaagggggtcaatccaggcaaactagatgtggaaggcagatctgtcttccatgttgtgacctcaaaggggaatcttgagtgtttgaatgccatccttatacatggagttgatattacaaccagtgacactgcagggagaaatgctcttcacctggctgctaagtatggacatgcattgtgcctacaaaaacttctacagtacaattgtcccactgagcatgcagacctgcagggaagaactgcacttcacgatgccgcaatggcagattgtccttctagcatacagctgctttgtgaccatggggcctctgtgaatgccaaagatgtagangggcggacaccacttgttctggctactcagatgagtaggccaacaatatgtcaactgctgatagatagaggagcggatgttaattccagagacaaacaaaacagaactgccctcatgctaggttgcgaatatggttgcagagatgcagtagaagtcttaattaaaaatggtgctgatataagcttgctggatgcgcttggccatgatagttcttactatgcaagaattggtgacaatctggacattctaaccttgttgaagactgcatcggaaaataccaacaaagggagagaactttggaagaaagggccatctttgcaacaggctttcagcttttctctagtgagaggaacctaagcatttgcaaaccctgaagagaaagtaatcaggtaccttgagcaattctgatcatcatcctgtgtcatttttgtacctctcacctgaatctgaaagctacattttttaaaaattttgctttaagttctgagatacatgtgctgaatgtgccagtttgtacataggtatacatgtgccgtggtggtttgctgcacttatcatgaaagttatattaaagcttgttttccttttcaatccatctgaattaatatgttcatatatgggtcatgtctgttgacacttttccatctggagcaactgttccagccttcttccctgtgcctcatataacctaagtgtgagtagagtgaaaaaaaatgtacactgctatgactgtactagccatctcacacagaatcagagaaaaatgatttctgaaatatatagatatttaaaataaaaagaattattgaatattaatatgggaattgttctctgctcagtgctctaggaaatattgaagtgaatacaaggagttaatattctactaggaacagaaagacacactgctcctaattactgtgtttccgtcatttattgaatacacttactaaatatacgctgtaaataggactttttttttttaatactaaggcacatgtaatctctgttttcaagaagcctacagtatagttgcaaatgtaagactcactcagttgtttgttcacagatatctgctgaacatctacaacatgccaactactgttctaagtgctgggaatattgtagtgtacgaagtctctgcccttatggaactcctagcttagtgagagatgaacaataagcaaaggaatatttagtatcatagcagatgctgtgaagaaaaacaaaacagaattaagggatgaagagggagtgggtggaagtctgtgggagaagcctcacaggctgagggaagggcaggtgcccagcccctgatgagggagcaggttagacatgttcatggggcagcagcagacaagtgtgacaggagcgatgtgcccatcgtggagggagcagaagaagctgctaaagtaacaaagggctagattaagaaggaccttgtatgataaggactattgatatgtacccaccagtgactaccagatggcggaaggcaggacgtgtgcaccccaatcagtggtgcacgtgatcagatcgctgctaagtggagccagaggtgcaagagaggttcttttagtgtgctaataacaaggcttgtcaggaagatggatcttaattaaaggatgcggttgatttagtatgtctgagttaggatatagtggaggcagtgggtgaggatgctgaagtgaaggctggaaatgaaagtggtatgatcaggtgagctgtgagaagatgtcagattccacttgaagaacagtcctttggtagaaggaatgaggctgtaaacatagttagggccaaattgtggatatagaatatcttttaaatgggagttgttcctctagttctagatccaaactcatttgaatgatagtttaaaaacttgatcaagcaaaggtaaacaaataatacaaaacatgagaaaatcatctcgaagaattaaagcagtagttttttttttaacctaattaggaagaaataaatagctttctacattagttattgtggagatttaaagatcattttggtttttttgaaaggggggttattctcttgtttaataattatgttgtttttgttaaagcaaatctctaagctggaataaagtttcaaagcagtaagttacaaaaacagaacatacacccaaccaagttatttaaagacctttttatattgctcaggtcagagggactgtctgtctcttccttaccatacctcttgatattttattttggtggtgctcagagaagtaaataatttctgtattgtctttacaaattaatgtgacttccccttcctcttcctttttttttttttttaagttgagttcttttagtagttggcaatgcagtgctttatagcccaacttttgttatgcatttattacaaattctttttaaaattttgtgactttagttaaaataaatccttaataatattttaaaatttgttattatttagtatttttaaataagttatacttgatttatttaaaacatagtcttaaaggtcctttccattttggagttttaaatagaaacactgccaccttgtgttatgtgcagctaatgttggataaactgaaaatcactaactgggtgtattgccaattgaggaaaatatacttttctgtattcttacacttgctgacccgtgttttcttatgttttaccaaagcgaaatttgacacacatgcaagatgaagtaaatgtgaagtcacatcagagggagcatcaaaatattcaggatttggagattgaaaatgaagatttgaaagagaggttgagaaaaattcagcaagaacaaagaatacttttggataaagtcaatggtttacagttacagctgaatgaggaagttatggttgctgatgatctggaaagcgagagagaaaagctgaagtcccttttggcagctaaagaaaagcaacatgaagaaagcttaaggactattgaggctctgaaaaatagatttaaatattttgagagtgatcatttaggatcaggaagtcatttcagtaaccgaaaagaagatatgcttcttaaacaaggtcagatgtatatggcagactcacagtgtacttccccaggtataccagcccatatgcaaagcagatctatgttaagacctctggaactatctttacccagtcaaacgtcatactctgaaaatgaaattttaaagaaagagttagaagcaatgcgaactttctgtgagtcagcaaaacaagaccgactgaagctccaaaatgaactggcacacaaagtggcagaatgcaaagctttagcattagaatgtgaaagggtcaaggaggattcagatgaacagataaagcaattagaagatgcattaaaagatgtgcagaagaggatgtatgagtcagaaggtaaagttaaacaaatgcagacccattttcttgcccttaaagaacacttaacaagtgaagcagcctcagggaatcacagactaaccgaggaactgaaggatcagttgaaagacttgaaagtaaaatatgaaggtgcttcagcagaagtggggaaattaagaaaccaaatcaaacaaaatgagatgatagtagaagagtttaagagggatgaaggcaagctgatagaagaaaataagcgattacagaaggaacttagtatgtgtgaaatggagcgagagaagaaaggaagaaaggtcacagagatggaaggccaggcaaaagaattgtcagcgaagttggccctttccattccagctgaaaaatttgaaaacatgaagagctcattatcaaatgaagtgaatgagaaagcaaaaaaattagtagaaatggaaagagaacatgaaaaatcacttagtgaaattagacagttaaagagagaacttgagaatgttaaggccaagcttgctcagcacgtcaaaccagaggaacatgaacaggttaagagcagattagaacagaaatcaggagaacttgggaagaagatcactgagttaacattgaaaaatcagacactacaaaaggaaattgaaaaagtttatttggataataagctcctcaaggagcaagcacataacttaacaattgaaatgaaaaatcattatgttcctttaaaagtaagtgaagacatgaaaaagtcacatgatgcaattattgatgatcttaatagaaagcttttagatgtaacacaaaaatatacagaaaagaagttggaaatggagaaattgctactggaaaatgacagcttaagtaaggatgtaagccgcctagaaactgtgtttgtacctcctgagaaacatgaaaaagagataatagctctgaaatccaatattgttgaacttaagaaacagctgtctgaacttaagaaaaaatgtggtgaagaccaggagaaaatacacgctctcacatctgaaaacactaacttgaagaagatgatgagtaatcagtatgtgccagttaaaacccatgaagaggttaaaatgacactgaatgacacgttagccaaaactaacagagaattattagatgtgaagaaaaaatttgaagatataaatcaggaatttgtaaaaataaaagataagaatgaaatattaaaaagaaacctggaaaacactcagaaccaaataaaagctgagtacatcagcctggcagagcacgaggcaaagatgagctcgctaagtcagagcatgagaaaggtgcaggatagtaatgctgaaatcttggccaactacagaaaaggccaagaagagattgtgacactgcatgccgaaattaaagcccagaagaaggagctcgacacaatacaagaatgcattaaggtaaaatatgccccaattgtcagctttgaggagtgcgagagaaaatttaaagcaacagagaaagaactaaaagaccagttatcagagcagacacaaaagtatagtgtcagtgaagaagaagtcaagaaaaacaagcaagagaatgacaagttaaagaaggagatttttacccttcagaaagatttgagagataagacagttctcattgagaagtctcatgaaatggaaagagcattaagcagaaaaacagacgagctaaacaaacagttaaaagacttgtcacagaaatacacggaagtaaagaatgtgaaagagaagctagtagaagaaaatgccaaacagacttctgagatacttgcagtgcaaaatcttttgcaaaaacaacatgttccattggaacaggttgaggctctgaaaaaatctcttaatggcacaattgaaaatctaaaggaagaactgaagagtatgcaaaggtgttacgagaaagagcagcagacagtgaccaaactgcatcaattgttggagaatcaaaagaactcttctgtacccctggcagagcatttgcagattaaagaagcatttgagaaagaagttggaatcataaaagccagcttgagagaaaaggaagaagaaagccaaaacaaaatggaagaagtctccaaacttcagtcggaggttcagaatactaaacaagcattaaaaaaattagagactagagaggtagttgacttgtctaaatataaagcaacaaaaagtgatttggagacacagatttctagcttaaatgaaaaattggccaatctgaatagaaagtatgaggaagtatgtgaggaagttttgcatgccaaaaagaaggaaatatctgcaaaagatgagaaggaattactgcatttcagcattgagcaagaaattaaggatcagaaggaacgatgtgataagtccttaacaacaatcacagagttacaaagaagaatacaagaatctgctaaacaaatagaagcaaaagataataagataactgaactgcttaatgatgtggaaagattaaaacaggcactcaatggcctttcccaactcacctacacaagtgggaaccccaccaagaggcagagccagctgattgacactctgcagcaccaagtgaaatctctggagcaacagctggccgatgctgacagacagcaccaagaagtaattgcaatttatcggacacaccttcttagtgctgcacagggtcacatggatgaagatgttcaggaggctctgctccagatcatacaaatgcggcaggggcttgtgtgctagccgttagcactgactgccagtatctgttttatcttgctggtgctgaacattctttgtgcaactccatggtctttctgggccttactgtgctggtataattaaaataaaatatattttgttct

SEQ ID NO: 325734 - DNA, 7929 bp, Homo sapiens
  misc_feature (829)..(829): n is a, c, g, or t
tgcagtgttgaggcagcaggatgcagagtgctgttcaagttttccagtggggtccctcaaagggacaactttgaaagatagctagcttccaaagaataagaaatagatagagttactgtacctgacttggggctgctcttaatcaagttctgcattgcaaggaagataatattcgagcgttatgaaggcggagaaggatcctgaagacgaagaaaatatcgttagagatccaagctaagtgtagcacagcatgtgagggactgagtcacttgtcaggagtttgtctgagagtttgctttgtgagcttacagagatttgtaacttaatgcaaagtagtttgccattagcaacaagaaactaaatcctgtctatgatgaactgttggttttcttgtactcctaagaacagacatgcagcagattggaataaatatgatgaccgattgatgaaagcagcagaaaggggggatgtagaaaaagtgacgtcaatccttgctaaaaagggggtcaatccaggcaaactagatgtggaaggcagatctgtcttccatgttgtgacctcaaaggggaatcttgagtgtttgaatgccatccttatacatggagttgatattacaaccagtgacactgcagggagaaatgctcttcacctggctgctaagtatggacatgcattgtgcctacaaaaacttctacagtacaattgtcccactgagcatgcagacctgcagggaagaactgcacttcacgatgccgcaatggcagattgtccttctagcatacagctgctttgtgaccatggggcctctgtgaatgccaaagatgtagangggcggacaccacttgttctggctactcagatgagtaggccaacaatatgtcaactgctgatagatagaggagcggatgttaattccagagacaaacaaaacagaactgccctcatgctaggttgcgaatatggttgcagagatgcagtagaagtcttaattaaaaatggtgctgatataagcttgctggatgcgcttggccatgatagttcttactatgcaagaattggtgacaatctggacattctaaccttgttgaagactgcatcggaaaataccaacaaagggagagaactttggaagaaagggccatctttgcaacaggctttcagcttttctctagtgagaggaacctaagcatttgcaaaccctgaagagaaagtaatcaggtaccttgagcaattctgatcatcatcctgtgtcatttttgtacctctcacctgaatctgaaagctacattttttaaaaattttgctttaagttctgagatacatgtgctgaatgtgccagtttgtacataggtatacatgtgccgtggtggtttgctgcacttatcatgaaagttatattaaagcttgttttccttttcaatccatctgaattaatatgttcatatatgggtcatgtctgttgacacttttccatctggagcaactgttccagccttcttccctgtgcctcatataacctaagtgtgagtagagtgaaaaaaaatgtacactgctatgactgtactagccatctcacacagaatcagagaaaaatgatttctgaaatatatagatatttaaaataaaaagaattattgaatattaatatgggaattgttctctgctcagtgctctaggaaatattgaagtgaatacaaggagttaatattctactaggaacagaaagacacactgctcctaattactgtgtttccgtcatttattgaatacacttactaaatatacgctgtaaataggactttttttttttaatactaaggcacatgtaatctctgttttcaagaagcctacagtatagttgcaaatgtaagactcactcagttgtttgttcacagatatctgctgaacatctacaacatgccaactactgttctaagtgctgggaatattgtagtgtacgaagtctctgcccttatggaactcctagcttagtgagagatgaacaataagcaaaggaatatttagtatcatagcagatgctgtgaagaaaaacaaaacagaattaagggatgaagagggagtgggtggaagtctgtgggagaagcctcacaggctgagggaagggcaggtgcccagcccctgatgagggagcaggttagacatgttcatggggcagcagcagacaagtgtgacaggagcgatgtgcccatcgtggagggagcagaagaagctgctaaagtaacaaagggctagattaagaaggaccttgtatgataaggactattgatatgtacccaccagtgactaccagatggcggaaggcaggacgtgtgcaccccaatcagtggtgcacgtgatcagatcgctgctaagtggagccagaggtgcaagagaggttcttttagtgtgctaataacaaggcttgtcaggaagatggatcttaattaaaggatgcggttgatttagtatgtctgagttaggatatagtggaggcagtgggtgaggatgctgaagtgaaggctggaaatgaaagtggtatgatcaggtgagctgtgagaagatgtcagattccacttgaagaacagtcctttggtagaaggaatgaggctgtaaacatagttagggccaaattgtggatatagaatatcttttaaatgggagttgttcctctagttctagatccaaactcatttgaatgatagtttaaaaacttgatcaagcaaaggtaaacaaataatacaaaacatgagaaaatcatctcgaagaattaaagcagtagttttttttttaacctaattaggaagaaataaatagctttctacattagttattgtggagatttaaagatcattttggtttttttgaaaggggggttattctcttgtttaataattatgttgtttttgttaaagcaaatctctaagctggaataaagtttcaaagcagtaagttacaaaaacagaacatacacccaaccaagttatttaaagacctttttatattgctcaggtcagagggactgtctgtctcttccttaccatacctcttgatattttattttggtggtgctcagagaagtaaataatttctgtattgtctttacaaattaatgtgacttccccttcctcttcctttttttttttttttaagttgagttcttttagtagttggcaatgcagtgctttatagcccaacttttgttatgcatttattacaaattctttttaaaattttgtgactttagttaaaataaatccttaataatattttaaaatttgttattatttagtatttttaaataagttatacttgatttatttaaaacatagtcttaaaggtcctttccattttggagttttaaatagaaacactgccaccttgtgttatgtgcagctaatgttggataaactgaaaatcactaactgggtgtattgccaattgaggaaaatatacttttctgtattcttacacttgctgacccgtgttttcttatgttttaccaaagcgaaatttgacacacatgcaagatgaagtaaatgtgaagtcacatcagagggagcatcaaaatattcaggatttggagattgaaaatgaagatttgaaagagaggttgagaaaaattcagcaagaacaaagaatacttttggataaagtcaatggtttacagttacagctgaatgaggaagttatggttgctgatgatctggaaagcgagagagaaaagctgaagtcccttttggcagctaaagaaaagcaacatgaagaaagcttaaggactattgaggctctgaaaaatagatttaaatattttgagagtgatcatttaggatcaggaagtcatttcagtaaccgtaagtataaaagtatggattatcattacagttcacctagttcaagtaaagaagaatgtttattcttacttgtttaactatacaggaataactgtacaagatattcctgctgctaaacttcatcagcacatggaactaggaagacgttaagatgactattgtaacttctaacatattctgataattactgaagctctgattctccttagctacctgtattttaaaattgtatattgtatgaattaccaaatttgccttgttgattagtagacatagacatttgtcttgtgatatttagggttcatttttttatggaaagaacataaacatagttttctaatttggagaaatcggtcttaatgcaagtaggcattttaaaattacatttatgaattatttttagaccctacataatcttttttattctgcaatgttaaacagtttctctagaaaatctgtttttgtttcctagtgactattaaactattctctcctacaacagtaatatttatgctataaatttaaatcatcatttttgttttgattgattataagatatatgttttattatcatgtagcctagtttaagagtcctcaatatttctgaagttttagtgattctgctgagagagagcatagaaaaaaataagaaaaaaaaaaaccaacctagtatctgttgttcagtagattgtaggtacttctgtttatagaaataataaggggaaaatgggtattttagaatgaggatacttttgtgttgtacctcttgcttctcttttatttgaataataaaggaaataacatcaaattaatgtttagcctactttagtatggatattgaagttaaaatgtcattcatttgcatttatttaggaaaagaagatatgcttcttaaacaaggtcagatgtatatggcagactcacagtgtacttccccaggtataccagcccatatgcaaagcagatctatgttaagacctctggaactatctttacccagtcaaacgtcatactctgaaaatgaaattttaaagaaagagttagaagcaatgcgaactttctgtgagtcagcaaaacaagaccgactgaagctccaaaatgaactggcacacaaagtggcagaatgcaaagctttagcattagaatgtgaaagggtcaaggaggattcagatgaacagataaagcaattagaagatgcattaaaagatgtgcagaagaggatgtatgagtcagaaggtaaagttaaacaaatgcagacccattttcttgcccttaaagaacacttaacaagtgaagcagcctcagggaatcacagactaaccgaggaactgaaggatcagttgaaagacttgaaagtaaaatatgaaggtgcttcagcagaagtggggaaattaagaaaccaaatcaaacaaaatgagatgatagtagaagagtttaagagggatgaaggcaagctgatagaagaaaataagcgattacagaaggaacttagtatgtgtgaaatggagcgagagaagaaaggaagaaaggtcacagagatggaaggccaggcaaaagaattgtcagcgaagttggccctttccattccagctgaaaaatttgaaaacatgaagagctcattatcaaatgaagtgaatgagaaagcaaaaaaattagtagaaatggaaagagaacatgaaaaatcacttagtgaaattagacagttaaagagagaacttgagaatgttaaggccaagcttgctcagcacgtcaaaccagaggaacatgaacaggttaagagcagattagaacagaaatcaggagaacttgggaagaagatcactgagttaacattgaaaaatcagacactacaaaaggaaattgaaaaagtttatttggataataagctcctcaaggagcaagcacataacttaacaattgaaatgaaaaatcattatgttcctttaaaagtaagtgaagacatgaaaaagtcacatgatgcaattattgatgatcttaatagaaagcttttagatgtaacacaaaaatatacagaaaagaagttggaaatggagaaattgctactggaaaatgacagcttaagtaaggatgtaagccgcctagaaactgtgtttgtacctcctgagaaacatgaaaaagagataatagctctgaaatccaatattgttgaacttaagaaacagctgtctgaacttaagaaaaaatgtggtgaagaccaggagaaaatacacgctctcacatctgaaaacactaacttgaagaagatgatgagtaatcagtatgtgccagttaaaacccatgaagaggttaaaatgacactgaatgacacgttagccaaaactaacagagaattattagatgtgaagaaaaaatttgaagatataaatcaggaatttgtaaaaataaaagataagaatgaaatattaaaaagaaacctggaaaacactcagaaccaaataaaagctgagtacatcagcctggcagagcacgaggcaaagatgagctcgctaagtcagagcatgagaaaggtgcaggatagtaatgctgaaatcttggccaactacagaaaaggccaagaagagattgtgacactgcatgccgaaattaaagcccagaagaaggagctcgacacaatacaagaatgcattaaggtaaaatatgccccaattgtcagctttgaggagtgcgagagaaaatttaaagcaacagagaaagaactaaaagaccagttatcagagcagacacaaaagtatagtgtcagtgaagaagaagtcaagaaaaacaagcaagagaatgacaagttaaagaaggagatttttacccttcagaaagatttgagagataagacagttctcattgagaagtctcatgaaatggaaagagcattaagcagaaaaacagacgagctaaacaaacagttaaaagacttgtcacagaaatacacggaagtaaagaatgtgaaagagaagctagtagaagaaaatgccaaacagacttctgagatacttgcagtgcaaaatcttttgcaaaaacaacatgttccattggaacaggttgaggctctgaaaaaatctcttaatggcacaattgaaaatctaaaggaagaactgaagagtatgcaaaggtgttacgagaaagagcagcagacagtgaccaaactgcatcaattgttggagaatcaaaagaactcttctgtacccctggcagagcatttgcagattaaagaagcatttgagaaagaagttggaatcataaaagccagcttgagagaaaaggaagaagaaagccaaaacaaaatggaagaagtctccaaacttcagtcggaggttcagaatactaaacaagcattaaaaaaattagagactagagaggtagttgacttgtctaaatataaagcaacaaaaagtgatttggagacacagatttctagcttaaatgaaaaattggccaatctgaatagaaagtatgaggaagtatgtgaggaagttttgcatgccaaaaagaaggaaatatctgcaaaagatgagaaggaattactgcatttcagcattgagcaagaaattaaggatcagaaggaacgatgtgataagtccttaacaacaatcacagagttacaaagaagaatacaagaatctgctaaacaaatagaagcaaaagataataagataactgaactgcttaatgatgtggaaagattaaaacaggcactcaatggcctttcccaactcacctacacaagtgggaaccccaccaagaggcagagccagctgattgacactctgcagcaccaagtgaaatctctggagcaacagctggccgatgctgacagacagcaccaagaagtaattgcaatttatcggacacaccttcttagtgctgcacagggtcacatggatgaagatgttcaggaggctctgctccagatcatacaaatgcggcaggggcttgtgtgctagccgttagcactgactgccagtatctgttttatcttgctggtgctgaacattctttgtgcaactccatggtctttctgggccttactgtgctggtataattaaaataaaatatattttgttct

SEQ ID NO: 325735 - DNA, 2799 bp, Homo sapiens
aaggtcgaactccggaagaagagagaaaacggaaaaacaagaaaagcagcacgggagaagcatcggaaaacggactagaagatatgaaggtgcttcagcagaagtggggaaattaagaaaccaaatcaaacaaaatgagatgatagtagaagagtttaagagggatgaaggcaagctgatagaagaaaataagcgattacagaaggaacttagtatgtgtgaaatggagcgagagaagaaaggaagaaaggtcacagagatggaaggccaggcaaaagaattgtcagcgaagttggccctttccattccagctgaaaaatttgaaaacatgaagagctcattatcaaatgaagtgaatgagaaagcaaaaaaattagtagaaatggaaagagaacatgaaaaatcacttagtgaaattagacagttaaagagagaacttgagaatgttaaggccaagcttgctcagcacgtcaaaccagaggaacatgaacaggttaagagcagattagaacagaaatcaggagaacttgggaagaagatcactgagttaacattgaaaaatcagacactacaaaaggaaattgaaaaagtttatttggataataagctcctcaaggagcaagcacataacttaacaattgaaatgaaaaatcattatgttcctttaaaagtaagtgaagacatgaaaaagtcacatgatgcaattattgatgatcttaatagaaagcttttagatgtaacacaaaaatatacagaaaagaagttggaaatggagaaattgctactggaaaatgacagcttaagtaaggatgtaagccgcctagaaactgtgtttgtacctcctgagaaacatgaaaaagagataatagctctgaaatccaatattgttgaacttaagaaacagctgtctgaacttaagaaaaaatgtggtgaagaccaggagaaaatacacgctctcacatctgaaaacactaacttgaagaagatgatgagtaatcagtatgtgccagttaaaacccatgaagaggttaaaatgacactgaatgacacgttagccaaaactaacagagaattattagatgtgaagaaaaaatttgaagatataaatcaggaatttgtaaaaataaaagataagaatgaaatattaaaaagaaacctggaaaacactcagaaccaaataaaagctgagtacatcagcctggcagagcacgaggcaaagatgagctcgctaagtcagagcatgagaaaggtgcaggatagtaatgctgaaatcttggccaactacagaaaaggccaagaagagattgtgacactgcatgccgaaattaaagcccagaagaaggagctcgacacaatacaagaatgcattaaggtaaaatatgccccaattgtcagctttgaggagtgcgagagaaaatttaaagcaacagagaaagaactaaaagaccagttatcagagcagacacaaaagtatagtgtcagtgaagaagaagtcaagaaaaacaagcaagagaatgacaagttaaagaaggagatttttacccttcagaaagatttgagagataagacagttctcattgagaagtctcatgaaatggaaagagcattaagcagaaaaacagacgagctaaacaaacagttaaaagacttgtcacagaaatacacggaagtaaagaatgtgaaagagaagctagtagaagaaaatgccaaacagacttctgagatacttgcagtgcaaaatcttttgcaaaaacaacatgttccattggaacaggttgaggctctgaaaaaatctcttaatggcacaattgaaaatctaaaggaagaactgaagagtatgcaaaggtgttacgagaaagagcagcagacagtgaccaaactgcatcaattgttggagaatcaaaagaactcttctgtacccctggcagagcatttgcagattaaagaagcatttgagaaagaagttggaatcataaaagccagcttgagagaaaaggaagaagaaagccaaaacaaaatggaagaagtctccaaacttcagtcggaggttcagaatactaaacaagcattaaaaaaattagagactagagaggtagttgacttgtctaaatataaagcaacaaaaagtgatttggagacacagatttctagcttaaatgaaaaattggccaatctgaatagaaagtatgaggaagtatgtgaggaagttttgcatgccaaaaagaaggaaatatctgcaaaagatgagaaggaattactgcatttcagcattgagcaagaaattaaggatcagaaggaacgatgtgataagtccttaacaacaatcacagagttacaaagaagaatacaagaatctgctaaacaaatagaagcaaaagataataagataactgaactgcttaatgatgtggaaagattaaaacaggcactcaatggcctttcccaactcacctacacaagtgggaaccccaccaagaggcagagccagctgattgacactctgcagcaccaagtgaaatctctggagcaacagctggccgatgctgacagacagcaccaagaagtaattgcaatttatcggacacaccttcttagtgctgcacagggtcacatggatgaagatgttcaggaggctctgctccagatcatacaaatgcggcaggggcttgtgtgctagccgttagcactgactgccagtatctgttttatcttgctggtgctgaacattctttgtgcaactccatggtctttctgggccttactgtgctggtataattaaaataaaatatattttgttct

SEQ ID NO: 325736 - DNA, 5546 bp, Homo sapiens
  misc_feature (829)..(829): n is a, c, g, or t
tgcagtgttgaggcagcaggatgcagagtgctgttcaagttttccagtggggtccctcaaagggacaactttgaaagatagctagcttccaaagaataagaaatagatagagttactgtacctgacttggggctgctcttaatcaagttctgcattgcaaggaagataatattcgagcgttatgaaggcggagaaggatcctgaagacgaagaaaatatcgttagagatccaagctaagtgtagcacagcatgtgagggactgagtcacttgtcaggagtttgtctgagagtttgctttgtgagcttacagagatttgtaacttaatgcaaagtagtttgccattagcaacaagaaactaaatcctgtctatgatgaactgttggttttcttgtactcctaagaacagacatgcagcagattggaataaatatgatgaccgattgatgaaagcagcagaaaggggggatgtagaaaaagtgacgtcaatccttgctaaaaagggggtcaatccaggcaaactagatgtggaaggcagatctgtcttccatgttgtgacctcaaaggggaatcttgagtgtttgaatgccatccttatacatggagttgatattacaaccagtgacactgcagggagaaatgctcttcacctggctgctaagtatggacatgcattgtgcctacaaaaacttctacagtacaattgtcccactgagcatgcagacctgcagggaagaactgcacttcacgatgccgcaatggcagattgtccttctagcatacagctgctttgtgaccatggggcctctgtgaatgccaaagatgtagangggcggacaccacttgttctggctactcagatgagtaggccaacaatatgtcaactgctgatagatagaggagcggatgttaattccagagacaaacaaaacagaactgccctcatgctaggttgcgaatatggttgcagagatgcagtagaagtcttaattaaaaatggtgctgatataagcttgctggatgcgcttggccatgatagttcttactatgcaagaattggtgacaatctggacattctaaccttgttgaagactgcatcggaaaataccaacaaagggagagaactttggaagaaagggccatctttgcaacaggctttcagcttttctctagtgagaggaacctaagcatttgcaaaccctgaagagaaagtaatcaggtaccttgagcaattctgatcatcatcctgtgtcatttttgtacctctcacctgaatctgaaagctacattttttaaaaattttgctttaagttctgagatacatgtgctgaatgtgccagtttgtacataggtatacatgtgccgtggtggtttgctgcacttatcatgaaagttatattaaagcttgttttccttttcaatccatctgaattaatatgttcatatatgggtcatgtctgttgacacttttccatctggagcaactgttccagccttcttccctgtgcctcatataacctaagtgtgagtagagtgaaaaaaaatgtacactgctatgactgtactagccatctcacacagaatcagagaaaaatgatttctgaaatatatagatatttaaaataaaaagaattattgaatattaatatgggaattgttctctgctcagtgctctaggaaatattgaagtgaatacaaggagttaatattctactaggaacagaaagacacactgctcctaattactgtgtttccgtcatttattgaatacacttactaaatatacgctgtaaataggactttttttttttaatactaaggcacatgtaatctctgttttcaagaagcctacagtatagttgcaaatgtaagactcactcagttgtttgttcacagatatctgctgaacatctacaacatgccaactactgttctaagtgctgggaatattgtagtgtacgaagtctctgcccttatggaactcctagcttagtgagagatgaacaataagcaaaggaatatttagtatcatagcagatgctgtgaagaaaaacaaaacagaattaagggatgaagagggagtgggtggaagtctgtgggagaagcctcacaggctgagggaagggcaggtgcccagcccctgatgagggagcaggttagacatgttcatggggcagcagcagacaagtgtgacaggagcgatgtgcccatcgtggagggagcagaagaagctgctaaagtaacaaagggctagattaagaaggaccttgtatgataaggactattgatatgtacccaccagtgactaccagatggcggaaggcaggacgtgtgcaccccaatcagtggtgcacgtgatcagatcgctgctaagtggagccagaggtgcaagagaggttcttttagtgtgctaataacaaggcttgtcaggaagatggatcttaattaaaggatgcggttgatttagtatgtctgagttaggatatagtggaggcagtgggtgaggatgctgaagtgaaggctggaaatgaaagtggtatgatcaggtgagctgtgagaagatgtcagattccacttgaagaacagtcctttggtagaaggaatgaggctgtaaacatagttagggccaaattgtggatatagaatatcttttaaatgggagttgttcctctagttctagatccaaactcatttgaatgatagtttaaaaacttgatcaagcaaaggtaaacaaataatacaaaacatgagaaaatcatctcgaagaattaaagcagtagttttttttttaacctaattaggaagaaataaatagctttctacattagttattgtggagatttaaagatcattttggtttttttgaaaggggggttattctcttgtttaataattatgttgtttttgttaaagcaaatctctaagctggaataaagtttcaaagcagtaagttacaaaaacagaacatacacccaaccaagttatttaaagacctttttatattgctcaggtcagagggactgtctgtctcttccttaccatacctcttgatattttattttggtggtgctcagagaagtaaataatttctgtattgtctttacaaattaatgtgacttccccttcctcttcctttttttttttttttaagttgagttcttttagtagttggcaatgcagtgctttatagcccaacttttgttatgcatttattacaaattctttttaaaattttgtgactttagttaaaataaatccttaataatattttaaaatttgttattatttagtatttttaaataagttatacttgatttatttaaaacatagtcttaaaggtcctttccattttggagttttaaatagaaacactgccaccttgtgttatgtgcagctaatgttggataaactgaaaatcactaactgggtgtattgccaattgaggaaaatatacttttctgtattcttacacttgctgacccgtgttttcttatgttttaccaaagcgaaatttgacacacatgcaagatgaagtaaatgtgaagtcacatcagagggagcatcaaaatattcaggatttggagattgaaaatgaagatttgaaagagaggttgagaaaaattcagcaagaacaaagaatacttttggataaagtcaatggtttacagttacagctgaatgaggaagttatggttgctgatgatctggaaagcgagagagaaaagctgaagtcccttttggcagctaaagaaaagcaacatgaagaaagcttaaggactattgaggctctgaaaaatagatttaaatattttgagagtgatcatttaggatcaggaagtcatttcagtaaccgtaagtataaaagtatggattatcattacagttcacctagttcaagtaaagaagaatgtttattcttacttgtttaactatacaggaataactgtacaagatattcctgctgctaaacttcatcagcacatggaactaggaagacgttaagatgactattgtaacttctaacatattctgataattactgaagctctgattctccttagctacctgtattttaaaattgtatattgtatgaattaccaaatttgccttgttgattagtagacatagacatttgtcttgtgatatttagggttcatttttttatggaaagaacataaacatagttttctaatttggagaaatcggtcttaatgcaagtaggcattttaaaattacatttatgaattatttttagaccctacataatcttttttattctgcaatgttaaacagtttctctagaaaatctgtttttgtttcctagtgactattaaactattctctcctacaacagtaatatttatgctataaatttaaatcatcatttttgttttgattgattataagatatatgttttattatcatgtagcctagtttaagagtcctcaatatttctgaagttttagtgattctgctgagagagagcatagaaaaaaataagaaaaaaaaaaaccaacctagtatctgttgttcagtagattgtaggtacttctgtttatagaaataataaggggaaaatgggtattttagaatgaggatacttttgtgttgtacctcttgcttctcttttatttgaataataaaggaaataacatcaaattaatgtttagcctactttagtatggatattgaagttaaaatgtcattcatttgcatttatttaggaaaagaagatatgcttcttaaacaaggtcagatgtatatggcagactcacagtgtacttccccaggtataccagcccatatgcaaagcagatctatgttaagacctctggaactatctttacccagtcaaacgtcatactctgaaaatgaaattttaaagaaagagttagaagcaatgcgaactttctgtgagtcagcaaaacaagaccgactgaagctccaaaatgaactggcacacaaagtggcagaatgcaaagctttagcattagaatgtgaaagggtcaaggaggattcagatgaacagataaagcaattagaagatgcattaaaagatgtgcagaagaggatgtatgagtcagaaggtaaagttaaacaaatgcagacccattttcttgcccttaaagaacacttaacaagtgaagcagcctcagggaatcacagactaaccgaggaactgaaggatcagttgaaagacttgaaagtaaaatatgaaggtgcttcagcagaagtggggaaattaagaaaccaaatcaaacaaaatgagatgatagtagaagagtttaagagggatgaaggcaagctgatagaagaaaataagaagagaaaactaaggtccccagtcaaaaaggatggtgggaaagaatgtttagatttcaaaatttaaaagccccgagctaggaagaacctgaaaactgagtactcctcaagtgaaaggcaatctctacagaacatcattccttcatatgtttcttagttttctttttccgacgaagaggtctcgctatgtctctcaggctggagagacaggtattcacatggga

SEQ ID NO: 325737 - DNA, 1651 bp, Homo sapiens
  misc_feature (829)..(829): n is a, c, g, or t
tgcagtgttgaggcagcaggatgcagagtgctgttcaagttttccagtggggtccctcaaagggacaactttgaaagatagctagcttccaaagaataagaaatagatagagttactgtacctgacttggggctgctcttaatcaagttctgcattgcaaggaagataatattcgagcgttatgaaggcggagaaggatcctgaagacgaagaaaatatcgttagagatccaagctaagtgtagcacagcatgtgagggactgagtcacttgtcaggagtttgtctgagagtttgctttgtgagcttacagagatttgtaacttaatgcaaagtagtttgccattagcaacaagaaactaaatcctgtctatgatgaactgttggttttcttgtactcctaagaacagacatgcagcagattggaataaatatgatgaccgattgatgaaagcagcagaaaggggggatgtagaaaaagtgacgtcaatccttgctaaaaagggggtcaatccaggcaaactagatgtggaaggcagatctgtcttccatgttgtgacctcaaaggggaatcttgagtgtttgaatgccatccttatacatggagttgatattacaaccagtgacactgcagggagaaatgctcttcacctggctgctaagtatggacatgcattgtgcctacaaaaacttctacagtacaattgtcccactgagcatgcagacctgcagggaagaactgcacttcacgatgccgcaatggcagattgtccttctagcatacagctgctttgtgaccatggggcctctgtgaatgccaaagatgtagangggcggacaccacttgttctggctactcagatgagtaggccaacaatatgtcaactgctgatagatagaggagcggatgttaattccagagacaaacaaaacagaactgccctcatgctaggttgcgaatatggttgcagagatgcagtagaagtcttaattaaaaatggtgctgatataagcttgctggatgcgcttggccatgatagttcttactatgcaagaattggtgacaatctggacattctaaccttgttgaagactgcatcggaaaataccaacaaagggagagaactttggaagaaagggccatctttgcaacagcgaaatttgacacacatgcaagatgaagtaaatgtgaagtcacatcagagggagcatcaaaatattcaggatttggagattgaaaatgaagatttgaaagagaggttgagaaaaattcagcaagaacaaagaatacttttggataaagtcaatggtttacagttacagctgaatgaggaatttaggggtccttgataatccggaaaagcgagaaaaaaaccttagtccccttttggcggttaagaaaaccccccttgaaaaacccttgggggctttggggggcttgaaaaatttttaaaattttttgggaggggatcttttgagaccaggggacttttttcaaaaccccaaaaagaatatgcttttttaaacagggggagttttttttggggacatccaagggtgtcctcccaggttttccccccctttatagaaaagaatttttttaaaaaccctggggattttttttccccccaggttttttcctcgaagtttttt

SEQ ID NO: 325738 - DNA, 604 bp, Homo sapiens
ggtattttataaactctggaagaagtggttatgttgatatttcatagtcaatgaggtagggtttctgcttcctacagtggtaaagtaaaatgagttattgacatgaatgtggccacttccttccttttgaggtaaagcagtagcaaacagtagtctttgaaagttgtttcagttcatttagggctcacttttttttttcttttgagcaataaagttttttcttaaaacacttggctgcttttattaaaatgcttagtgaagtactttattcccagctgatctctctaagtgttgctagtgttgtttctttttgtgggtttgagtagaataatgctctggagaaacaagaatgtcaaaaatgtagttttaatgactgcatgatttagagctaaaatagatacagaatttaacaaaatgaggcagcattcaccctaaaatattttatgcttctgatttcagagtgatcatttaggatcaggaagtcatttcagtaaccgtaagtataaaagtatggattatcattacagttcacctagttcaagtaaagaagaatgtttattcttacttgtttaactatacaggaataactgtacaagatattcct

SEQ ID NO: 325739 - DNA, 458 bp, Homo sapiens
agatatgaactaaagcaataatttgatgttgcttagggaaagtagcattactgtcattagccacacattctttacagaagtttatattgttacgttttgaaattctgcatctggtaggtccaaggtagtttgttgttagaagtagcaggatcgccttaataataataatagttttgtagcatgaagcctgagcattgtccaaagtttggaaatgtgaacgctgatagtcacatctgtccatctttccacatttctaggatgctgacagacagcaccaagaagtaattgcaatttatcggacacaccttcttagtgctgcacaggtaaagaactacttctcctttggaaagaatattgctttagagataataattttttattttcaaataaatttatgtgaaagtaattgatgtttaaagtagctgcaccccctatgcttatttaaaaataattatgtt

SEQ ID NO: 325740 - DNA, 6853 bp, Homo sapiens
  misc_feature (626)..(626): n is a, c, g, or t
cgcaggtggcaggcaggtggggctggtacagcccgcgccgcctctgctgcagccgctgccgtctactccttgcgcgctggcactccgcagcctttaaggttcgcgcgggggccaggcaagagttagccatgaagagcctcaagtcccgcctgaggaggcaggacgtgcccggccccgcgtcgtctggcgccgccgccgccagcgcgcatgcagcagattggaataaatatgatgaccgattgatgaaagcagcagaaaggggggatgtagaaaaagtgacgtcaatccttgctaaaaagggggtcaatccaggcaaactagatgtggaaggcagatctgtcttccatgttgtgacctcaaaggggaatcttgagtgtttgaatgccatccttatacatggagttgatattacaaccagtgacactgcagggagaaatgctcttcacctggctgctaagtatggacatgcattgtgcctacaaaaacttctacagtacaattgtcccactgagcatgcagacctgcagggaagaactgcacttcacgatgccgcaatggcagattgtccttctagcatacagctgctttgtgaccatggggcctctgtgaatgccaaagatgtagangggcggacaccacttgttctggctactcagatgagtaggccaacaatatgtcaactgctgatagatagaggagcggatgttaattccagagacaaacaaaacagaactgccctcatgctaggttgcgaatatggttgcagagatgcagtagaagtcttaattaaaaatggtgctgatataagcttgctggatgcgcttggccatgatagttcttactatgcaagaattggtgacaatctggacattctaaccttgttgaagactgcatcggaaaataccaacaaagggagagaactttggaagaaagggccatctttgcaacaggctttcagcttttctctagtgagaggaacctaagcatttgcaaaccctgaagagaaagtaatcaggtaccttgagcaattctgatcatcatcctgtgtcatttttgtacctctcacctgaatctgaaagctacattttttaaaaattttgctttaagttctgagatacatgtgctgaatgtgccagtttgtacataggtatacatgtgccgtggtggtttgctgcacttatcatgaaagttatattaaagcttgttttccttttcaatccatctgaattaatatgttcatatatgggtcatgtctgttgacacttttccatctggagcaactgttccagccttcttccctgtgcctcatataacctaagtgtgagtagagtgaaaaaaaatgtacactgctatgactgtactagccatctcacacagaatcagagaaaaatgatttctgaaatatatagatatttaaaataaaaagaattattgaatattaatatgggaattgttctctgctcagtgctctaggaaatattgaagtgaatacaaggagttaatattctactaggaacagaaagacacactgctcctaattactgtgtttccgtcatttattgaatacacttactaaatatacgctgtaaataggactttttttttttaatactaaggcacatgtaatctctgttttcaagaagcctacagtatagttgcaaatgtaagactcactcagttgtttgttcacagatatctgctgaacatctacaacatgccaactactgttctaagtgctgggaatattgtagtgtacgaagtctctgcccttatggaactcctagcttagtgagagatgaacaataagcaaaggaatatttagtatcatagcagatgctgtgaagaaaaacaaaacagaattaagggatgaagagggagtgggtggaagtctgtgggagaagcctcacaggctgagggaagggcaggtgcccagcccctgatgagggagcaggttagacatgttcatggggcagcagcagacaagtgtgacaggagcgatgtgcccatcgtggagggagcagaagaagctgctaaagtaacaaagggctagattaagaaggaccttgtatgataaggactattgatatgtacccaccagtgactaccagatggcggaaggcaggacgtgtgcaccccaatcagtggtgcacgtgatcagatcgctgctaagtggagccagaggtgcaagagaggttcttttagtgtgctaataacaaggcttgtcaggaagatggatcttaattaaaggatgcggttgatttagtatgtctgagttaggatatagtggaggcagtgggtgaggatgctgaagtgaaggctggaaatgaaagtggtatgatcaggtgagctgtgagaagatgtcagattccacttgaagaacagtcctttggtagaaggaatgaggctgtaaacatagttagggccaaattgtggatatagaatatcttttaaatgggagttgttcctctagttctagatccaaactcatttgaatgatagtttaaaaacttgatcaagcaaaggtaaacaaataatacaaaacatgagaaaatcatctcgaagaattaaagcagtagttttttttttaacctaattaggaagaaataaatagctttctacattagttattgtggagatttaaagatcattttggtttttttgaaaggggggttattctcttgtttaataattatgttgtttttgttaaagcaaatctctaagctggaataaagtttcaaagcagtaagttacaaaaacagaacatacacccaaccaagttatttaaagacctttttatattgctcaggtcagagggactgtctgtctcttccttaccatacctcttgatattttattttggtggtgctcagagaagtaaataatttctgtattgtctttacaaattaatgtgacttccccttcctcttcctttttttttttttttaagttgagttcttttagtagttggcaatgcagtgctttatagcccaacttttgttatgcatttattacaaattctttttaaaattttgtgactttagttaaaataaatccttaataatattttaaaatttgttattatttagtatttttaaataagttatacttgatttatttaaaacatagtcttaaaggtcctttccattttggagttttaaatagaaacactgccaccttgtgttatgtgcagctaatgttggataaactgaaaatcactaactgggtgtattgccaattgaggaaaatatacttttctgtattcttacacttgctgacccgtgttttcttatgttttaccaaagcgaaatttgacacacatgcaagatgaagtaaatgtgaagtcacatcagagggagcatcaaaatattcaggatttggagattgaaaatgaagatttgaaagagaggttgagaaaaattcagcaagaacaaagaatacttttggataaagtcaatggtttacagttacagctgaatgaggaagttatggttgctgatgatctggaaagcgagagagaaaagctgaagtcccttttggcagctaaagaaaagcaacatgaagaaagcttaaggactattgaggctctgaaaaatagatttaaatattttgagagtgatcatttaggatcaggaagtcatttcagtaaccgaaaagaagatatgcttcttaaacaaggtcagatgtatatggcagactcacagtgtacttccccaggtataccagcccatatgcaaagcagatctatgttaagacctctggaactatctttacccagtcaaacgtcatactctgaaaatgaaattttaaagaaagagttagaagcaatgcgaactttctgtgagtcagcaaaacaagaccgactgaagctccaaaatgaactggcacacaaagtggcagaatgcaaagctttagcattagaatgtgaaagggtcaaggaggattcagatgaacagataaagcaattagaagatgcattaaaagatgtgcagaagaggatgtatgagtcagaaggtaaagttaaacaaatgcagacccattttcttgcccttaaagaacacttaacaagtgaagcagcctcagggaatcacagactaaccgaggaactgaaggatcagttgaaagacttgaaagtaaaatatgaaggtgcttcagcagaagtggggaaattaagaaaccaaatcaaacaaaatgagatgatagtagaagagtttaagagggatgaaggcaagctgatagaagaaaataagcgattacagaaggaacttagtatgtgtgaaatggagcgagagaagaaaggaagaaaggtcacagagatggaaggccaggcaaaagaattgtcagcgaagttggccctttccattccagctgaaaaatttgaaaacatgaagagctcattatcaaatgaagtgaatgagaaagcaaaaaaattagtagaaatggaaagagaacatgaaaaatcacttagtgaaattagacagttaaagagagaacttgagaatgttaaggccaagcttgctcagcacgtcaaaccagaggaacatgaacaggttaagagcagattagaacagaaatcaggagaacttgggaagaagatcactgagttaacattgaaaaatcagacactacaaaaggaaattgaaaaagtttatttggataataagctcctcaaggagcaagcacataacttaacaattgaaatgaaaaatcattatgttcctttaaaagtaagtgaagacatgaaaaagtcacatgatgcaattattgatgatcttaatagaaagcttttagatgtaacacaaaaatatacagaaaagaagttggaaatggagaaattgctactggaaaatgacagcttaagtaaggatgtaagccgcctagaaactgtgtttgtacctcctgagaaacatgaaaaagagataatagctctgaaatccaatattgttgaacttaagaaacagctgtctgaacttaagaaaaaatgtggtgaagaccaggagaaaatacacgctctcacatctgaaaacactaacttgaagaagatgatgagtaatcagtatgtgccagttaaaacccatgaagaggttaaaatgacactgaatgacacgttagccaaaactaacagagaattattagatgtgaagaaaaaatttgaagatataaatcaggaatttgtaaaaataaaagataagaatgaaatattaaaaagaaacctggaaaacactcagaaccaaataaaagctgagtacatcagcctggcagagcacgaggcaaagatgagctcgctaagtcagagcatgagaaaggtgcaggatagtaatgctgaaatcttggccaactacagaaaaggccaagaagagattgtgacactgcatgccgaaattaaagcccagaagaaggagctcgacacaatacaagaatgcattaaggtaaaatatgccccaattgtcagctttgaggagtgcgagagaaaatttaaagcaacagagaaagaactaaaagaccagttatcagagcagacacaaaagtatagtgtcagtgaagaagaagtcaagaaaaacaagcaagagaatgacaagttaaagaaggagatttttacccttcagaaagatttgagagataagacagttctcattgagaagtctcatgaaatggaaagagcattaagcagaaaaacagacgagctaaacaaacagttaaaagacttgtcacagaaatacacggaagtaaagaatgtgaaagagaagctagtagaagaaaatgccaaacagacttctgagatacttgcagtgcaaaatcttttgcaaaaacaacatgttccattggaacaggttgaggctctgaaaaaatctcttaatggcacaattgaaaatctaaaggaagaactgaagagtatgcaaaggtgttacgagaaagagcagcagacagtgaccaaactgcatcaattgttggagaatcaaaagaactcttctgtacccctggcagagcatttgcagattaaagaagcatttgagaaagaagttggaatcataaaagccagcttgagagaaaaggaagaagaaagccaaaacaaaatggaagaagtctccaaacttcagtcggaggttcagaatactaaacaagcattaaaaaaattagagactagagaggtagttgacttgtctaaatataaagcaacaaaaagtgatttggagacacagatttctagcttaaatgaaaaattggccaatctgaatagaaagtatgaggaagtatgtgaggaagttttgcatgccaaaaagaaggaaatatctgcaaaagatgagaaggaattactgcatttcagcattgagcaagaaattaaggatcagaaggaacgatgtgataagtccttaacaacaatcacagagttacaaagaagaatacaagaatctgctaaacaaatagaagcaaaagataataagataactgaactgcttaatgatgtggaaagattaaaacaggcactcaatggcctttcccaactcacctacacaagtgggaaccccaccaagaggcagagccagctgattgacactctgcagcaccaagtgaaatctctggagcaacagctggccgatgctgacagacagcaccaagaagtaattgcaatttatcggacacaccttcttagtgctgcacagggtcacatggatgaagatgttcaggaggctctgctccagatcatacaaatgcggcaggggcttgtgtgctagccgttagcactgactgccagtatctgttttatcttgctggtgctgaacattctttgtgcaactccatggtctttctgggccttactgtgctggtataattaaaataaaatatattttgttct

SEQ ID NO: 325741 - DNA, 4651 bp, Homo sapiens
  misc_feature (829)..(829): n is a, c, g, or t
tgcagtgttgaggcagcaggatgcagagtgctgttcaagttttccagtggggtccctcaaagggacaactttgaaagatagctagcttccaaagaataagaaatagatagagttactgtacctgacttggggctgctcttaatcaagttctgcattgcaaggaagataatattcgagcgttatgaaggcggagaaggatcctgaagacgaagaaaatatcgttagagatccaagctaagtgtagcacagcatgtgagggactgagtcacttgtcaggagtttgtctgagagtttgctttgtgagcttacagagatttgtaacttaatgcaaagtagtttgccattagcaacaagaaactaaatcctgtctatgatgaactgttggttttcttgtactcctaagaacagacatgcagcagattggaataaatatgatgaccgattgatgaaagcagcagaaaggggggatgtagaaaaagtgacgtcaatccttgctaaaaagggggtcaatccaggcaaactagatgtggaaggcagatctgtcttccatgttgtgacctcaaaggggaatcttgagtgtttgaatgccatccttatacatggagttgatattacaaccagtgacactgcagggagaaatgctcttcacctggctgctaagtatggacatgcattgtgcctacaaaaacttctacagtacaattgtcccactgagcatgcagacctgcagggaagaactgcacttcacgatgccgcaatggcagattgtccttctagcatacagctgctttgtgaccatggggcctctgtgaatgccaaagatgtagangggcggacaccacttgttctggctactcagatgagtaggccaacaatatgtcaactgctgatagatagaggagcggatgttaattccagagacaaacaaaacagaactgccctcatgctaggttgcgaatatggttgcagagatgcagtagaagtcttaattaaaaatggtgctgatataagcttgctggatgcgcttggccatgatagttcttactatgcaagaattggtgacaatctggacattctaaccttgttgaagactgcatcggaaaataccaacaaagggagagaactttggaagaaagggccatctttgcaacagcgaaatttgacacacatgcaagatgaagtaaatgtgaagtcacatcagagggagcatcaaaatattcaggatttggagattgaaaatgaagatttgaaagagaggttgagaaaaattcagcaagaacaaagaatacttttggataaagtcaatggtttacagttacagctgaatgaggaagttatggttgctgatgatctggaaagcgagagagaaaagctgaagtcccttttggcagctaaagaaaagcaacatgaagaaagcttaaggactattgaggctctgaaaaatagatttaaatattttgagagtgatcatttaggatcaggaagtcatttcagtaacctgtacttccccaggtataccagcccatatgcaaagcagatctatgttaagacctctggaactatctttacccagtcaaacgtcatactctgaaaatgaaattttaaagaaagagttagaagcaatgcgaactttctgtgagtcagcaaaacaagaccgactgaagctccaaaatgaactggcacacaaagtggcagaatgcaaagctttagcattagaatgtgaaagggtcaaggaggattcagatgaacagataaagcaattagaagatgcattaaaagatgtgcagaagaggatgtatgagtcagaaggtaaagttaaacaaatgcagacccattttcttgcccttaaagaacacttaacaagtgaagcagcctcagggaatcacagactaaccgaggaactgaaggatcagttgaaagacttgaaagtaaaatatgaaggtgcttcagcagaagtggggaaattaagaaaccaaatcaaacaaaatgagatgatagtagaagagtttaagagggatgaaggcaagctgatagaagaaaataagcgattacagaaggaacttagtatgtgtgaaatggagcgagagaagaaaggaagaaaggtcacagagatggaaggccaggcaaaagaattgtcagcgaagttggccctttccattccagctgaaaaatttgaaaacatgaagagctcattatcaaatgaagtgaatgagaaagcaaaaaaattagtagaaatggaaagagaacatgaaaaatcacttagtgaaattagacagttaaagagagaacttgagaatgttaaggccaagcttgctcagcacgtcaaaccagaggaacatgaacaggttaagagcagattagaacagaaatcaggagaacttgggaagaagatcactgagttaacattgaaaaatcagacactacaaaaggaaattgaaaaagtttatttggataataagctcctcaaggagcaagcacataacttaacaattgaaatgaaaaatcattatgttcctttaaaagtaagtgaagacatgaaaaagtcacatgatgcaattattgatgatcttaatagaaagcttttagatgtaacacaaaaatatacagaaaagaagttggaaatggagaaattgctactggaaaatgacagcttaagtaaggatgtaagccgcctagaaactgtgtttgtacctcctgagaaacatgaaaaagagataatagctctgaaatccaatattgttgaacttaagaaacagctgtctgaacttaagaaaaaatgtggtgaagaccaggagaaaatacacgctctcacatctgaaaacactaacttgaagaagatgatgagtaatcagtatgtgccagttaaaacccatgaagaggttaaaatgacactgaatgacacgttagccaaaactaacagagaattattagatgtgaagaaaaaatttgaagatataaatcaggaatttgtaaaaataaaagataagaatgaaatattaaaaagaaacctggaaaacactcagaaccaaataaaagctgagtacatcagcctggcagagcacgaggcaaagatgagctcgctaagtcagagcatgagaaaggtgcaggatagtaatgctgaaatcttggccaactacagaaaaggccaagaagagattgtgacactgcatgccgaaattaaagcccagaagaaggagctcgacacaatacaagaatgcattaaggtaaaatatgccccaattgtcagctttgaggagtgcgagagaaaatttaaagcaacagagaaagaactaaaagaccagttatcagagcagacacaaaagtatagtgtcagtgaagaagaagtcaagaaaaacaagcaagagaatgacaagttaaagaaggagatttttacccttcagaaagatttgagagataagacagttctcattgagaagtctcatgaaatggaaagagcattaagcagaaaaacagacgagctaaacaaacagttaaaagacttgtcacagaaatacacggaagtaaagaatgtgaaagagaagctagtagaagaaaatgccaaacagacttctgagatacttgcagtgcaaaatcttttgcaaaaacaacatgttccattggaacaggttgaggctctgaaaaaatctcttaatggcacaattgaaaatctaaaggaagaactgaagagtatgcaaaggtgttacgagaaagagcagcagacagtgaccaaactgcatcaattgttggagaatcaaaagaactcttctgtacccctggcagagcatttgcagattaaagaagcatttgagaaagaagttggaatcataaaagccagcttgagagaaaaggaagaagaaagccaaaacaaaatggaagaagtctccaaacttcagtcggaggttcagaatactaaacaagcattaaaaaaattagagactagagaggtagttgacttgtctaaatataaagcaacaaaaagtgatttggagacacagatttctagcttaaatgaaaaattggccaatctgaatagaaagtatgaggaagtatgtgaggaagttttgcatgccaaaaagaaggaaatatctgcaaaagatgagaaggaattactgcatttcagcattgagcaagaaattaaggatcagaaggaacgatgtgataagtccttaacaacaatcacagagttacaaagaagaatacaagaatctgctaaacaaatagaagcaaaagataataagataactgaactgcttaatgatgtggaaagattaaaacaggcactcaatggcctttcccaactcacctacacaagtgggaaccccaccaagaggcagagccagctgattgacactctgcagcaccaagtgaaatctctggagcaacagctggccgatgctgacagacagcaccaagaagtaattgcaatttatcggacacaccttcttagtgctgcacagggtcacatggatgaagatgttcaggaggctctgctccagatcatacaaatgcggcaggggcttgtgtgctagccgttagcactgactgccagtatctgttttatcttgctggtgctgaacattctttgtgcaactccatggtctttctgggccttactgtgctggtataattaaaataaaatatattttgttct

SEQ ID NO: 325742 - DNA, 6665 bp, Homo sapiens
  misc_feature (829)..(829): n is a, c, g, or t
tgcagtgttgaggcagcaggatgcagagtgctgttcaagttttccagtggggtccctcaaagggacaactttgaaagatagctagcttccaaagaataagaaatagatagagttactgtacctgacttggggctgctcttaatcaagttctgcattgcaaggaagataatattcgagcgttatgaaggcggagaaggatcctgaagacgaagaaaatatcgttagagatccaagctaagtgtagcacagcatgtgagggactgagtcacttgtcaggagtttgtctgagagtttgctttgtgagcttacagagatttgtaacttaatgcaaagtagtttgccattagcaacaagaaactaaatcctgtctatgatgaactgttggttttcttgtactcctaagaacagacatgcagcagattggaataaatatgatgaccgattgatgaaagcagcagaaaggggggatgtagaaaaagtgacgtcaatccttgctaaaaagggggtcaatccaggcaaactagatgtggaaggcagatctgtcttccatgttgtgacctcaaaggggaatcttgagtgtttgaatgccatccttatacatggagttgatattacaaccagtgacactgcagggagaaatgctcttcacctggctgctaagtatggacatgcattgtgcctacaaaaacttctacagtacaattgtcccactgagcatgcagacctgcagggaagaactgcacttcacgatgccgcaatggcagattgtccttctagcatacagctgctttgtgaccatggggcctctgtgaatgccaaagatgtagangggcggacaccacttgttctggctactcagatgagtaggccaacaatatgtcaactgctgatagatagaggagcggatgttaattccagagacaaacaaaacagaactgccctcatgctaggttgcgaatatggttgcagagatgcagtagaagtcttaattaaaaatggtgctgatataagcttgctggatgcgcttggccatgatagttcttactatgcaagaattggtgacaatctggacattctaaccttgttgaagactgcatcggaaaataccaacaaagggagagaactttggaagaaagggccatctttgcaacaggctttcagcttttctctagtgagaggaacctaagcatttgcaaaccctgaagagaaagtaatcaggtaccttgagcaattctgatcatcatcctgtgtcatttttgtacctctcacctgaatctgaaagctacattttttaaaaattttgctttaagttctgagatacatgtgctgaatgtgccagtttgtacataggtatacatgtgccgtggtggtttgctgcacttatcatgaaagttatattaaagcttgttttccttttcaatccatctgaattaatatgttcatatatgggtcatgtctgttgacacttttccatctggagcaactgttccagccttcttccctgtgcctcatataacctaagtgtgagtagagtgaaaaaaaatgtacactgctatgactgtactagccatctcacacagaatcagagaaaaatgatttctgaaatatatagatatttaaaataaaaagaattattgaatattaatatgggaattgttctctgctcagtgctctaggaaatattgaagtgaatacaaggagttaatattctactaggaacagaaagacacactgctcctaattactgtgtttccgtcatttattgaatacacttactaaatatacgctgtaaataggactttttttttttaatactaaggcacatgtaatctctgttttcaagaagcctacagtatagttgcaaatgtaagactcactcagttgtttgttcacagatatctgctgaacatctacaacatgccaactactgttctaagtgctgggaatattgtagtgtacgaagtctctgcccttatggaactcctagcttagtgagagatgaacaataagcaaaggaatatttagtatcatagcagatgctgtgaagaaaaacaaaacagaattaagggatgaagagggagtgggtggaagtctgtgggagaagcctcacaggctgagggaagggcaggtgcccagcccctgatgagggagcaggttagacatgttcatggggcagcagcagacaagtgtgacaggagcgatgtgcccatcgtggagggagcagaagaagctgctaaagtaacaaagggctagattaagaaggaccttgtatgataaggactattgatatgtacccaccagtgactaccagatggcggaaggcaggacgtgtgcaccccaatcagtggtgcacgtgatcagatcgctgctaagtggagccagaggtgcaagagaggttcttttagtgtgctaataacaaggcttgtcaggaagatggatcttaattaaaggatgcggttgatttagtatgtctgagttaggatatagtggaggcagtgggtgaggatgctgaagtgaaggctggaaatgaaagtggtatgatcaggtgagctgtgagaagatgtcagattccacttgaagaacagtcctttggtagaaggaatgaggctgtaaacatagttagggccaaattgtggatatagaatatcttttaaatgggagttgttcctctagttctagatccaaactcatttgaatgatagtttaaaaacttgatcaagcaaaggtaaacaaataatacaaaacatgagaaaatcatctcgaagaattaaagcagtagttttttttttaacctaattaggaagaaataaatagctttctacattagttattgtggagatttaaagatcattttggtttttttgaaaggggggttattctcttgtttaataattatgttgtttttgttaaagcaaatctctaagctggaataaagtttcaaagcagtaagttacaaaaacagaacatacacccaaccaagttatttaaagacctttttatattgctcaggtcagagggactgtctgtctcttccttaccatacctcttgatattttattttggtggtgctcagagaagtaaataatttctgtattgtctttacaaattaatgtgacttccccttcctcttcctttttttttttttttaagttgagttcttttagtagttggcaatgcagtgctttatagcccaacttttgttatgcatttattacaaattctttttaaaattttgtgactttagttaaaataaatccttaataatattttaaaatttgttattatttagtatttttaaataagttatacttgatttatttaaaacatagtcttaaaggtcctttccattttggagttttaaatagaaacactgccaccttgtgttatgtgcagctaatgttggataaactgaaaatcactaactgggtgtattgccaattgaggaaaatatacttttctgtattcttacacttgctgacccgtgttttcttatgttttaccaaagcgaaatttgacacacatgcaagatgaagtaaatgtgaagtcacatcagagggagcatcaaaatattcaggatttggagattgaaaatgaagatttgaaagagaggttgagaaaaattcagcaagaacaaagaatacttttggataaagtcaatggtttacagttacagctgaatgaggaagttatggttgctgatgatctggaaagcgagagagaaaagctgaagtcccttttggcagctaaagaaaagcaacatgaagaaagcttaaggactattgaggctctgaaaaatagatttaaatattttgagagtgatcatttaggatcaggaagtcatttcagtaaccgtaagtataaaagtatggattatcattacagttcacctagttcaagtaaagaagaatgtttattcttacttgtttaactatacaggaataactgtacaagatattcctgctgctaaacttcatcagcacatggaactaggaagacgttaagatgactattgtaacttctaacatattctgataattactgaagctctgattctccttagctacctgtattttaaaattgtatattgtatgaattaccaaatttgccttgttgattagtagacatagacatttgtcttgtgatatttagggttcatttttttatggaaagaacataaacatagttttctaatttggagaaatcggtcttaatgcaagtaggcattttaaaattacatttatgaattatttttagaccctacataatcttttttattctgcaatgttaaacagtttctctagaaaatctgtttttgtttcctagtgactattaaactattctctcctacaacagtaatatttatgctataaatttaaatcatcatttttgttttgattgattataagatatatgttttattatcatgtagcctagtttaagagtcctcaatatttctgaagttttagtgattctgctgagagagagcatagaaaaaaataagaaaaaaaaaaaccaacctagtatctgttgttcagtagattgtaggtacttctgtttatagaaataataaggggaaaatgggtattttagaatgaggatacttttgtgttgtacctcttgcttctcttttatttgaataataaaggaaataacatcaaattaatgtttagcctactttagtatggatattgaagttaaaatgtcattcatttgcatttatttaggaaaagaagatatgcttcttaaacaaggtcagatgtatatggcagactcacagtgtacttccccaggtataccagcccatatgcaaagcagatctatgttaagacctctggaactatctttacccagtcaaacgtcatactctgaaaatgaaattttaaagaaagagttagaagcaatgcgaactttctgtgagtcagcaaaacaagaccgactgaagctccaaaatgaactggcacacaaagtggcagaatgcaaagctttagcattagaatgtgaaagggtcaaggaggattcagatgaacagataaagcaattagaagatgcattaaaagatgtgcagaagaggatgtatgagtcagaaggtaaagttaaacaaatgcagacccattttcttgcccttaaagaacacttaacaagtgaagcagcctcagggaatcacagactaaccgaggaactgaaggatcagttgaaagacttgaaagtaaaatatgaaggtgcttcagcagaagtggggaaattaagaaaccaaatcaaacaaaatgagatgatagtagaagagtttaagagggatgaaggcaagctgatagaagaaaataagcgattacagaaggaacttagtatgtgtgaaatggagcgagagaagaaaggaagaaaggtcacagagatggaaggccaggcaaaagaattgtcagcgaagttggccctttccattccagctgaaaaatttgaaaacatgaagagctcattatcaaatgaagtgaatgagaaagcaaaaaaattagtagaaatggaaagagaacatgaaaaatcacttagtgaaattagacagttaaagagagaacttgagaatgttaaggccaagcttgctcagcacgtcaaaccagaggaacatgaacaggttaagagcagattagaacagaaatcaggagaacttgggaagaagatcactgagttaacattgaaaaatcagacactacaaaaggaaattgaaaaagtttatttggataataagctcctcaaggagcaagcacataacttaacaattgaaatgaaaaatcattatgttcctttaaaagtaagtgaagacatgaaaaagtcacatgatgcaattattgatgatcttaatagaaagcttttagatgtaacacaaaaatatacagaaaagaagttggaaatggagaaattgctactggaaaatgacagcttaagtaaggatgtaagccgcctagaaactgtgtttgtacctcctgagaaacatgaaaaagagataatagctctgaaatccaatattgttgaacttaagaaacagctgtctgaacttaagaaaaaatgtggtgaagaccaggagaaaatacacgctctcacatctgaaaacactaacttgaagaagatgatgagtaatcagtatgtgccagttaaaacccatgaagaggttaaaatgacactgaatgacacgttagccaaaactaacagagaattattagatgtgaagaaaaaatttgaagatataaatcaggaatttgtaaaaataaaagataagaatgaaatattaaaaagaaacctggaaaacactcagaaccaaataaaagctgagtacatcagcctggcagagcacgaggcaaagatgagctcgctaagtcagagcatgagaaaggtgcaggatagtaatgctgaaatcttggccaactacagaaaaggccaagaagagattgtgacactgcatgccgaaattaaagcccagaagaaggagctcgacacaatacaagaatgcattaaggtaaaatatgccccaattgtcagctttgaggagtgcgagagaaaatttaaagcaacagagaaagaactaaaagaccagttatcagagcagacacaaaagtatagtgtcagtgaagaagaagtcaagaaaaacaaataaaagctgagtacatcagcctggcaga

SEQ ID NO: 325743 - DNA, 453 bp, Homo sapiens
ccttacccttggcaacagggattgtttcatgataggacaaatgttccaagcagggccaaagtccttccctccacgtgagctagccaagaagcctgcctcttgcctctagggtcactgtgtcaaagaatgttcacctgggggacctcccatctgcagcactaaaggacatgctgacacagagcagagggagtgtcctggtttaagtcgtggatccaccttggtggttcctagtaatgaaagccagtccatcacattttagcttaagattattttgagtcagttttatcatgtgcaactgagaggatcatgacaaatacacttgaccttgttctgccattgcccctgtgctttatctatttgtatacattacactatagggtagttgtaattgcctgtttatttgtctgtgtctcccactagaagttcttaattgcaccgtcaacattatgtatc

SEQ ID NO: 325744 - DNA, 572 bp, Homo sapiens
cctctctcctgcccatgagaagagctgcagcgtggcagtctcacccctccctgctttgtaccttgacccccacagcacgagttcatacctaaggactccacagttcgtcatgctgctgtggaaggtgccctttcaaactctcatgcccattccctcaattcagacttcccctcatgcctggaaaatggcagttgtccccacaaacagggaaggacacagaggccctgggagcaagttgcaccttcatggtggcaaagccttgcttcccggttcccccaaggtctccagcagcccttccccctagctgagaacagagggctgacagggaggttccagagctggtatggactctggagtcaggtcagctttcaaatcccagtcctgcccagtcctagtggtgccagtgcgggcaggcggcctcacagctctaagctcatctgtaaaattagcattcaacagcatcagcctcctaagtttgtgaggactggatacaagaacagaagttaagctttcatcaccaagcttggcatacagcacacagaaaactccaaaacttcccagattgccactcc

SEQ ID NO: 325745 - DNA, 105 bp, Homo sapiens
gaagatggtatttgaagggatacatctgttatgtgacccactaaacaaaggagccctgataaaatagccctttcggtctcaagtcacctggttaaggttaatgca

SEQ ID NO: 325746 - DNA, 2646 bp, Homo sapiens
gcaggccagtcccagctggatctccggccagagcccgaggctgctgcgccgggcggctgcagcctccgctccagcgcccgcgccgtgccctgcatcccgggagcccggctggacccgcggcggctcggccggtgttccccctcccctccctggggcagcagccaccatgttctcgtgtgtgaagccctatgaggaccagaactactcagccctgaggcgggactgccggcgcaggaaggtgctcttcgaggaccccctcttccccgccactgacgactcactctactataagggcacgccggggcccgccgtcaggtggaagcgacccaagggcatctgcgaggacccccgcctctttgtggatggcatcagctcccacgacctgcaccagggccaggtgggcaactgctggtttgtggcagcctgctcgtcacttgcctcccgggagtcgctgtggcaaaaggtcatcccagactggaaggagcaggaatgggaccccgaaaagcccaacgcctacgcgggcatcttccacttccacttctggcgcttcggggaatgggtggacgtggtcatcgatgaccggctgcccacagtcaacaaccagctcatctactgccactccaactcccgcaatgagttttggtgcgccctagtggagaaggcctatgccaaactggcaggctgttaccaggccctggatggaggcaacacagcagacgcactggtggacttcacgggtggtgtttctgagcccatcgacctgaccgagggtgactttgccaacgatgagactaagaggaaccagctctttgagcgcatgttaaaggtgcacagccggggcggcctcatcagtgcctccatcaaggcagtgacagcagctgacatggaggcccgcctggcgtgcggcctggtaaagggccacgcatacgccgtcactgatgtgcgcaaggtgcgcctgggccacggcctactggccttcttcaagtcagagaagttggacatgatccgcctgcgcaacccctggggcgagcgggagtggaacgggccctggagtgacacctcggaggagtggcagaaagtgagcaagagtgagcgggagaagatgggtgtgaccgtgcaggacgacggtgagttctggatgaccttcgaggacgtgtgccggtacttcacggacatcatcaagtgccgcgtgatcaacacatcccacctgagcatccacaagacgtgggaggaggcccggctgcatggcgcctggacgctgcatgaggacccgcgacagaaccgcggtggcggctgcatcaaccacaaggacaccttcttccagaacccacagtacatcttcgaagtcaagaagccagaagatgaagtcctgatctgcatccagcagcggccaaagcggtctacgcgccgggagggcaagggtgagaacctggccattggctttgacatctacaaggtggaggagaaccgccagtaccgcatgcacagcctgcagcacaaggccgccagctccatctacatcaactcacgcagcgtcttcctgcgcaccgaccagcccgagggccgctatgtcatcatccccacaaccttcgagccaggccacactggcgagttcctgctccgagtcttcactgatgtgccctccaactgccgggagctgcgcctggatgagcccccacacacctgctggagctccctctgtggctacccccagctggtgacccaggtacatgtcctgggagctgctggcctcaaggactccccaacaggggctaactcttatgtgatcatcaagtgtgagggagacaaagtccgctcggctgtgcagaagggcacctccacaccagagtacaatgtgaaaggcatcttctaccgcaagaagctgagccagcccatcactgtacaggtctggaaccaccgagtgctgaaggatgaatttctgggccaggtgcacctaaaggctgacccggacaacctccaggccctgcataccctccacctccgggaccgaaatagccggcagcccagcaacctgccaggcactgtggccgtgcacattctcagcagcacctccctcatggctgtctgacacctgcccacctacctggctctgaccgttcccaccaccatctgcatgtccccactgggcctgagtctagcctgggagccaggatactggggtccttttcccactcttccactgacttgctgtgtgaccttaggaagtctctgcccctctctcagcctcagtgtcccgagggccccgaagcattccattctcgtggaggagtttccttgctgagatttcaaatagtcctccccacctcaactgtcaccactgctaagggactctatccattgagcacattttcctaaggccctgctgtctgccgaggagcgccaagaagatgtcacttgtttacacacgaactgccacatccccaagctccgttcttgcccctcgtgtcctaggcccaacccagcctcccagacctcactttccccatttgcaggtgggtagggcctccagcccacaccacccagacctaggcttccctcttctcaggatccaccacagggttaggggacaggaagcctgttctattctcaataaatcttacaaaattccaaaaagactttcctgtg

SEQ ID NO: 325747 - DNA, 2252 bp, Homo sapiens
actcactatagggctcgagcggccgcccgggcaggtagccaccatgttctcgtgtgtgaagccctatgaggaccagaactactcagccctgaggcgggactgccggcgcaggaaggtgctcttcgaggaccccctcttccccgccactgacgactcactctactataagggcacgccggggcccgccgtcaggtggaagcgacccaagggcatctgcgaggacccccgcctctttgtggatggcatcagctcccacgacctgcaccagggccaggtgggcaactgctggtttgtggcagcctgctcgtcacttgcctcccgggagtcgctgtggcaaaaggtcatcccagactggaaggagcaggaatgggaccccgaaaagcccaacgcctacgcgggcatcttccacttccacttctggcgcttcggggaatgggtggacgtggtcatcgatgaccggctgcccacagtcaacaaccagctcatctactgccactccaactcccgcaatgagttttggtgcgccctagtggagaaggcctatgccaaactggcaggctgttaccaggccctggatggaggcaacacagcagacgcactggtggacttcacgggtggtgtttctgagcccatcgacctgaccgagggtgactttgccaacgatgagactaagaggaaccagctctttgagcgcatgttaaaggtgcacagccggggcggcctcatcagtgcctccatcaaggcagtgacagcagctgacatggaggcccgcctggcgtgcggcctggtaaagggccacgcatacgccgtcactgatgtgcgcaaggtgcgcctgggccacggcctactggccttcttcaagtcagagaagttggacatgatccgcctgcgcaacccctggggcgagcgggagtggaacgggccctggagtgacacctcggaggagtggcagaaagtgagcaagagtgagcgggagaagatgggtgtgaccgtgcaggacgacggtgagttctggatgaccttcgaggacgtgtgccggtacttcacggacatcatcaagtgccgcgtgatcaacacatcccacctgagcatccacaagacgtgggaggaggcccggctgcatggcgcctggacgctgcatgaggacccgcgacagaaccgcggtggcggctgcatcaaccacaaggacaccttcttccagaacccacagtacatcttcgaagtcaagaagccagaagatgaagtcctgatctgcatccagcagcggccaaagcggtctacgcgccgggagggcaagggtgagaacctggccattggctttgacatctacaaggtggaggagaaccgccagtaccgcatgcacagcctgcagcacaaggccgccagctccatctacatcaactcacgcagcgtcttcctgcgcaccgaccagcccgagggccgctatgtcatcatccccacaaccttcgagccaggccacactggcgagttcctgctccgagtcttcactgatgtgccctccaactgccgggagctgcgcctggatgagcccccacacacctgctggagctccctctgtggctacccccagctggtgacccaggtacatgtcctgggagctgctggcctcaaggactccccaacaggggctaactcttatgtgatcatcaagtgtgagggagacaaagtccgctcggctgtgcagaagggcacctccacaccagagtacaatgtgaaaggcatcttctaccgcaagaagctgagccagcccatcactgtacaggtctggaaccaccgagtgctgaaggatgaatttctgggccaggtgcacctaaaggctgacccggacaacctccaggccctgcataccctccacctccgggaccgaaatagccggcagcccagcaacctgccaggcactgtggccgtgcacattctcagcagcacctccctcatggctgtctgacacctgcccacctacctggctctgaccgttcccaccaccatctgcatgtccccactgggcctgagtctagcctgggagccaggatactggggtccttttcccacttttgttcactgtatgcacccgcgggggcctgggagtccccatttgcaggtgggtagggcctccagcccacaccacccagacctaggcttccctcttctcaggatccaccacagggttaggggacaggaagcctgttctattctcaataaatcttacaaaattccaaaaagactttcctgtg

SEQ ID NO: 325748 - DNA, 4386 bp, Homo sapiens
gcaggccagtcccagctggatctccggccagagcccgaggctgctgcgccgggcggctgcagcctccgctccagcgcccgcgccgtgccctgcatcccgggagcccggctggacccgcggcggctcggccggtgttccccctcccctccctggggcagcagccaccatgttctcgtgtgtgaagccctatgaggaccagaactactcagccctgaggcgggactgccggcgcaggaaggtgctcttcgaggaccccctcttccccgccactgacgactcactctactataagggcacgccggggcccgccgtcaggtggaagcgacccaagggcatctgcgaggacccccgcctctttgtggatggcatcagctcccacgacctgcaccagggccaggtgggcaactgctggtttgtggcagcctgctcgtcacttgcctcccgggagtcgctgtggcaaaaggtcatcccagactggaaggagcaggaatgggaccccgaaaagcccaacgcctacgcgggcatcttccacttccacttctggcgcttcggggaatgggtggacgtggtcatcgatgaccggctgcccacagtcaacaaccagctcatctactgccactccaactcccgcaatgagttttggtgcgccctagtggagaaggcctatgccaaactggcaggctgttaccaggccctggatggaggcaacacagcagacgcactggtggacttcacgggtggtgtttctgagcccatcgacctgaccgagggtgactttgccaacgatgagactaagaggaaccagctctttgagcgcatgttaaaggtgcacagccggggcggcctcatcagtgcctccatcaaggcagtgacagcagctgacatggaggcccgcctggcgtgcggcctggtaaagggccacgcatacgccgtcactgatgtgcgcaaggtgcgcctgggccacggcctactggccttcttcaagtcagagaagttggacatgatccgcctgcgcaacccctggggcgagcgggagtggaacgggccctggagtgacacctcggaggagtggcagaaagtgagcaagagtgagcgggagaagatgggtgtgaccgtgcaggacgacggtgagttctggatgaccttcgaggacgtgtgccggtacttcacggacatcatcaagtgccgcgtgatcaacacatcccacctgagcatccacaagacgtgggaggaggcccggctgcatggcgcctggacgctgcatgaggacccgcgacagaaccgcggtggcggctgcatcaaccacaaggacaccttcttccagaacccacagtacatcttcgaagtcaagaagccagaagatgaagtcctgatctgcatccagcagcggccaaagcggtctacgcgccgggagggcaagggtgagaacctggccattggctttgacatctacaaggtggaggagaaccgccagtaccgcatgcacagcctgcagcacaaggccgccagctccatctacatcaactcacgcagcgtcttcctgcgcaccgaccagcccgagggccgctatgtcatcatccccacaaccttcgagccaggccacactggcgagttcctgctccgagtcttcactgatgtgccctccaactgccgggagctgcgcctggatgagcccccacacacctgctggagctccctctgtggctacccccagctggtgacccaggtacatgtcctgggagctgctggcctcaaggactccccaacaggggctaactcttatgtgatcatcaagtgtgagggagacaaagtccgctcggctgtgcagaagggcacctccacaccagagtacaatgtgaaaggcatcttctaccgcaagaagctgagccagcccatcactgtacaggtctggaaccaccgagtgctgaaggatgaatttctgggccaggtgcacctaaaggctgacccggacaacctccaggccctgcataccctccacctccgggaccgaaatagccggcagcccagcaacctgccaggcactgtggccgtgcacattctcagcagcacctccctcatggctgtctgacacctgcccacctacctggctctgaccgttcccaccaccatctgcatgtccccactgggcctgagtctagcctgggagccaggatactggggtccttttcccactcttccactgacttgctgtgtgaccttaggaagtctctgcccctctctcagcctcagtgtcccgagggccccgaagcattccattctcgtggaggagtttccttgctgagatttcaaatagtcctccccacctcaactgtcaccactgctaagggactctatccattgagcacattttcctaaggccctgctgtctgccgaggagcgccaagaagatgtcacttgtttacacacgaactgccacatccccaagctccgttcttgcccctcgtgtcctaggcccaacccagcctcccagacctcactttccccatcagcaatacctggtgttctcccaccttgaaaggactcttggctcctgccgggttcctgctcaggctggaattgggaaaatatgcaggtgacatttgttcattctctaatcccatcctctcacccatccatttcctcactcagtggagatttgccaaatgaataaacgacacctttgaggccccaggtgaagcggggccctactccggcctctgccttgggcctcgcctctgtcctcaggtcctctcagaggcagatacctaggggagctgctgctgcctgctcattctagcttccgattccattcccagcccctgcgttaaggtccctggagaggtggcgtcagtgggggtgaggaagggcatcttcctgactcctctgcccagtgctggaaggagcatgcctgggttagtgggccaggggccaggcagctgggggcctttggggaccagaaggggagatgtgctcccagagcctctctgctgtaagaccccagcttttcctggaagatgggactctggggtgtgtggtgctcaccagagtcaggccacccactgggctcggcaggagatagggagccccatcacctgaccacagccccccaccaacattcccccaaaatgcagcctaggaggccgcagtgctcttcttcctgcccagaccaaaatgttccttttagtcctcaatgttttatattctttttgttttgaaaatctcaattttaatcaggggttttaaaagaaaattgaaagcctgaacctccatttttcttcttggctccagttttgctggtcctctggagaactcttcgtgagcactggtgccgtgacccacttgggatctctgctgtgcccttctcgggcttccagaccaggtgtagcaaatgaaaaagtgcagttaattcaagaacaggaatccctgtgtccttgctgggatttccttttgggaacctgactttccgactccagatcctgctgtctggatcagtgttctggctggaggtgctggattctctgattttgcctcctcactctgtgtctggctttgctcctgggtcttggccctgggccatatgaggggccaggaaatgaacgacaaggaggataagagtgttctttcttgaaagccgggacttcccctcaagaacctgggcctggggccgggactctgcatgactgggagcaagtcacttaaacctcctgtgcctcgatttcccccttctacaaagtggggccaatgattcttgtgtgtcagcactgttactaccgagtgctgagtaagggcaaaataatacccctttctctatgtatctctgtatgcacacgcactatatatatatatatatatatatatacattcatgtaatcaccacttctcgatgtctatttcaaatcaaggctcctgagtagggggtgaagtgagccagcttgcacctcaggctaacacataggactttgctcagccatgtcccctgggatacaggggcacaccaggaccaagtggcagacctgtgggcttcagcctcggggccagggcatgcctgccaccccctgacaaaaacaggttccacagtgctacccttgcttcctgccccttgaggtgggccaggctggctcctggctatgcagggatctctggtccccaggagaccttgggggccaggcaggtaaggatcaggggtgataggggagagcaattactttgttcactgtatgcacccgcgggggcctgggagtccccatttgcaggtgggtagggcctccagcccacaccacccagacctaggcttccctcttctcaggatccaccacagggttaggggacaggaagcctgttctattctcaataaatcttacaaaattccaaaaagactttcctgtg

SEQ ID NO: 325749 - DNA, 4263 bp, Homo sapiens
actcactatagggctcgagcggccgcccgggcaggtagccaccatgttctcgtgtgtgaagccctatgaggaccagaactactcagccctgaggcgggactgccggcgcaggaaggtgctcttcgaggaccccctcttccccgccactgacgactcactctactataagggcacgccggggcccgccgtcaggtggaagcgacccaagggcatctgcgaggacccccgcctctttgtggatggcatcagctcccacgacctgcaccagggccaggtgggcaactgctggtttgtggcagcctgctcgtcacttgcctcccgggagtcgctgtggcaaaaggtcatcccagactggaaggagcaggaatgggaccccgaaaagcccaacgcctacgcgggcatcttccacttccacttctggcgcttcggggaatgggtggacgtggtcatcgatgaccggctgcccacagtcaacaaccagctcatctactgccactccaactcccgcaatgagttttggtgcgccctagtggagaaggcctatgccaaactggcaggctgttaccaggccctggatggaggcaacacagcagacgcactggtggacttcacgggtggtgtttctgagcccatcgacctgaccgagggtgactttgccaacgatgagactaagaggaaccagctctttgagcgcatgttaaaggtgcacagccggggcggcctcatcagtgcctccatcaaggcagtgacagcagctgacatggaggcccgcctggcgtgcggcctggtaaagggccacgcatacgccgtcactgatgtgcgcaaggtgcgcctgggccacggcctactggccttcttcaagtcagagaagttggacatgatccgcctgcgcaacccctggggcgagcgggagtggaacgggccctggagtgacacctcggaggagtggcagaaagtgagcaagagtgagcgggagaagatgggtgtgaccgtgcaggacgacggtgagttctggatgaccttcgaggacgtgtgccggtacttcacggacatcatcaagtgccgcgtgatcaacacatcccacctgagcatccacaagacgtgggaggaggcccggctgcatggcgcctggacgctgcatgaggacccgcgacagaaccgcggtggcggctgcatcaaccacaaggacaccttcttccagaacccacagtacatcttcgaagtcaagaagccagaagatgaagtcctgatctgcatccagcagcggccaaagcggtctacgcgccgggagggcaagggtgagaacctggccattggctttgacatctacaaggtggaggagaaccgccagtaccgcatgcacagcctgcagcacaaggccgccagctccatctacatcaactcacgcagcgtcttcctgcgcaccgaccagcccgagggccgctatgtcatcatccccacaaccttcgagccaggccacactggcgagttcctgctccgagtcttcactgatgtgccctccaactgccgggagctgcgcctggatgagcccccacacacctgctggagctccctctgtggctacccccagctggtgacccaggtacatgtcctgggagctgctggcctcaaggactccccaacaggggctaactcttatgtgatcatcaagtgtgagggagacaaagtccgctcggctgtgcagaagggcacctccacaccagagtacaatgtgaaaggcatcttctaccgcaagaagctgagccagcccatcactgtacaggtctggaaccaccgagtgctgaaggatgaatttctgggccaggtgcacctaaaggctgacccggacaacctccaggccctgcataccctccacctccgggaccgaaatagccggcagcccagcaacctgccaggcactgtggccgtgcacattctcagcagcacctccctcatggctgtctgacacctgcccacctacctggctctgaccgttcccaccaccatctgcatgtccccactgggcctgagtctagcctgggagccaggatactggggtccttttcccactcttccactgacttgctgtgtgaccttaggaagtctctgcccctctctcagcctcagtgtcccgagggccccgaagcattccattctcgtggaggagtttccttgctgagatttcaaatagtcctccccacctcaactgtcaccactgctaagggactctatccattgagcacattttcctaaggccctgctgtctgccgaggagcgccaagaagatgtcacttgtttacacacgaactgccacatccccaagctccgttcttgcccctcgtgtcctaggcccaacccagcctcccagacctcactttccccatcagcaatacctggtgttctcccaccttgaaaggactcttggctcctgccgggttcctgctcaggctggaattgggaaaatatgcaggtgacatttgttcattctctaatcccatcctctcacccatccatttcctcactcagtggagatttgccaaatgaataaacgacacctttgaggccccaggtgaagcggggccctactccggcctctgccttgggcctcgcctctgtcctcaggtcctctcagaggcagatacctaggggagctgctgctgcctgctcattctagcttccgattccattcccagcccctgcgttaaggtccctggagaggtggcgtcagtgggggtgaggaagggcatcttcctgactcctctgcccagtgctggaaggagcatgcctgggttagtgggccaggggccaggcagctgggggcctttggggaccagaaggggagatgtgctcccagagcctctctgctgtaagaccccagcttttcctggaagatgggactctggggtgtgtggtgctcaccagagtcaggccacccactgggctcggcaggagatagggagccccatcacctgaccacagccccccaccaacattcccccaaaatgcagcctaggaggccgcagtgctcttcttcctgcccagaccaaaatgttccttttagtcctcaatgttttatattctttttgttttgaaaatctcaattttaatcaggggttttaaaagaaaattgaaagcctgaacctccatttttcttcttggctccagttttgctggtcctctggagaactcttcgtgagcactggtgccgtgacccacttgggatctctgctgtgcccttctcgggcttccagaccaggtgtagcaaatgaaaaagtgcagttaattcaagaacaggaatccctgtgtccttgctgggatttccttttgggaacctgactttccgactccagatcctgctgtctggatcagtgttctggctggaggtgctggattctctgattttgcctcctcactctgtgtctggctttgctcctgggtcttggccctgggccatatgaggggccaggaaatgaacgacaaggaggataagagtgttctttcttgaaagccgggacttcccctcaagaacctgggcctggggccgggactctgcatgactgggagcaagtcacttaaacctcctgtgcctcgatttcccccttctacaaagtggggccaatgattcttgtgtgtcagcactgttactaccgagtgctgagtaagggcaaaataatacccctttctctatgtatctctgtatgcacacgcactatatatatatatatatatatatatacattcatgtaatcaccacttctcgatgtctatttcaaatcaaggctcctgagtagggggtgaagtgagccagcttgcacctcaggctaacacataggactttgctcagccatgtcccctgggatacaggggcacaccaggaccaagtggcagacctgtgggcttcagcctcggggccagggcatgcctgccaccccctgacaaaaacaggttccacagtgctacccttgcttcctgccccttgaggtgggccaggctggctcctggctatgcagggatctctggtccccaggagaccttgggggccaggcaggtaaggatcaggggtgataggggagagcaattactttgttcactgtatgcacccgcgggggcctgggagtccccatttgcaggtgggtagggcctccagcccacaccacccagacctaggcttccctcttctcaggatccaccacagggttaggggacaggaagcctgttctattctcaataaatcttacaaaattccaaaaagactttcctgtg

SEQ ID NO: 325750 - DNA, 3964 bp, Homo sapiens
gcaggccagtcccagctggatctccggccagagcccgaggctgctgcgccgggcggctgcagcctccgctccagcgcccgcgccgtgccctgcatcccgggagcccggctggacccgcggcggctcggccggtgttccccctcccctccctggggcagcagccaccatgttctcgtgtgtgaagccctatgaggaccagaactactcagccctgaggcgggactgccggcgcaggaaggtgctcttcgaggaccccctcttccccgccactgacgactcactctactataagggcacgccggggcccgccgtcaggtggaagcgacccaagggcatctgcgaggacccccgcctctttgtggatggcatcagctcccacgacctgcaccagggccaggtgggcaactgctggtttgtggcagcctgctcgtcacttgcctcccgggagtcgctgtggcaaaaggtcatcccagactggaaggagcaggaatgggaccccgaaaagcccaacgcctacgcgggcatcttccacttccacttctggcgcttcggggaatgggtggacgtggtcatcgatgaccggctgcccacagtcaacaaccagctcatctactgccactccaactcccgcaatgagttttggtgcgccctagtggagaaggcctatgccaaactggcaggctgttaccaggccctggatggaggcaacacagcagacgcactggtggacttcacgggtggtgtttctgagcccatcgacctgaccgagggtgactttgccaacgatgagactaagaggaaccagctctttgagcgcatgttaaaggtgcacagccggggcggcctcatcagtgcctccatcaaggcagtgacagcagctgacatggaggcccgcctggcgtgcggcctggtaaagggccacgcatacgccgtcactgatgtgcgcaaggtgcgcctgggccacggcctactggccttcttcaagtcagagaagttggacatgatccgcctgcgcaacccctggggcgagcgggagtggaacgggccctggagtgacacctcggaggagtggcagaaagtgagcaagagtgagcgggagaagatgggtgtgaccgtgcaggacgacggtgagttctggatgaccttcgaggacgtgtgccggtacttcacggacatcatcaagtgccgcgtgatcaacacatcccacctgagcatccacaagacgtgggaggaggcccggctgcatggcgcctggacgctgcatgaggacccgcgacagaaccgcggtggcggctgcatcaaccacaaggacaccttcttccagaacccacagtacatcttcgaagtcaagaagccagaagatgaagtcctgatctgcatccagcagcggccaaagcggtctacgcgccgggagggcaagggtgagaacctggccattggctttgacatctacaaggtggaggagaaccgccagtaccgcatgcacagcctgcagcacaaggccgccagctccatctacatcaactcacgcagcgtcttcctgcgcaccgaccagcccgagggccgctatgtcatcatccccacaaccttcgagccaggccacactggcgagttcctgctccgagtcttcactgatgtgccctccaactgccgggagctgcgcctggatgagcccccacacacctgctggagctccctctgtggctacccccagctggtgacccaggtacatgtcctgggagctgctggcctcaaggactccccaacaggggctaactcttatgtgatcatcaagtgtgagggagacaaagtccgctcggctgtgcagaagggcacctccacaccagagtacaatgtgaaaggcatcttctaccgcaagaagctgagccagcccatcactgtacaggtctggaaccaccgagtgctgaaggatgaatttctgggccaggtgcacctaaaggctgacccggacaacctccaggccctgcataccctccacctccgggaccgaaatagccggcagcccagcaacctgccaggcactgtggccgtgcacattctcagcagcacctccctcatggctgtctgacacctgcccacctacctggctctgaccgttcccaccaccatctgcatgtccccactgggcctgagtctagcctgggagccaggatactggggtccttttcccactcttccactgacttgctgtgtgaccttaggaagtctctgcccctctctcagcctcagtgtcccgagggccccgaagcattccattctcgtggaggagtttccttgctgagatttcaaatagtcctccccacctcaactgtcaccactgctaagggactctatccattgagcacattttcctaaggccctgctgtctgccgaggagcgccaagaagatgtcacttgtttacacacgaactgccacatccccaagctccgttcttgcccctcgtgtcctaggcccaacccagcctcccagacctcactttccccatcagcaatacctggtgttctcccaccttgaaaggactcttggctcctgccgggttcctgctcaggctggaattgggaaaatatgcaggtgacatttgttcattctctaatcccatcctctcacccatccatttcctcactcagtggagatttgccaaatgaataaacgacacctttgaggccccaggtgaagcggggccctactccggcctctgccttgggcctcgcctctgtcctcaggtcctctcagaggcagatacctaggggagctgctgctgcctgctcattctagcttccgattccattcccagcccctgcgttaaggtccctggagaggtggcgtcagtgggggtgaggaagggcatcttcctgactcctctgcccagtgctggaaggagcatgcctgggttagtgggccaggggccaggcagctgggggcctttggggaccagaaggggagatgtgctcccagagcctctctgctgtaagaccccagcttttcctggaagatgggactctggggtgtgtggtgctcaccagagtcaggccacccactgggctcggcaggagatagggagccccatcacctgaccacagccccccaccaacattcccccaaaatgcagcctaggaggccgcagtgctcttcttcctgcccagaccaaaatgttccttttagtcctcaatgttttatattctttttgttttgaaaatctcaattttaatcaggggttttaaaagaaaattgaaagcctgaacctccatttttcttcttggctccagttttgctggtcctctggagaactcttcgtgagcactggtgccgtgacccacttgggatctctgctgtgcccttctcgggcttccagaccaggtgtagcaaatgaaaaagtgcagttaattcaagaacaggaatccctgtgtccttgctgggatttccttttgggaacctgactttccgactccagatcctgctgtctggatcagtgttctggctggaggtgctggattctctgattttgcctcctcactctgtgtctggctttgctcctgggtcttggccctgggccatatgaggggccaggaaatgaacgacaaggaggataagagtgttctttcttgaaagccgggacttcccctcaagaacctgggcctggggccgggactctgcatgactgggagcaagtcacttaaacctcctgtgcctcgatttcccccttctacaaagtggggccaatgattcttgtgtgtcagcactgttactaccgagtgctgagtaagggcaaaataatacccctttctctatgtatctctgtatgcacacgcactatatatatatatatatatatatatacattcatgtaatcaccacttctcaggatccaccacagggttaggggacaggaagcctgttctattctcaataaatcttacaaaattccaaaaagactttcctgtg

SEQ ID NO: 325751 - DNA, 3308 bp, Homo sapiens
gcaggccagtcccagctggatctccggccagagcccgaggctgctgcgccgggcggctgcagcctccgctccagcgcccgcgccgtgccctgcatcccgggagcccggctggacccgcggcggctcggccggtgttccccctcccctccctggggcagcagccaccatgttctcgtgtgtgaagccctatgaggaccagaactactcagccctgaggcgggactgccggcgcaggaaggtgctcttcgaggaccccctcttccccgccactgacgactcactctactataagggcacgccggggcccgccgtcaggtggaagcgacccaagggcatctgcgaggacccccgcctctttgtggatggcatcagctcccacgacctgcaccagggccaggtgggcaactgctggtttgtggcagcctgctcgtcacttgcctcccgggagtcgctgtggcaaaaggtcatcccagactggaaggagcaggaatgggaccccgaaaagcccaacgcctacgcgggcatcttccacttccacttctggcgcttcggggaatgggtggacgtggtcatcgatgaccggctgcccacagtcaacaaccagctcatctactgccactccaactcccgcaatgagttttggtgcgccctagtggagaaggcctatgccaaactggcaggctgttaccaggccctggatggaggcaacacagcagacgcactggtggacttcacgggtggtgtttctgagcccatcgacctgaccgagggtgactttgccaacgatgagactaagaggaaccagctctttgagcgcatgttaaaggtgcacagccggggcggcctcatcagtgcctccatcaaggcagtgacagcagctgacatggaggcccgcctggcgtgcggcctggtaaagggccacgcatacgccgtcactgatgtgcgcaaggtgcgcctgggccacggcctactggccttcttcaagtcagagaagttggacatgatccgcctgcgcaacccctggggcgagcgggagtggaacgggccctggagtgacacctcggaggagtggcagaaagtgagcaagagtgagcgggagaagatgggtgtgaccgtgcaggacgacggtgagttctggatgaccttcgaggacgtgtgccggtacttcacggacatcatcaagtgccgcgtgatcaacacatcccacctgagcatccacaagacgtgggaggaggcccggctgcatggcgcctggacgctgcatgaggacccgcgacagaaccgcggtggcggctgcatcaaccacaaggacaccttcttccagaacccacagtacatcttcgaagtcaagaagccagaagatgaagtcctgatctgcatccagcagcggccaaagcggtctacgcgccgggagggcaagggtgagaacctggccattggctttgacatctacaaggtggaggagaaccgccagtaccgcatgcacagcctgcagcacaaggccgccagctccatctacatcaactcacgcagcgtcttcctgcgcaccgaccagcccgagggccgctatgtcatcatccccacaaccttcgagccaggccacactggcgagttcctgctccgagtcttcactgatgtgccctccaactgccgggagctgcgcctggatgagcccccacacacctgctggagctccctctgtggctacccccagctggtgacccaggtacatgtcctgggagctgctggcctcaaggactccccaacaggggctaactcttatgtgatcatcaagtgtgagggagacaaagtccgctcggctgtgcagaagggcacctccacaccagagtacaatgtgaaaggcatcttctaccgcaagaagctgagccagcccatcactgtacaggtctggaaccaccgagtgctgaaggatgaatttctgggccaggtgcacctaaaggctgacccggacaacctccaggccctgcataccctccacctccgggaccgaaatagccggcagcccagcaacctgccaggcactgtggccgtgcacattctcagcagcacctccctcatggctgtctgacacctgcccacctacctggctctgaccgttcccaccaccatctgcatgtccccactgggcctgagtctagcctgggagccaggatactggggtccttttcccactcttccactgacttgctgtgtgaccttaggaagtctctgcccctctctcagcctcagtgtcccgagggccccgaagcattccattctcgtggaggagtttccttgctgagatttcaaatagtcctccccacctcaactgtcaccactgctaagggactctatccattgagcacattttcctaaggccctgctgtctgccgaggagcgccaagaagatgtcacttgtttacacacgaactgccacatccccaagctccgttcttgcccctcgtgtcctaggcccaacccagcctcccagacctcactttccccatcagcaatacctggtgttctcccaccttgaaaggactcttggctcctgccgggttcctgctcaggctggaattgggaaaatatgcaggtgacatttgttcattctctaatcccatcctctcacccatccatttcctcactcagtggagatttgccaaatgaataaacgacacctttgaggccccaggtgaagcggggccctactccggcctctgccttgggcctcgcctctgtcctcaggtcctctcagaggcagatacctaggggagctgctgctgcctgctcattctagcttccgattccattcccagcccctgcgttaaggtccctggagaggtggcgtcagtgggggtgaggaagggcatcttcctgactcctctgcccagtgctggaaggagcatgcctgggttagtgggccaggggccaggcagctgggggcctttggggaccagaaggggagatgtgctcccagagcctctctgctgtaagaccccagcttttcctggaagatgggactctggggtgtgtggtgctcaccagagtcaggccacccactgggctcggcaggagatagggagccccatcacctgaccacagccccccaccaacattcccccaaaatgcagcctaggaggccgcagtgctcttcttcctgcccagaccaaaatgttccttttagtcctcaatgttttatattctttttgttttgaaaatctcaattttaatcaggggttttaaaagaaaattgaaagcctgttctattctcaataaatcttacaaaattccaaaaagactttcctgtg

SEQ ID NO: 325752 - DNA, 3867 bp, Homo sapiens
actcactatagggctcgagcggccgcccgggcaggtagccaccatgttctcgtgtgtgaagccctatgaggaccagaactactcagccctgaggcgggactgccggcgcaggaaggtgctcttcgaggaccccctcttccccgccactgacgactcactctactataagggcacgccggggcccgccgtcaggtggaagcgacccaagggcatctgcgaggacccccgcctctttgtggatggcatcagctcccacgacctgcaccagggccaggtgggcaactgctggtttgtggcagcctgctcgtcacttgcctcccgggagtcgctgtggcaaaaggtcatcccagactggaaggagcaggaatgggaccccgaaaagcccaacgcctacgcgggcatcttccacttccacttctggcgcttcggggaatgggtggacgtggtcatcgatgaccggctgcccacagtcaacaaccagctcatctactgccactccaactcccgcaatgagttttggtgcgccctagtggagaaggcctatgccaaactggcaggctgttaccaggccctggatggaggcaacacagcagacgcactggtggacttcacgggtggtgtttctgagcccatcgacctgaccgagggtgactttgccaacgatgagactaagaggaaccagctctttgagcgcatgttaaaggtgcacagccggggcggcctcatcagtgcctccatcaaggcagtgacagcagctgacatggaggcccgcctggcgtgcggcctggtaaagggccacgcatacgccgtcactgatgtgcgcaaggtgcgcctgggccacggcctactggccttcttcaagtcagagaagttggacatgatccgcctgcgcaacccctggggcgagcgggagtggaacgggccctggagtgacacctcggaggagtggcagaaagtgagcaagagtgagcgggagaagatgggtgtgaccgtgcaggacgacggtgagttctggatgaccttcgaggacgtgtgccggtacttcacggacatcatcaagtgccgcgtgatcaacacatcccacctgagcatccacaagacgtgggaggaggcccggctgcatggcgcctggacgctgcatgaggacccgcgacagaaccgcggtggcggctgcatcaaccacaaggacaccttcttccagaacccacagtacatcttcgaagtcaagaagccagaagatgaagtcctgatctgcatccagcagcggccaaagcggtctacgcgccgggagggcaagggtgagaacctggccattggctttgacatctacaaggtggaggagaaccgccagtaccgcatgcacagcctgcagcacaaggccgccagctccatctacatcaactcacgcagcgtcttcctgcgcaccgaccagcccgagggccgctatgtcatcatccccacaaccttcgagccaggccacactggcgagttcctgctccgagtcttcactgatgtgccctccaactgccgggagctgcgcctggatgagcccccacacacctgctggagctccctctgtggctacccccagctggtgacccaggtacatgtcctgggagctgctggcctcaaggactccccaacaggggctaactcttatgtgatcatcaagtgtgagggagacaaagtccgctcggctgtgcagaagggcacctccacaccagagtacaatgtgaaaggcatcttctaccgcaagaagctgagccagcccatcactgtacaggtctggaaccaccgagtgctgaaggatgaatttctgggccaggtgcacctaaaggctgacccggacaacctccaggccctgcataccctccacctccgggaccgaaatagccggcagcccagcaacctgccaggcactgtggccgtgcacattctcagcagcacctccctcatggctgtctgacacctgcccacctacctggctctgaccgttcccaccaccatctgcatgtccccactgggcctgagtctagcctgggagccaggatactggggtccttttcccactcttccactgacttgctgtgtgaccttaggaagtctctgcccctctctcagcctcatcagtggagatttgccaaatgaataaacgacacctttgaggccccaggtgaagcggggccctactccggcctctgccttgggcctcgcctctgtcctcaggtcctctcagaggcagatacctaggggagctgctgctgcctgctcattctagcttccgattccattcccagcccctgcgttaaggtccctggagaggtggcgtcagtgggggtgaggaagggcatcttcctgactcctctgcccagtgctggaaggagcatgcctgggttagtgggccaggggccaggcagctgggggcctttggggaccagaaggggagatgtgctcccagagcctctctgctgtaagaccccagcttttcctggaagatgggactctggggtgtgtggtgctcaccagagtcaggccacccactgggctcggcaggagatagggagccccatcacctgaccacagccccccaccaacattcccccaaaatgcagcctaggaggccgcagtgctcttcttcctgcccagaccaaaatgttccttttagtcctcaatgttttatattctttttgttttgaaaatctcaattttaatcaggggttttaaaagaaaattgaaagcctgaacctccatttttcttcttggctccagttttgctggtcctctggagaactcttcgtgagcactggtgccgtgacccacttgggatctctgctgtgcccttctcgggcttccagaccaggtgtagcaaatgaaaaagtgcagttaattcaagaacaggaatccctgtgtccttgctgggatttccttttgggaacctgactttccgactccagatcctgctgtctggatcagtgttctggctggaggtgctggattctctgattttgcctcctcactctgtgtctggctttgctcctgggtcttggccctgggccatatgaggggccaggaaatgaacgacaaggaggataagagtgttctttcttgaaagccgggacttcccctcaagaacctgggcctggggccgggactctgcatgactgggagcaagtcacttaaacctcctgtgcctcgatttcccccttctacaaagtggggccaatgattcttgtgtgtcagcactgttactaccgagtgctgagtaagggcaaaataatacccctttctctatgtatctctgtatgcacacgcactatatatatatatatatatatatatacattcatgtaatcaccacttctcgatgtctatttcaaatcaaggctcctgagtagggggtgaagtgagccagcttgcacctcaggctaacacataggactttgctcagccatgtcccctgggatacaggggcacaccaggaccaagtggcagacctgtgggcttcagcctcggggccagggcatgcctgccaccccctgacaaaaacaggttccacagtgctacccttgcttcctgccccttgaggtgggccaggctggctcctggctatgcagggatctctggtccccaggagaccttgggggccaggcaggtaaggatcaggggtgataggggagagcaattactttgttcactgtatgcacccgcgggggcctgggagtccccatttgcaggtgggtagggcctccagcccacaccacccagacctaggcttccctcttctcaggatccaccacagggttaggggacaggaagcctgttctattctcaataaatcttacaaaattccaaaaagactttcctgtg

SEQ ID NO: 325753 - DNA, 2140 bp, Homo sapiens
catgagggcttggacaaggacgggtgggcttcttggaggagttggcactggggctgggccttgaaggatctgggggaggatgacactaggaacgaagaagggactctatccattgagcacattttcctaaggccctgctgtctgccgaggagcgccaagaagatgtcacttgtttacacacgaactgccacatccccaagctccgttcttgcccctcgtgtcctaggcccaacccagcctcccagacctcactttccccatcagcaatacctggtgttctcccaccttgaaaggactcttggctcctgccgggttcctgctcaggctggaattgggaaaatatgcaggtgacatttgttcattctctaatcccatcctctcacccatccatttcctcactcagtggagatttgccaaatgaataaacgacacctttgaggccccaggtgaagcggggccctactccggcctctgccttgggcctcgcctctgtcctcaggtcctctcagaggcagatacctaggggagctgctgctgcctgctcattctagcttccgattccattcccagcccctgcgttaaggtccctggagaggtggcgtcagtgggggtgaggaagggcatcttcctgactcctctgcccagtgctggaaggagcatgcctgggttagtgggccaggggccaggcagctgggggcctttggggaccagaaggggagatgtgctcccagagcctctctgctgtaagaccccagcttttcctggaagatgggactctggggtgtgtggtgctcaccagagtcaggccacccactgggctcggcaggagatagggagccccatcacctgaccacagccccccaccaacattcccccaaaatgcagcctaggaggccgcagtgctcttcttcctgcccagaccaaaatgttccttttagtcctcaatgttttatattctttttgttttgaaaatctcaattttaatcaggggttttaaaagaaaattgaaagcctgaacctccatttttcttcttggctccagttttgctggtcctctggagaactcttcgtgagcactggtgccgtgacccacttgggatctctgctgtgcccttctcgggcttccagaccaggtgtagcaaatgaaaaagtgcagttaattcaagaacaggaatccctgtgtccttgctgggatttccttttgggaacctgactttccgactccagatcctgctgtctggatcagtgttctggctggaggtgctggattctctgattttgcctcctcactctgtgtctggctttgctcctgggtcttggccctgggccatatgaggggccaggaaatgaacgacaaggaggataagagtgttctttcttgaaagccgggacttcccctcaagaacctgggcctggggccgggactctgcatgactgggagcaagtcacttaaacctcctgtgcctcgatttcccccttctacaaagtggggccaatgattcttgtgtgtcagcactgttactaccgagtgctgagtaagggcaaaataatacccctttctctatgtatctctgtatgcacacgcactatatatatatatatatatatatatacattcatgtaatcaccacttctcgatgtctatttcaaatcaaggctcctgagtagggggtgaagtgagccagcttgcacctcaggctaacacataggactttgctcagccatgtcccctgggatacaggggcacaccaggaccaagtggcagacctgtgggcttcagcctcggggccagggcatgcctgccaccccctgacaaaaacaggttccacagtgctacccttgcttcctgccccttgaggtgggccaggctggctcctggctatgcagggatctctggtccccaggagaccttgggggccaggcaggtaaggatcaggggtgataggggagagcaattactttgttcactgtatgcacccgcgggggcctgggagtccccatttgcaggtgggtagggcctccagcccacaccacccagacctaggcttccctcttctcaggatccaccacagggttaggggacaggaagcctgttctattctcaataaatcttacaaaattccaaaaagactttcctgtg

SEQ ID NO: 325754 - DNA, 2554 bp, Homo sapiens
gtggcgctgtctgcggcgtcgcagcggcccgggctgcagcagagacgatctcccggcgggctgtgcggcccggctctccggcggcagcgagtgccacgtcccaagtgctacgcggaggattagagcaggcggtgcgctgggggcgggagcagcgcggagcccggctcggccacaccgatcgcccgccgccatgggctcctcgcaaagcgtcgagatcccgggcgggggcaccgagggctaccacgttctgcgggtacaagaaaattccccaggacacagagctggtttggagcctttctttgattttattgtttctattaatggttcaagattaaataaagacaatgacactcttaaggatctgctgaaagcaaacgttgaaaagcctgtaaagatgcttatctatagcagcaaaacattggaactgcgagagacctcagtcacaccaagtaacctgtggggcggccagggcttattgggagtgagcattcgtttctgcagctttgatggggcaaatgaaaatgtttggcatgtgctggaggtggaatcaaattctcctgcagcactggcaggtcttagaccacacagtgattatataattggagcagatacagtcatgaatgagtctgaagatctattcagccttatcgaaacacatgaagcaaaaccattgaaactgtatgtgtacaacacagacactgataactgtcgagaagtgattattacaccaaattctgcatggggtggagaaggcagcctaggatgtggcattggatatggttatttgcatcgaatacctacacgcccatttgaggaaggaaagaaaatttctcttccaggacaaatggctggtacacctattacacctcttaaagatgggtttacagaggtccagctgtcctcagttaatcccccgtctttgtcaccaccaggaactacaggaattgaacagagtctgactggactttctattagctcaactccaccagctgtcagtagtgttctcagtacaggtgtaccaacagtaccgttattgccaccacaagtaaaccagtccctcacttctgtgccaccaatgaatccagctactacattaccaggtctgatgcctttaccagcaggactgcccaacctccccaacctcaacctcaacctcccagcaccacacatcatgccaggggttggcttaccagaacttgtaaacccaggtctgccacctcttccttccatgcctccccgaaacttacctggcattgcacctctccccctgccatccgagttcctcccgtcattccccttggttccagagagctcttctgcagcaagctcaggagagctgctgtcttccctcccgcccaccagcaacgcaccctctgaccctgccacaactactgcaaaggcagacgctgcctcctcactcactgtggatgtgacgccccccactgccaaggcccccaccaccgttgaggacagagtcggcgactccaccccagtcagcgagaagcctgtttctgcggctgtggatgccaatgcttctgagtcaccttaactttgaaccattctttggaattggcgtggtatatttaaccacgggagcgtgtctggaaacgcaaactatcattaatttcatactagtttgtaccgtatctgtaggcatcctgtaaataattccaaggggaaaactaaacgaggacgtgggttgtatcctgccaggttgagtggggctcacacgctagggtgagatgtcagaaagcgcttgtattttaaacaaccaaaaagaattgtaagggtggcttgctgccaggcttgcactgccgttcctgggggtgtgcatcttcgggaaaggtggtggcggggcgtccactaggtttcctgtcccctgctgctccttccgtaagaaaatgaaatattctatgcctaatactcacacgcaacatttcttgtactttgtaagtcgtttgcgagaatgcagaccacctcactaaactgtaaacggtaaagagatttttacttttggtctccgtgagtcgcatctctactaaggtttacacaggaattccacctgaagacttgtgttaaagttctacagcgcgcactgttaactgaacgtctttttcttcagcctatacgcggatccttgttttgagctctcagaatcactcagacaacattttgtaactgctgctgttgctttctacatacaccttataaagtgacatttcaaaagaaataaggtgccacagttttaaaccagaaggtggcactctgtggctccttgtagtattatagctatactgggaaagcatagatacagcaataaagtacagtaattttactttttttcttgtgttacatctaaattacaacccttaattgccacgtgtgcacttactactctccagtatgtcttattactctccagtatgtcacgcatctttaacttttcacgtcctatgtttgctttctcccatttttaagagatggtaagttaactggaattgatttactgaatgaaattaaatgcagatatccctgtttttgaaataagaaaaaa

SEQ ID NO: 325755 - DNA, 814 bp, Homo sapiens
ctcttctaatactcagtacatattcaaatttctccaaatgaaccaaaaatgtcctttacgcttatttctccaagttggcccccaactcaagcccttgcaatgtgtctcttggttatattcttcgggttccttttaatctggcataggccctttcataggactctgactcgacaaagagaactggccagctgtcctgaaggaaggcccacttcctgtatttgcctggttccctgtggtgtcattttacttgctcctcaattccccttacttcctgtaaacatcaaactcaagatgccatagaggcaagttaaccaccttgggctagaatacttcatgggcgatagcacgtactttacattgcatcacataggaatccacataatacctggttgacgcaacatcagtccaactgaccacaaagcaactaggggtttcagagggagtacacgtaaggggcaaaagcagcaacggaatacgacaacggaataagcatgaatacgacctggctacctgaaggaggtaggacggggaaccgagcagcagcaggtggtggaatgccagggaaatccaaccgtgcttcccacgctggcatcgctctgattatgaccaatcctctaatcttattctcacaattagggaggaagaaaaaaaaacaaacccaaaccaaaaaagaagttggtaggtgactctgtgagactactgttttataaagggagcgtttccttttataaaatttagctgagcagatgctaggcagcccacaggaggccactattcccctcagctgtacagtttgggaaaatacctacacacc

SEQ ID NO: 325756 - DNA, 385 bp, Homo sapiens
cctcttgtccagtgagctgggctggggtgggactgcacggcctcttgccctcttgtcacaggctctggtaacagcctttgttgagagctgtgggcagagtcagtgaatctgccgtaaagggtgatggacagtcagttgcagctggaaatcgggaccaaatgaagacctgaccacggggcaaggagggactgcagattgtcctaatgtgttctgttcatttcttgtcgactaaatttgttagaaatgaaaagattgtgctttctttttaggtgtaccaacagtaccgttattgccaccacaagtaaaccagtccctcacttctgtgccaccaatgaatccagctactacattaccagcctgggcaacagagcaagacttcatctca

SEQ ID NO: 325757 - DNA, 346 bp, Homo sapiens
cgtcgaattcgtggtgctgctcggcgaattcgtggtgctgctcggcgattcgtggtgctgctcggcgaattcgtggtgctgctcggcgaattcgtggtgctgctcggcgaattcgtggtgctgctcggcgaattcgtggtgctgctcggcgaattcgtggtgctgctttgatggggcaaatgaaaatgtttggcatgtgctggaggtggaatcaaattctcctgcagcactggcaggtcttagaccacacagtgattatataattggagcagatacagtcatgaatgagtctgaacatctattcgcctaatccaacacctgaaccaccccacgcatgggaccctct

SEQ ID NO: 325758 - DNA, 2820 bp, Homo sapiens
ctcttctaatactcagtacatattcaaatttctccaaatgaaccaaaaatgtcctttacgcttatttctccaagttggcccccaactcaagcccttgcaatgtgtctcttggttatattcttcgggttccttttaatctggcataggccctttcataggactctgactcgacaaagagaactggccagctgtcctgaaggaaggcccacttcctgtatttgcctggttccctgtggtgtcattttacttgctcctcaattccccttacttcctgtaaacatcaaactcaagatgccatagaggcaagttaaccaccttgggctagaatacttcatgggcgatagcacgtactttacattgcatcacataggaatccacataatacctggttgacgcaacatcagtccaactgaccacaaagcaactaggggtttcagagggagtacacgtaaggggcaaaagcagcaacggaatacgacaacggaataagcatgaatacgacctggctacctgaaggaggtacaagaaaattccccaggacacagagctggtttggagcctttctttgattttattgtttctattaatggttcaagattaaataaagacaatgacactcttaaggatctgctgaaagcaaacgttgaaaagcctgtaaagatgcttatctatagcagcaaaacattggaactgcgagagacctcagtcacaccaagtaacctgtggggcggccagggcttattgggagtgagcattcgtttctgcagctttgatggggcaaatgaaaatgtttggcatgtgctggaggtggaatcaaattctcctgcagcactggcaggtcttagaccacacagtgattatataattggagcagatacagtcatgaatgagtctgaagatctattcagccttatcgaaacacatgaagcaaaaccattgaaactgtatgtgtacaacacagacactgataactgtcgagaagtgattattacaccaaattctgcatggggtggagaaggcagcctaggatgtggcattggatatggttatttgcatcgaatacctacacgcccatttgaggaaggaaagaaaatttctcttccaggacaaatggctggtacacctattacacctcttaaagatgggtttacagaggtccagctgtcctcagttaatcccccgtctttgtcaccaccaggaactacaggaattgaacagagtctgactggactttctattagctcaactccaccagctgtcagtagtgttctcagtacaggtgtaccaacagtaccgttattgccaccacaagtaaaccagtccctcacttctgtgccaccaatgaatccagctactacattaccaggtctgatgcctttaccagcaggactgcccaacctccccaacctcaacctcaacctcccagcaccacacatcatgccaggggttggcttaccagaacttgtaaacccaggtctgccacctcttccttccatgcctccccgaaacttacctggcattgcacctctccccctgccatccgagttcctcccgtcattccccttggttccagagagctcttctgcagcaagctcaggagagctgctgtcttccctcccgcccaccagcaacgcaccctctgaccctgccacaactactgcaaaggcagacgctgcctcctcactcactgtggatgtgacgccccccactgccaaggcccccaccaccgttgaggacagagtcggcgactccaccccagtcagcgagaagcctgtttctgcggctgtggatgccaatgcttctgagtcaccttaactttgaaccattctttggaattggcgtggtatatttaaccacgggagcgtgtctggaaacgcaaactatcattaatttcatactagtttgtaccgtatctgtaggcatcctgtaaataattccaaggggaaaactaaacgaggacgtgggttgtatcctgccaggttgagtggggctcacacgctagggtgagatgtcagaaagcgcttgtattttaaacaaccaaaaagaattgtaagggtggcttgctgccaggcttgcactgccgttcctgggggtgtgcatcttcgggaaaggtggtggcggggcgtccactaggtttcctgtcccctgctgctccttccgtaagaaaatgaaatattctatgcctaatactcacacgcaacatttcttgtactttgtaagtcgtttgcgagaatgcagaccacctcactaaactgtaaacggtaaagagatttttacttttggtctccgtgagtcgcatctctactaaggtttacacaggaattccacctgaagacttgtgttaaagttctacagcgcgcactgttaactgaacgtctttttcttcagcctatacgcggatccttgttttgagctctcagaatcactcagacaacattttgtaactgctgctgttgctttctacatacaccttataaagtgacatttcaaaagaaataaggtgccacagttttaaaccagaaggtggcactctgtggctccttgtagtattatagctatactgggaaagcatagatacagcaataaagtacagtaattttactttttttcttgtgttacatctaaattacaacccttaattgccacgtgtgcacttactactctccagtatgtcttattactctccagtatgtcacgcatctttaacttttcacgtcctatgtttgctttctcccatttttaagagatggtaagttaactggaattgatttactgaatgaaattaaatgcagatatccctgtttttgaaataagaaaaaa

SEQ ID NO: 325759 - DNA, 2503 bp, Homo sapiens
gtggcgctgtctgcggcgtcgcagcggcccgggctgcagcagagacgatctcccggcgggctgtgcggcccggctctccggcggcagcgagtgccacgtcccaagtgctacgcggaggattagagcaggcggtgcgctgggggcgggagcagcgcggagcccggctcggccacaccgatcgcccgccgccatgggctcctcgcaaagcgtcgagatcccgggcgggggcaccgagggctaccacgttctgcgggtacaagaaaattccccaggacacagagctggtttggagcctttctttgattttattgtttctattaatggttcaagattaaataaagacaatgacactcttaaggatctgctgaaagcaaacgttgaaaagcctgtaaagatgcttatctatagcagcaaaacattggaactgcgagagacctcagtcacaccaagtaacctgtggggcggccagggcttattgggagtgagcattcgtttctgcagctttgatggggcaaatgaaaatgtttggcatgtgctggaggtggaatcaaattctcctgcagcactggcaggtcttagaccacacagtgattatataattggagcagatacagtcatgaatgagtctgaagatctattcagccttatcgaaacacatgaagcaaaaccattgaaactgtatgtgtacaacacagacactgataactgtcgagaagtgattattacaccaaattctgcatggggtggagaaggcagcctaggatgtggcattggatatggttatttgcatcgaatacctacacgcccatttgaggaaggaaagaaaatttctcttccaggacaaatggctggtacacctattacacctcttaaagatgggtttacagaggtccagctgtcctcagttaatcccccgtctttgtcaccaccaggaactacaggaattgaacagagtctgactggactttctattagctcaactccaccagctgtcagtagtgttctcagtacaggtgtaccaacagtaccgttattgccaccacaagtaaaccagtccctcacttctgtgccaccaatgaatccagctactacattaccaggtctgatgcctttaccagcaggactgcccaacctccccaacctcaacctcaacctcccagcaccacacatcatgccaggggttggcttaccagaacttgtaaacccagctctccccctgccatccgagttcctcccgtcattccccttggttccagagagctcttctgcagcaagctcaggagagctgctgtcttccctcccgcccaccagcaacgcaccctctgaccctgccacaactactgcaaaggcagacgctgcctcctcactcactgtggatgtgacgccccccactgccaaggcccccaccaccgttgaggacagagtcggcgactccaccccagtcagcgagaagcctgtttctgcggctgtggatgccaatgcttctgagtcaccttaactttgaaccattctttggaattggcgtggtatatttaaccacgggagcgtgtctggaaacgcaaactatcattaatttcatactagtttgtaccgtatctgtaggcatcctgtaaataattccaaggggaaaactaaacgaggacgtgggttgtatcctgccaggttgagtggggctcacacgctagggtgagatgtcagaaagcgcttgtattttaaacaaccaaaaagaattgtaagggtggcttgctgccaggcttgcactgccgttcctgggggtgtgcatcttcgggaaaggtggtggcggggcgtccactaggtttcctgtcccctgctgctccttccgtaagaaaatgaaatattctatgcctaatactcacacgcaacatttcttgtactttgtaagtcgtttgcgagaatgcagaccacctcactaaactgtaaacggtaaagagatttttacttttggtctccgtgagtcgcatctctactaaggtttacacaggaattccacctgaagacttgtgttaaagttctacagcgcgcactgttaactgaacgtctttttcttcagcctatacgcggatccttgttttgagctctcagaatcactcagacaacattttgtaactgctgctgttgctttctacatacaccttataaagtgacatttcaaaagaaataaggtgccacagttttaaaccagaaggtggcactctgtggctccttgtagtattatagctatactgggaaagcatagatacagcaataaagtacagtaattttactttttttcttgtgttacatctaaattacaacccttaattgccacgtgtgcacttactactctccagtatgtcttattactctccagtatgtcacgcatctttaacttttcacgtcctatgtttgctttctcccatttttaagagatggtaagttaactggaattgatttactgaatgaaattaaatgcagatatccctgtttttgaaataagaaaaaa

SEQ ID NO: 325760 - DNA, 2410 bp, Homo sapiens
gtggcgctgtctgcggcgtcgcagcggcccgggctgcagcagagacgatctcccggcgggctgtgcggcccggctctccggcggcagcgagtgccacgtcccaagtgctacgcggaggattagagcaggcggtgcgctgggggcgggagcagcgcggagcccggctcggccacaccgatcgcccgccgccatgggctcctcgcaaagcgtcgagatcccgggcgggggcaccgagggctaccacgttctgcgggtacaagaaaattccccaggacacagagctggtttggagcctttctttgattttattgtttctattaatggttcaagattaaataaagacaatgacactcttaaggatctgctgaaagcaaacgttgaaaagcctgtaaagatgcttatctatagcagcaaaacattggaactgcgagagacctcagtcacaccaagtaacctgtggggcggccagggcttattgggagtgagcattcgtttctgcagctttgatggggcaaatgaaaatgtttggcatgtgctggaggtggaatcaaattctcctgcagcactggcaggtcttagaccacacagtgattatataattggagcagatacagtcatgaatgagtctgaagatctattcagccttatcgaaacacatgaagcaaaaccattgaaactgtatgtgtacaacacagacactgataactgtcgagaagtgattattacaccaaattctgcatggggtggagaaggcagcctaggatgtggcattggatatggttatttgcatcgaatacctacacgcccatttgaggaaggaaagaaaatttctcttccaggacaaatggctggtacacctattacacctcttaaagatgggtttacagaggtccagctgtcctcagttaatcccccgtctttgtcaccaccaggaactacaggaattgaacagagtctgactggactttctattagctcaactccaccagctgtcagtagtgttctcagtacaggtgtaccaacagtaccgttattgccaccacaagtaaaccagtccctcacttctgtgccaccaatgaatccagctactacattaccaggtctgatgcctttaccagcaggactgcccaacctccccaacctcaacctcaacctcccagcaccacacatcatgccaggggttggcttaccagaacttgtaaacccaggtctgccacctcttccttccatgcctccccgaaacttacctggcattgcacctctccccctgccatccgagttcctcccgtcattccccttggttccagagagctcttctgcagcaagctcaggagagctgctgtcttccctcccgcccaccagcaacgcaccctctgtggatgccaatgcttctgagtcaccttaactttgaaccattctttggaattggcgtggtatatttaaccacgggagcgtgtctggaaacgcaaactatcattaatttcatactagtttgtaccgtatctgtaggcatcctgtaaataattccaaggggaaaactaaacgaggacgtgggttgtatcctgccaggttgagtggggctcacacgctagggtgagatgtcagaaagcgcttgtattttaaacaaccaaaaagaattgtaagggtggcttgctgccaggcttgcactgccgttcctgggggtgtgcatcttcgggaaaggtggtggcggggcgtccactaggtttcctgtcccctgctgctccttccgtaagaaaatgaaatattctatgcctaatactcacacgcaacatttcttgtactttgtaagtcgtttgcgagaatgcagaccacctcactaaactgtaaacggtaaagagatttttacttttggtctccgtgagtcgcatctctactaaggtttacacaggaattccacctgaagacttgtgttaaagttctacagcgcgcactgttaactgaacgtctttttcttcagcctatacgcggatccttgttttgagctctcagaatcactcagacaacattttgtaactgctgctgttgctttctacatacaccttataaagtgacatttcaaaagaaataaggtgccacagttttaaaccagaaggtggcactctgtggctccttgtagtattatagctatactgggaaagcatagatacagcaataaagtacagtaattttactttttttcttgtgttacatctaaattacaacccttaattgccacgtgtgcacttactactctccagtatgtcttattactctccagtatgtcacgcatctttaacttttcacgtcctatgtttgctttctcccatttttaagagatggtaagttaactggaattgatttactgaatgaaattaaatgcagatatccctgtttttgaaataagaaaaaa

SEQ ID NO: 325761 - DNA, 2373 bp, Homo sapiens
gtggcgctgtctgcggcgtcgcagcggcccgggctgcagcagagacgatctcccggcgggctgtgcggcccggctctccggcggcagcgagtgccacgtcccaagtgctacgcggaggattagagcaggcggtgcgctgggggcgggagcagcgcggagcccggctcggccacaccgatcgcccgccgccatgggctcctcgcaaagcgtcgagatcccgggcgggggcaccgagggctaccacgttctgcgggtacaagaaaattccccaggacacagagctggtttggagcctttctttgattttattgtttctattaatggttcaagattaaataaagacaatgacactcttaaggatctgctgaaagcaaacgttgaaaagcctgtaaagatgcttatctatagcagcaaaacattggaactgcgagagacctcagtcacaccaagtaacctgtggggcggccagggcttattgggagtgagcattcgtttctgcagctttgatggggcaaatgaaaatgtttggcatgtgctggaggtggaatcaaattctcctgcagcactggcaggtcttagaccacacagtgattatataattggagcagatacagtcatgaatgagtctgaagatctattcagccttatcgaaacacatgaagcaaaaccattgaaactgtatgtgtacaacacagacactgataactgtcgagaagtgattattacaccaaattctgcatggggtggagaaggcagcctaggatgtggcattggatatggttatttgcatcgaatacctacacgcccatttgaggaaggaaagaaaatttctcttccaggacaaatggctggtacacctattacacctcttaaagatgggtttacagaggtccagctgtcctcagttaatcccccgtctttgtcaccaccaggaactacaggaattgaacagagtctgactggactttctattagctcaactccaccagctgtcagtagtgttctcagtacaggtgtaccaacagtaccgttattgccaccacaagtaaaccagtccctcacttctgtgccaccaatgaatccagctactacattaccaggtctgatgcctttaccagcaggactgcccaacctccccaacctcaacctcaacctcccagcaccacacatcatgccaggggttggcttaccagaacttgtaaacccaggtatgttgcagatctcaccctctcctcactcactgtggatgtgacgccccccactgccaaggcccccaccaccgttgaggacagagtcggcgactccaccccagtcagcgagaagcctgtttctgcggctgtggatgccaatgcttctgagtcaccttaactttgaaccattctttggaattggcgtggtatatttaaccacgggagcgtgtctggaaacgcaaactatcattaatttcatactagtttgtaccgtatctgtaggcatcctgtaaataattccaaggggaaaactaaacgaggacgtgggttgtatcctgccaggttgagtggggctcacacgctagggtgagatgtcagaaagcgcttgtattttaaacaaccaaaaagaattgtaagggtggcttgctgccaggcttgcactgccgttcctgggggtgtgcatcttcgggaaaggtggtggcggggcgtccactaggtttcctgtcccctgctgctccttccgtaagaaaatgaaatattctatgcctaatactcacacgcaacatttcttgtactttgtaagtcgtttgcgagaatgcagaccacctcactaaactgtaaacggtaaagagatttttacttttggtctccgtgagtcgcatctctactaaggtttacacaggaattccacctgaagacttgtgttaaagttctacagcgcgcactgttaactgaacgtctttttcttcagcctatacgcggatccttgttttgagctctcagaatcactcagacaacattttgtaactgctgctgttgctttctacatacaccttataaagtgacatttcaaaagaaataaggtgccacagttttaaaccagaaggtggcactctgtggctccttgtagtattatagctatactgggaaagcatagatacagcaataaagtacagtaattttactttttttcttgtgttacatctaaattacaacccttaattgccacgtgtgcacttactactctccagtatgtcttattactctccagtatgtcacgcatctttaacttttcacgtcctatgtttgctttctcccatttttaagagatggtaagttaactggaattgatttactgaatgaaattaaatgcagatatccctgtttttgaaataagaaaaaa

SEQ ID NO: 325762 - DNA, 2511 bp, Homo sapiens
gtggcgctgtctgcggcgtcgcagcggcccgggctgcagcagagacgatctcccggcgggctgtgcggcccggctctccggcggcagcgagtgccacgtcccaagtgctacgcggaggattagagcaggcggtgcgctgggggcgggagcagcgcggagcccggctcggccacaccgatcgcccgccgccatgggctcctcgcaaagcgtcgagatcccgggcgggggcaccgagggctaccacgttctgcgggtacaagaaaattccccaggacacagagctggtttggaaataaagacaatgacactcttaaggatctgctgaaagcaaacgttgaaaagcctgtaaagatgcttatctatagcagcaaaacattggaactgcgagagacctcagtcacaccaagtaacctgtggggcggccagggcttattgggagtgagcattcgtttctgcagctttgatggggcaaatgaaaatgtttggcatgtgctggaggtggaatcaaattctcctgcagcactggcaggtcttagaccacacagtgattatataattggagcagatacagtcatgaatgagtctgaagatctattcagccttatcgaaacacatgaagcaaaaccattgaaactgtatgtgtacaacacagacactgataactgtcgagaagtgattattacaccaaattctgcatggggtggagaaggcagcctaggatgtggcattggatatggttatttgcatcgaatacctacacgcccatttgaggaaggaaagaaaatttctcttccaggacaaatggctggtacacctattacacctcttaaagatgggtttacagaggtccagctgtcctcagttaatcccccgtctttgtcaccaccaggaactacaggaattgaacagagtctgactggactttctattagctcaactccaccagctgtcagtagtgttctcagtacaggtgtaccaacagtaccgttattgccaccacaagtaaaccagtccctcacttctgtgccaccaatgaatccagctactacattaccaggtctgatgcctttaccagcaggactgcccaacctccccaacctcaacctcaacctcccagcaccacacatcatgccaggggttggcttaccagaacttgtaaacccaggtctgccacctcttccttccatgcctccccgaaacttacctggcattgcacctctccccctgccatccgagttcctcccgtcattccccttggttccagagagctcttctgcagcaagctcaggagagctgctgtcttccctcccgcccaccagcaacgcaccctctgaccctgccacaactactgcaaaggcagacgctgcctcctcactcactgtggatgtgacgccccccactgccaaggcccccaccaccgttgaggacagagtcggcgactccaccccagtcagcgagaagcctgtttctgcggctgtggatgccaatgcttctgagtcaccttaactttgaaccattctttggaattggcgtggtatatttaaccacgggagcgtgtctggaaacgcaaactatcattaatttcatactagtttgtaccgtatctgtaggcatcctgtaaataattccaaggggaaaactaaacgaggacgtgggttgtatcctgccaggttgagtggggctcacacgctagggtgagatgtcagaaagcgcttgtattttaaacaaccaaaaagaattgtaagggtggcttgctgccaggcttgcactgccgttcctgggggtgtgcatcttcgggaaaggtggtggcggggcgtccactaggtttcctgtcccctgctgctccttccgtaagaaaatgaaatattctatgcctaatactcacacgcaacatttcttgtactttgtaagtcgtttgcgagaatgcagaccacctcactaaactgtaaacggtaaagagatttttacttttggtctccgtgagtcgcatctctactaaggtttacacaggaattccacctgaagacttgtgttaaagttctacagcgcgcactgttaactgaacgtctttttcttcagcctatacgcggatccttgttttgagctctcagaatcactcagacaacattttgtaactgctgctgttgctttctacatacaccttataaagtgacatttcaaaagaaataaggtgccacagttttaaaccagaaggtggcactctgtggctccttgtagtattatagctatactgggaaagcatagatacagcaataaagtacagtaattttactttttttcttgtgttacatctaaattacaacccttaattgccacgtgtgcacttactactctccagtatgtcttattactctccagtatgtcacgcatctttaacttttcacgtcctatgtttgctttctcccatttttaagagatggtaagttaactggaattgatttactgaatgaaattaaatgcagatatccctgtttttgaaataagaaaaaa

SEQ ID NO: 325763 - DNA, 3217 bp, Homo sapiens
  misc_feature (998)..(998): n is a, c, g, or t
  misc_feature (1079)..(1079): n is a, c, g, or t
  misc_feature (1401)..(1401): n is a, c, g, or t
aaaactgcaattcagccaggcatggaagatcacacctataatctcaggactttgggaggcctagctcctcctttaccagtctgatcatgccactgtgctacagcctgggcaacagaataataaattgtcttaataaataaataaataaataaataaataaaattaaaaaggctgaagttggctactgcctgctcacccagcttttggtggcagtggagataatagatgatgtggcaggagaagggcacagaggtattcatgcatggcctactctgaaattgtcaagttgtttgggaaataaaagacatcatgatggaaacataagttggaacctgattatggagagccttaaataccacggtcaggacttccgatatattttgagcagttgaggctgtgataattgtatcagtaaggggttttgggttcaaatggtaaaaactagctgtcaccatcataagcagataacatacttaatgatatggattagctcatataatcaaggaaacagctgaagaaccagatgtagaaaggacaggactcagaaaacctagggatttagataggaagaagtatttggcaatgtcatcagcattcattctactaaacccatttttgttttttctctgactcccaaggtttgcagccatgggcaagagaaattggcctggctttgaccatgagccattcccttggtttgggcagggcagacactctgattgacaatcctaccagcactgcacacaacagcagagaagtaattccccaaagggaggaaagagaaaggaatgttgagaagacatcagactagaaagaagcaatgtgatcacatcttactagaaaaatgcctctggtggcagtgggaggatgaaatagaagagatctgggttgaacatacatgactgatttgtgtcaggttctgaaagagaactatggaatgtgtaaatgatgtcatcatacagacgtgcttagagctcttcagtggaaaggctgtatcnatgtcatttgtttagcgagtaatcatcaaatgtctgccatgtgccggcagctatgaaggcagtaaacagacaaggtctctncccttcaggaccttaacattttgttgggggagatagatagtaaataaatatgcagtgtgttggatggtgatgaattcttgaaaaataaaggagtaagggtgatatccacagtggagggcagggtgttgttttctgtggggtggtctgggagacctctgcttcattatctaaaagaatagaaatttgtttgtttttatcttttaaaatctcaaagaagggagtgcatgttcagggcaacttgaatctatgctcttgggttacccgccccccccaaaaaaaacacctcaaagaaatacaagctgtgatagataacaacgttaanaaaaaaatgtttttatagcctaggatgtggcattggatatggttatttgcatcgaatacctacacgcccatttgaggaaggaaagaaaatttctcttccaggacaaatggctggtacacctattacacctcttaaagatgggtttacagaggtccagctgtcctcagttaatcccccgtctttgtcaccaccaggaactacaggaattgaacagagtctgactggactttctattagctcaactccaccagctgtcagtagtgttctcagtacaggtgtaccaacagtaccgttattgccaccacaagtaaaccagtccctcacttctgtgccaccaatgaatccagctactacattaccaggtctgatgcctttaccagcaggactgcccaacctccccaacctcaacctcaacctcccagcaccacacatcatgccaggggttggcttaccagaacttgtaaacccaggtctgccacctcttccttccatgcctccccgaaacttacctggcattgcacctctccccctgccatccgagttcctcccgtcattccccttggttccagagagctcttctgcagcaagctcaggagagctgctgtcttccctcccgcccaccagcaacgcaccctctgaccctgccacaactactgcaaaggcagacgctgcctcctcactcactgtggatgtgacgccccccactgccaaggcccccaccaccgttgaggacagagtcggcgactccaccccagtcagcgagaagcctgtttctgcggctgtggatgccaatgcttctgagtcaccttaactttgaaccattctttggaattggcgtggtatatttaaccacgggagcgtgtctggaaacgcaaactatcattaatttcatactagtttgtaccgtatctgtaggcatcctgtaaataattccaaggggaaaactaaacgaggacgtgggttgtatcctgccaggttgagtggggctcacacgctagggtgagatgtcagaaagcgcttgtattttaaacaaccaaaaagaattgtaagggtggcttgctgccaggcttgcactgccgttcctgggggtgtgcatcttcgggaaaggtggtggcggggcgtccactaggtttcctgtcccctgctgctccttccgtaagaaaatgaaatattctatgcctaatactcacacgcaacatttcttgtactttgtaagtcgtttgcgagaatgcagaccacctcactaaactgtaaacggtaaagagatttttacttttggtctccgtgagtcgcatctctactaaggtttacacaggaattccacctgaagacttgtgttaaagttctacagcgcgcactgttaactgaacgtctttttcttcagcctatacgcggatccttgttttgagctctcagaatcactcagacaacattttgtaactgctgctgttgctttctacatacaccttataaagtgacatttcaaaagaaataaggtgccacagttttaaaccagaaggtggcactctgtggctccttgtagtattatagctatactgggaaagcatagatacagcaataaagtacagtaattttactttttttcttgtgttacatctaaattacaacccttaattgccacgtgtgcacttactactctccagtatgtcttattactctccagtatgtcacgcatctttaacttttcacgtcctatgtttgctttctcccatttttaagagatggtaagttaactggaattgatttactgaatgaaattaaatgcagatatccctgtttttgaaataagaaaaaa

SEQ ID NO: 325764 - DNA, 2004 bp, Homo sapiens
gtggcgctgtctgcggcgtcgcagcggcccgggctgcagcagagacgatctcccggcgggctgtgcggcccggctctccggcggcagcgagtgccacgtcccaagtgctacgcggaggattagagcaggcggtgcgctgggggcgggagcagcgcggagcccggctcggccacaccgatcgcccgccgccatgggctcctcgcaaagcgtcgagatcccgggcgggggcaccgagggctaccacgttctgcgggtacaagaaaattccccaggacacagagctggtttggagcctttctttgattttattgtttctattaatggttcaagattaaataaagacaatgacactcttaaggatctgctgaaagcaaacgttgaaaagcctgtaaagatgcttatctatagcagcaaaacattggaactgcgagagacctcagtcacaccaagtaacctgtggggcggccagggcttattgggagtgagcattcgtttctgcagctttgatggggcaaatgaaaatgtttggcatgtgctggaggtggaatcaaattctcctgcagcactggcaggtcttagaccacacagtgattatataattggagcagatacagtcatgaatgagtctgaagatctattcagccttatcgaaacacatgaagcaaaaccattgaaactgtatgtgtacaacacagacactgataactgtcgagaagtgattattacaccaaattctgcatggggtggagaaggcagcctaggatgtggcattggatatggttatttgcatcgaatacctacacgcccatttgaggaaggaaagaaaatttctcttccaggacaaatggctggtacacctattacacctcttaaagatgggtttacagaggtccagctgtcctcagttaatcccccgtctttgtcaccaccaggaactacaggaattgaacagagtctgactggactttctattagctcaactccaccagctgtcagtagtgttctcagtacaggtgtaccaacagtaccgttattgccaccacaagtaaaccagtccctcacttctgtgccaccaatgaatccagctactacattaccaggtctgatgcctttaccagcaggactgcccaacctccccaacctcaacctcaacctcccagcaccacacatcatgccaggggttggcttaccagaacttgtaaacccaggtctgccacctcttccttccatgcctccccgaaacttacctggcattgcacctctccccctgccatccgagttcctcccgtcattccccttggttccagagagctcttctgcagcaagctcaggagagctgctgtcttccctcccgcccaccagcaacgcaccctctgaccctgccacaactactgcaaaggcagacgctgcctcctcactcactgtggatgtgacgccccccactgccaaggcccccaccaccgttgaggacagagtcggcgactccaccccagtcagcgagaagcctgtttctgcggctgtggatgccaatgcttctgagtcaccttaactttgaaccattctttggaattggcgtggtatatttaaccacgggagcgtgtctggaaacgcaaactatcattaatttcatactagtttgtaccgtatctgtaggcatcctgtaaataattccaaggggaaaactaaacgaggacgtgggttgtatcctgccaggttgagtggggctcacacgctagggtgagatgtcagaaagcgcttgtattttaaacaaccaaaaagaattgtaagggtggcttgctgccaggcttgcactgccgttcctgggggtgtgcatcttcgggaaaggtggtggcggggcgtccactaggtttcctgtcccctgctgctccttccgtaagaaaatgaaatattctatgcctaatactcacacgcaacatttcttgtactttgtaagtcgtttgcgagaatgcagaccacctcactaaactgtaaacggtaaagaga

SEQ ID NO: 325765 - DNA, 2338 bp, Homo sapiens
gtggcgctgtctgcggcgtcgcagcggcccgggctgcagcagagacgatctcccggcgggctgtgcggcccggctctccggcggcagcgagtgccacgtcccaagtgctacgcggaggattagagcaggcggtgcgctgggggcgggagcagcgcggagcccggctcggccacaccgatcgcccgccgccatgggctcctcgcaaagcgtcgagatcccgggcgggggcaccgagggctaccacgttctgcgggtacaagaaaattccccaggacacagagctggtttggagcctttctttgattttattgtttctattaatggttcaagattaaataaagacaatgacactcttaaggatctgctgaaagcaaacgttgaaaagcctgtaaagatgcttatctatagcagcaaaacattggaactgcgagagacctcagtcacaccaagtaacctgtggggcggccagggcttattgggagtgagcattcgtttctgcagctttgatggggcaaatgaaaatgtttggcatgtgctggaggtggaatcaaattctcctgcagcactggcaggtcttagaccacacagtgattatataattggagcagatacagtcatgaatgagtctgaagatctattcagccttatcgaaacacatgaagcaaaaccattgaaactgtatgtgtacaacacagacactgataactgtcgagaagtgattattacaccaaattctgcatggggtggagaaggcagcctaggatgtggcattggatatggttatttgcatcgaatacgtgtaccaacagtaccgttattgccaccacaagtaaaccagtccctcacttctgtgccaccaatgaatccagctactacattaccaggtctgatgcctttaccagcaggactgcccaacctccccaacctcaacctcaacctcccagcaccacacatcatgccaggggttggcttaccagaacttgtaaacccaggtctgccacctcttccttccatgcctccccgaaacttacctggcattgcacctctccccctgccatccgagttcctcccgtcattccccttggttccagagagctcttctgcagcaagctcaggagagctgctgtcttccctcccgcccaccagcaacgcaccctctgaccctgccacaactactgcaaaggcagacgctgcctcctcactcactgtggatgtgacgccccccactgccaaggcccccaccaccgttgaggacagagtcggcgactccaccccagtcagcgagaagcctgtttctgcggctgtggatgccaatgcttctgagtcaccttaactttgaaccattctttggaattggcgtggtatatttaaccacgggagcgtgtctggaaacgcaaactatcattaatttcatactagtttgtaccgtatctgtaggcatcctgtaaataattccaaggggaaaactaaacgaggacgtgggttgtatcctgccaggttgagtggggctcacacgctagggtgagatgtcagaaagcgcttgtattttaaacaaccaaaaagaattgtaagggtggcttgctgccaggcttgcactgccgttcctgggggtgtgcatcttcgggaaaggtggtggcggggcgtccactaggtttcctgtcccctgctgctccttccgtaagaaaatgaaatattctatgcctaatactcacacgcaacatttcttgtactttgtaagtcgtttgcgagaatgcagaccacctcactaaactgtaaacggtaaagagatttttacttttggtctccgtgagtcgcatctctactaaggtttacacaggaattccacctgaagacttgtgttaaagttctacagcgcgcactgttaactgaacgtctttttcttcagcctatacgcggatccttgttttgagctctcagaatcactcagacaacattttgtaactgctgctgttgctttctacatacaccttataaagtgacatttcaaaagaaataaggtgccacagttttaaaccagaaggtggcactctgtggctccttgtagtattatagctatactgggaaagcatagatacagcaataaagtacagtaattttactttttttcttgtgttacatctaaattacaacccttaattgccacgtgtgcacttactactctccagtatgtcttattactctccagtatgtcacgcatctttaacttttcacgtcctatgtttgctttctcccatttttaagagatggtaagttaactggaattgatttactgaatgaaattaaatgcagatatccctgtttttgaaataagaaaaaa

SEQ ID NO: 325766 - DNA, 1958 bp, Homo sapiens
cgttgagaatatacccttctcactcacatttttcacacacctcgcacagacctaacactcaccacaggcatcctctgttctgactgtgcacacagccgtcactgacacactgttgtgacgcgatattcacaccttattctgcatgcagagacgcagacagcctaggatgtggcattggatatggttatttgcatcgaatacctacacgcccatttgaggaaggaaagaaaatttctcttccaggacaaatggctggtacacctattacacctcttaaagatgggtttacagaggtccagctgtcctcagttaatcccccgtctttgtcaccaccaggaactacaggaattgaacagagtctgactggactttctattagctcaactccaccagctgtcagtagtgttctcagtacaggtgtaccaacagtaccgttattgccaccacaagtaaaccagtccctcacttctgtgccaccaatgaatccagctactacattaccaggtctgatgcctttaccagcaggactgcccaacctccccaacctcaacctcaacctcccagcaccacacatcatgccaggggttggcttaccagaacttgtaaacccaggtctgccacctcttccttccatgcctccccgaaacttacctggcattgcacctctccccctgccatccgagttcctcccgtcattccccttggttccagagagctcttctgcagcaagctcaggagagctgctgtcttccctcccgcccaccagcaacgcaccctctgaccctgccacaactactgcaaaggcagacgctgcctcctcactcactgtggatgtgacgccccccactgccaaggcccccaccaccgttgaggacagagtcggcgactccaccccagtcagcgagaagcctgtttctgcggctgtggatgccaatgcttctgagtcaccttaactttgaaccattctttggaattggcgtggtatatttaaccacgggagcgtgtctggaaacgcaaactatcattaatttcatactagtttgtaccgtatctgtaggcatcctgtaaataattccaaggggaaaactaaacgaggacgtgggttgtatcctgccaggttgagtggggctcacacgctagggtgagatgtcagaaagcgcttgtattttaaacaaccaaaaagaattgtaagggtggcttgctgccaggcttgcactgccgttcctgggggtgtgcatcttcgggaaaggtggtggcggggcgtccactaggtttcctgtcccctgctgctccttccgtaagaaaatgaaatattctatgcctaatactcacacgcaacatttcttgtactttgtaagtcgtttgcgagaatgcagaccacctcactaaactgtaaacggtaaagagatttttacttttggtctccgtgagtcgcatctctactaaggtttacacaggaattccacctgaagacttgtgttaaagttctacagcgcgcactgttaactgaacgtctttttcttcagcctatacgcggatccttgttttgagctctcagaatcactcagacaacattttgtaactgctgctgttgctttctacatacaccttataaagtgacatttcaaaagaaataaggtgccacagttttaaaccagaaggtggcactctgtggctccttgtagtattatagctatactgggaaagcatagatacagcaataaagtacagtaattttactttttttcttgtgttacatctaaattacaacccttaattgccacgtgtgcacttactactctccagtatgtcttattactctccagtatgtcacgcatctttaacttttcacgtcctatgtttgctttctcccatttttaagagatggtaagttaactggaattgatttactgaatgaaattaaatgcagatatccctgtttttgaaataagaaaaaa

SEQ ID NO: 325767 - DNA, 1737 bp, Homo sapiens
gaggtgatctagaggatcccttcagtgatgggtggtgcacctattacacctcttaaagatgggtttacagaggtccagctgtcctcagttaatcccccgtctttgtcaccaccaggaactacaggaattgaacagagtctgactggactttctattagctcaactccaccagctgtcagtagtgttctcagtacaggtgtaccaacagtaccgttattgccaccacaagtaaaccagtccctcacttctgtgccaccaatgaatccagctactacattaccaggtctgatgcctttaccagcaggactgcccaacctccccaacctcaacctcaacctcccagcaccacacatcatgccaggggttggcttaccagaacttgtaaacccaggtctgccacctcttccttccatgcctccccgaaacttacctggcattgcacctctccccctgccatccgagttcctcccgtcattccccttggttccagagagctcttctgcagcaagctcaggagagctgctgtcttccctcccgcccaccagcaacgcaccctctgaccctgccacaactactgcaaaggcagacgctgcctcctcactcactgtggatgtgacgccccccactgccaaggcccccaccaccgttgaggacagagtcggcgactccaccccagtcagcgagaagcctgtttctgcggctgtggatgccaatgcttctgagtcaccttaactttgaaccattctttggaattggcgtggtatatttaaccacgggagcgtgtctggaaacgcaaactatcattaatttcatactagtttgtaccgtatctgtaggcatcctgtaaataattccaaggggaaaactaaacgaggacgtgggttgtatcctgccaggttgagtggggctcacacgctagggtgagatgtcagaaagcgcttgtattttaaacaaccaaaaagaattgtaagggtggcttgctgccaggcttgcactgccgttcctgggggtgtgcatcttcgggaaaggtggtggcggggcgtccactaggtttcctgtcccctgctgctccttccgtaagaaaatgaaatattctatgcctaatactcacacgcaacatttcttgtactttgtaagtcgtttgcgagaatgcagaccacctcactaaactgtaaacggtaaagagatttttacttttggtctccgtgagtcgcatctctactaaggtttacacaggaattccacctgaagacttgtgttaaagttctacagcgcgcactgttaactgaacgtctttttcttcagcctatacgcggatccttgttttgagctctcagaatcactcagacaacattttgtaactgctgctgttgctttctacatacaccttataaagtgacatttcaaaagaaataaggtgccacagttttaaaccagaaggtggcactctgtggctccttgtagtattatagctatactgggaaagcatagatacagcaataaagtacagtaattttactttttttcttgtgttacatctaaattacaacccttaattgccacgtgtgcacttactactctccagtatgtcttattactctccagtatgtcacgcatctttaacttttcacgtcctatgtttgctttctcccatttttaagagatggtaagttaactggaattgatttactgaatgaaattaaatgcagatatccctgtttttgaaataagaaaaaa

SEQ ID NO: 325768 - DNA, 1810 bp, Homo sapiens
cctcttgtccagtgagctgggctggggtgggactgcacggcctcttgccctcttgtcacaggctctggtaacagcctttgttgagagctgtgggcagagtcagtgaatctgccgtaaagggtgatggacagtcagttgcagctggaaatcgggaccaaatgaagacctgaccacggggcaaggagggactgcagattgtcctaatgtgttctgttcatttcttgtcgactaaatttgttagaaatgaaaagattgtgctttctttttaggtgtaccaacagtaccgttattgccaccacaagtaaaccagtccctcacttctgtgccaccaatgaatccagctactacattaccaggtctgatgcctttaccagcaggactgcccaacctccccaacctcaacctcaacctcccagcaccacacatcatgccaggggttggcttaccagaacttgtaaacccaggtctgccacctcttccttccatgcctccccgaaacttacctggcattgcacctctccccctgccatccgagttcctcccgtcattccccttggttccagagagctcttctgcagcaagctcaggagagctgctgtcttccctcccgcccaccagcaacgcaccctctgaccctgccacaactactgcaaaggcagacgctgcctcctcactcactgtggatgtgacgccccccactgccaaggcccccaccaccgttgaggacagagtcggcgactccaccccagtcagcgagaagcctgtttctgcggctgtggatgccaatgcttctgagtcaccttaactttgaaccattctttggaattggcgtggtatatttaaccacgggagcgtgtctggaaacgcaaactatcattaatttcatactagtttgtaccgtatctgtaggcatcctgtaaataattccaaggggaaaactaaacgaggacgtgggttgtatcctgccaggttgagtggggctcacacgctagggtgagatgtcagaaagcgcttgtattttaaacaaccaaaaagaattgtaagggtggcttgctgccaggcttgcactgccgttcctgggggtgtgcatcttcgggaaaggtggtggcggggcgtccactaggtttcctgtcccctgctgctccttccgtaagaaaatgaaatattctatgcctaatactcacacgcaacatttcttgtactttgtaagtcgtttgcgagaatgcagaccacctcactaaactgtaaacggtaaagagatttttacttttggtctccgtgagtcgcatctctactaaggtttacacaggaattccacctgaagacttgtgttaaagttctacagcgcgcactgttaactgaacgtctttttcttcagcctatacgcggatccttgttttgagctctcagaatcactcagacaacattttgtaactgctgctgttgctttctacatacaccttataaagtgacatttcaaaagaaataaggtgccacagttttaaaccagaaggtggcactctgtggctccttgtagtattatagctatactgggaaagcatagatacagcaataaagtacagtaattttactttttttcttgtgttacatctaaattacaacccttaattgccacgtgtgcacttactactctccagtatgtcttattactctccagtatgtcacgcatctttaacttttcacgtcctatgtttgctttctcccatttttaagagatggtaagttaactggaattgatttactgaatgaaattaaatgcagatatccctgtttttgaaataagaaaaaa

SEQ ID NO: 325769 - DNA, 1207 bp, Homo sapiens
  misc_feature (1187)..(1187): n is a, c, g, or t
gtggcgctgtctgcggcgtcgcagcggcccgggctgcagcagagacgatctcccggcgggctgtgcggcccggctctccggcggcagcgagtgccacgtcccaagtgctacgcggaggattagagcaggcggtgcgctgggggcgggagcagcgcggagcccggctcggccacaccgatcgcccgccgccatgggctcctcgcaaagcgtcgagatcccgggcgggggcaccgagggctaccacgttctgcgggtacaagaaaattccccaggacacagagctggtttggagcctttctttgattttattgtttctattaatggttcaagattaaataaagacaatgacactcttaaggatctgctgaaagcaaacgttgaaaagcctgtaaagatgcttatctatagcagcaaaacattggaactgcgagagacctcagtcacaccaagtaacctgtggggcggccagggcttattgggagtgagcattcgtttctgcagctttgatggggcaaatgaaaatgtttggcatgtgctggaggtggaatcaaattctcctgcagcactggcaggtcttagaccacacagtgattatataattggagcagatacagtcatgaatgagtctgaagatctattcagccttatcgaaacacatgaagcaaaaccattgaaactgtatgtgtacaacacagacactgataactgtcgagaagtgattattacaccaaattctgcatggggtggagaaggcagcctaggatgtggcattggatatggttatttgcatcgaatacctacacgcccatttgaggaaggaaagaaaatttctcttccaggacaaatggctggtacacctattacacctcttaaagatgggtttacagaggtccagctgtcctcagttaatcccccgtctttgtcaccaccaggaactacaggaattgaacagagtctgactggactttctattagctcaactccaccagctgtcagtagtgttctcagtacaggtgtaccaacagtaccgttattgccaccacaagtaaaccagtccctcacttctgtgccaccaatgaatccagctactacattaccaggtctgatgcctttaccagcaggactgcccaacctccccaacctcaacctcaacctcccagcaccacacatctggcccgcacatcctntggcccgcacatccgtactg

SEQ ID NO: 325770 - DNA, 978 bp, Homo sapiens
aattccattccagcgtacaattccagttcgcagctatattcaattccattccagcgtagtttgtaccgtatctgtaggcatcctgtaaataattccaaggggaaaactaaacgaggacgtgggttgtatcctgccaggttgagtggggctcacacgctagggtgagatgtcagaaagcgcttgtattttaaacaaccaaaaagaattgtaagggtggcttgctgccaggcttgcactgccgttcctgggggtgtgcatcttcgggaaaggtggtggcggggcgtccactaggtttcctgtcccctgctgctccttccgtaagaaaatgaaatattctatgcctaatactcacacgcaacatttcttgtactttgtaagtcgtttgcgagaatgcagaccacctcactaaactgtaaacggtaaagagatttttacttttggtctccgtgagtcgcatctctactaaggtttacacaggaattccacctgaagacttgtgttaaagttctacagcgcgcactgttaactgaacgtctttttcttcagcctatacgcggatccttgttttgagctctcagaatcactcagacaacattttgtaactgctgctgttgctttctacatacaccttataaagtgacatttcaaaagaaataaggtgccacagttttaaaccagaaggtggcactctgtggctccttgtagtattatagctatactgggaaagcatagatacagcaataaagtacagtaattttactttttttcttgtgttacatctaaattacaacccttaattgccacgtgtgcacttactactctccagtatgtcttattactctccagtatgtcacgcatctttaacttttcacgtcctatgtttgctttctcccatttttaagagatggtaagttaactggaattgatttactgaatgaaattaaatgcagatatccctgtttttgaaataagaaaaaa

SEQ ID NO: 325771 - DNA, 694 bp, Homo sapiens
ctgatcgcttaagatccgttaaggctgatccgcttaagaaaatgaaatattctatgcctaatactcacacgcaacatttcttgtactttgtaagtcgtttgcgagaatgcagaccacctcactaaactgtaaacggtaaagagatttttacttttggtctccgtgagtcgcatctctactaaggtttacacaggaattccacctgaagacttgtgttaaagttctacagcgcgcactgttaactgaacgtctttttcttcagcctatacgcggatccttgttttgagctctcagaatcactcagacaacattttgtaactgctgctgttgctttctacatacaccttataaagtgacatttcaaaagaaataaggtgccacagttttaaaccagaaggtggcactctgtggctccttgtagtattatagctatactgggaaagcatagatacagcaataaagtacagtaattttactttttttcttgtgttacatctaaattacaacccttaattgccacgtgtgcacttactactctccagtatgtcttattactctccagtatgtcacgcatctttaacttttcacgtcctatgtttgctttctcccatttttaagagatggtaagttaactggaattgatttactgaatgaaattaaatgcagatatccctgtttttgaaataagaaaaaa

SEQ ID NO: 325772 - DNA, 1628 bp, Homo sapiens
gtggcgctgtctgcggcgtcgcagcggcccgggctgcagcagagacgatctcccggcgggctgtgcggcccggctctccggcggcagcgagtgccacgtcccaagtgctacgcggaggattagagcaggcggtgcgctgggggcgggagcagcgcggagcccggctcggccacaccgatcgcccgccgccatgggctcctcgcaaagcgtcgagatcccgggcgggggcaccgagggctaccacgttctgcgggtacaagaaaattccccaggacacagagctggtttggacttcgcattctcatgggttatctcattcacatggtctccacagcattcacacatcacacagcaccacatgcaccactccttcacaggcatctgcctgcacaagccaaacgtctgcacaaagccgtgtacacagcatgctatcatctcatcagaccagccaacacacccatggcgcaacctggcggagcagcacctcaaggtccaccacccacagctcaaccctggtggcgcgcgcgcccccagggcatctcatcaggcgcagctgccagccacattccgcctattccttgcgcaagccactactcgcactgcgggggccacaaccgtgcacacacaactgctctctgcgcccagtgggtggcactgcgcaccgcggcttggcgcaaacccccacaccacatgccactccccgctgccacagccccacaccctgcgcccaacgcgactcaccacaacagcacccccgaaccacaccaccggcggcgcaccgcacatcacacccacacccaagccgccacggccccagcacccaccccaacgacccccacagggccgcgccgggccagccccacctggcaaccccgcacacccccggcacagagcccacgagcacaccacacacactcccgcacacacacacacacgcacccgacacacgccccacgccaacaacccccaacacacgcccaccaccctcgccccacccgcctcgctaaccccaacccccacacacgccaacccaaccccggcacctcacacacccccgcggcccccgccaccccaccacgaccggcaccccccacgccgccccccacccccccacaacacctcaccctccccccccctcggcgccgcgcgcgcggccaaccccacaacgaccgccccacgcaccccgaacagcggcaaacacgcgcccgccacgacacccaaacgggccccaacactacaggcaacacaaacacaaccccagcgcacaccctccccagcacacaccgcacaccacccaccaccatcccgacgcaggacccaccacacactgaaaacaagaaaacaggcgacccccaggccaccacaccacaaccgccaacacccacgaccgcccaacgccggaaacccgacaccaacgagtgcccaccacgcacccagcaccacgacgcgacgagacctcccagcccccatcacccaccgcccccacgcaaacacaccgacgccgtcaagcaccacgcacaccggaacacccgcagctacactgcgccccaccaaaacacgacaacaacgcacaccccgccacacccacaagcggccccaccaccgacgaacccggacgacaccgcgct

SEQ ID NO: 325773 - DNA, 2817 bp, Homo sapiens
gtggcgctgtctgcggcgtcgcagcggcccgggctgcagcagagacgatctcccggcgggctgtgcggcccggctctccggcggcagcgagtgccacgtcccaagtgctacgcggaggattagagcaggcggtgcgctgggggcgggagcagcgcggagcccggctcggccacaccgatcgcccgccgccatgggctcctcgcaaagcgtcgagatcccgggcgggggcaccgagggctaccacgttctgcgggtacaagaaaattccccaggacacagagctggtttggagcctttctttgattttattgtttctattaatggttcaagattaaataaagacaatgacactcttaaggatctgctgaaagcaaacgttgaaaagcctgtaaagatgcttatctatagcagcaaaacattggaactgcgagagacctcagtcacaccaagtaacctgtggggcggccagggcttattgggagtgagcattcgtttctgcagctttgatggggcaaatgaaaatgtttggcatgtgctggaggtggaatcaaattctcctgcagcactggcaggtcttagaccacacagtgattatataattggagcagatacagtcatgaatgagtctgaagatctattcagccttatcgaaacacatgaagcaaaaccattgaaactgtatgtgtacaacacagacactgataactgtcgagaagtgattattacaccaaattctgcatggggtggagaaggcagcctaggatgtggcattggatatggttatttgcatcgaatacctacacgcccatttgaggaaggaaagaaaatttctcttccaggacaaatggctggtacacctattacacctcttaaagatgggtttacagaggtccagctgtcctcagttaatcccccgtctttgtcaccaccaggaactacaggaattgaacagagtctgactggactttctattagctcaactccaccagctgtcagtagtgttctcagtacaggtgtaccaacagtaccgttattgccaccacaagtaaaccagtccctcacttctgtgccaccaatgaatccagctactacattaccaggtctgatgcctttaccagcaggactgcccaacctccccaacctcaacctcaacctcccagcaccacacatcatgccaggggttggcttaccagaacttgtaaacccaggtctgccacctcttccttccatgcctccccgaaacttacctggcattgcacctctccccctgccatccgagttcctcccgtcattccccttggttccagagagctcttctgcagcaagctcaggagagctgctgtcttccctcccgcccaccagcaacgcaccctctgaccctgccacaactactgcaaaggcagacgctgcctcctcactcactgtggatgtgacgccccccactgccaaggcccccaccaccgttgaggacagagtcggcgactccaccccagtcagcgagaagcctgtttctgcggctgtggatgccaatgcttctgagtcaccttaactttgaaccattctttggaattggcgtggtatatttaaccacgggagcgtgtctggaaacgcaaactatcattaatttcatactagtttgtaccgtatctgtaggcatcctgtaaataattccaaggggaaaactaaacgaggacgtgggttgtatcctgccaggttgagtggggctcacacgctagggtgagatgtcagaaagcgcttgtattttaaacaaccaaaaagaattgtaagggtggcttgctgccaggcttgcactgccgttcctgggggtgtgcatcttcgggaaaggtggtggcggggcgtccactaggtttcctgtcccctgctgctccttccgtaagaaaatgaaatattctatgcctaatactcacacgcaacatttcttgtactttgtaagtcgtttgcgagaatgcagaccacctcactaaactgtaaacggtaaagagatttttacttttggtctccgtgagtcgcatctctactaaggtttacacaggaattccacctgaagacttgtgttaaagttctacagcgcgcactgttaactgaacgtctttttcttcagcctatacgcggatccttgttttgagctctcagaatcactcagacaacattttgtaactgctgctgttgctttctacatacaccttataaagtgacatttcaaaagaaataaggtgccacagttttaaaccagaaggtggcactctgtggctccttgtagtattatagctatactgggaaagcatagatacagcaataaagtacagtaattttactttttttcttgtgttacatctaaattacaacccttaattgccacgtgtgcacttactactctccagtatgtcttattactctccagtatgtcacgcatctttaacttttcacgtcctatgtttgctttctcccatttttaagagatggtaagttaactggaattgatttactgaatgaaattaaatgcagatatccctgtttttgaaataagaaaaaaaaaaaaaaaaaacacgaacaggaacgaaagcaacacaagagccaaacaaaacatcgtgctcgcgggccctcgcacgccgcagaaaagttctgcagacccagcgtggtggggcgcgcgccccagtgtgatgtgtacacgtggcacagcgtcccggaggaaactgcgccagcaaccgagcgtggcttccccccaaaaaaagcgcggcgagcggcgtcggcaacccgcaggggtcgcgcgagggatcacagagaccggcagctaca

SEQ ID NO: 325774 - DNA, 2430 bp, Homo sapiens
gtggcgctgtctgcggcgtcgcagcggcccgggctgcagcagagacgatctcccggcgggctgtgcggcccggctctccggcggcagcgagtgccacgtcccaagtgctacgcggaggattagagcaggcggtgcgctgggggcgggagcagcgcggagcccggctcggccacaccgatcgcccgccgccatgggctcctcgcaaagcgtcgagatcccgggcgggggcaccgagggctaccacgttctgcgggtacaagaaaattccccaggacacagagctggtttggagcctttctttgattttattgtttctattaatggttcaagattaaataaagacaatgacactcttaaggatctgctgaaagcaaacgttgaaaagcctgtaaagatgcttatctatagcagcaaaacattggaactgcgagagacctcagtcacaccaagtaacctgtggggcggccagggcttattgggagtgagcattcgtttctgcagctttgatggggcaaatgaaaatgtttggcatgtgctggaggtggaatcaaattctcctgcagcactggcaggtcttagaccacacagtgattatataattggagcagatacagtcatgaatgagtctgaagatctattcagccttatcgaaacacatgaagcaaaaccattgaaactgtatgtgtacaacacagacactgataactgtcgagaagtgattattacaccaaattctgcatggggtggagaaggcagcctaggatgtggcattggatatggttatttgcatcgaatacctacacgcccatttgaggaaggaaagaaaatttctcttccaggacaaatggctggtacacctattacacctcttaaagatgggtttacagaggtccagctgtcctcagttaatcccccgtctttgtcaccaccaggaactacaggaattgaacagagtctgactggactttctattagctcaactccaccagctgtcagtagtgttctcagtacaggtgtaccaacagtaccgttattgccaccacaagtaaaccagtccctcacttctgtgccaccaatgaatccagctactacattaccaggtctgatgcctttaccagcaggactgcccaacctccccaacctcaacctcaacctcccagcaccacacatcatgccaggggttggcttaccagaacttgtaaacccaggtctgccacctcttccttccatgcctccccgaaacttacctggcattgcacctctccccctgccatccgagttcctccctcctcactcactgtggatgtgacgccccccactgccaaggcccccaccaccgttgaggacagagtcggcgactccaccccagtcagcgagaagcctgtttctgcggctgtggatgccaatgcttctgagtcaccttaactttgaaccattctttggaattggcgtggtatatttaaccacgggagcgtgtctggaaacgcaaactatcattaatttcatactagtttgtaccgtatctgtaggcatcctgtaaataattccaaggggaaaactaaacgaggacgtgggttgtatcctgccaggttgagtggggctcacacgctagggtgagatgtcagaaagcgcttgtattttaaacaaccaaaaagaattgtaagggtggcttgctgccaggcttgcactgccgttcctgggggtgtgcatcttcgggaaaggtggtggcggggcgtccactaggtttcctgtcccctgctgctccttccgtaagaaaatgaaatattctatgcctaatactcacacgcaacatttcttgtactttgtaagtcgtttgcgagaatgcagaccacctcactaaactgtaaacggtaaagagatttttacttttggtctccgtgagtcgcatctctactaaggtttacacaggaattccacctgaagacttgtgttaaagttctacagcgcgcactgttaactgaacgtctttttcttcagcctatacgcggatccttgttttgagctctcagaatcactcagacaacattttgtaactgctgctgttgctttctacatacaccttataaagtgacatttcaaaagaaataaggtgccacagttttaaaccagaaggtggcactctgtggctccttgtagtattatagctatactgggaaagcatagatacagcaataaagtacagtaattttactttttttcttgtgttacatctaaattacaacccttaattgccacgtgtgcacttactactctccagtatgtcttattactctccagtatgtcacgcatctttaacttttcacgtcctatgtttgctttctcccatttttaagagatggtaagttaactggaattgatttactgaatgaaattaaatgcagatatccctgtttttgaaataagaaaaaa

SEQ ID NO: 325775 - DNA, 2357 bp, Homo sapiens
gtggcgctgtctgcggcgtcgcagcggcccgggctgcagcagagacgatctcccggcgggctgtgcggcccggctctccggcggcagcgagtgccacgtcccaagtgctacgcggaggattagagcaggcggtgcgctgggggcgggagcagcgcggagcccggctcggccacaccgatcgcccgccgccatgggctcctcgcaaagcgtcgagatcccgggcgggggcaccgagggctaccacgttctgcgggtacaagaaaattccccaggacacagagctggtttggagcctttctttgattttattgtttctattaatggttcaagattaaataaagacaatgacactcttaaggatctgctgaaagcaaacgttgaaaagcctgtaaagatgcttatctatagcagcaaaacattggaactgcgagagacctcagtcacaccaagtaacctgtggggcggccagggcttattgggagtgagcattcgtttctgcagctttgatggggcaaatgaaaatgtttggcatgtgctggaggtggaatcaaattctcctgcagcactggcaggtcttagaccacacagtgattatataattggagcagatacagtcatgaatgagtctgaagatctattcagccttatcgaaacacatgaagcaaaaccattgaaactgtatgtgtacaacacagacactgataactgtcgagaagtgattattacaccaaattctgcatggggtggagaaggcagcctaggatgtggcattggatatggttatttgcatcgaatacctacacgcccatttgaggaaggaaagaaaatttctcttccaggacaaatggctggtacacctattacacctcttaaagatgggtttacagaggtccagctgtcctcagttaatcccccgtctttgtcaccaccaggaactacaggaattgaacagagtctgactggactttctattagctcaactccaccagctgtcagtagtgttctcagtacaggtgtaccaacagtaccgttattgccaccacaagtaaaccagtccctcacttctgtgccaccaatgaatccagctactacattaccaggtctgatgcctttaccagcaggactgcccaacctccccaacctcaacctcaacctcccagcaccacacatcatgccaggggttggcttaccagaacttgtaaacccaggtctgccacctcttccttccatgcctccccgaaacttacctggcattgcacaccaccgttgaggacagagtcggcgactccaccccagtcagcgagaagcctgtttctgcggctgtggatgccaatgcttctgagtcaccttaactttgaaccattctttggaattggcgtggtatatttaaccacgggagcgtgtctggaaacgcaaactatcattaatttcatactagtttgtaccgtatctgtaggcatcctgtaaataattccaaggggaaaactaaacgaggacgtgggttgtatcctgccaggttgagtggggctcacacgctagggtgagatgtcagaaagcgcttgtattttaaacaaccaaaaagaattgtaagggtggcttgctgccaggcttgcactgccgttcctgggggtgtgcatcttcgggaaaggtggtggcggggcgtccactaggtttcctgtcccctgctgctccttccgtaagaaaatgaaatattctatgcctaatactcacacgcaacatttcttgtactttgtaagtcgtttgcgagaatgcagaccacctcactaaactgtaaacggtaaagagatttttacttttggtctccgtgagtcgcatctctactaaggtttacacaggaattccacctgaagacttgtgttaaagttctacagcgcgcactgttaactgaacgtctttttcttcagcctatacgcggatccttgttttgagctctcagaatcactcagacaacattttgtaactgctgctgttgctttctacatacaccttataaagtgacatttcaaaagaaataaggtgccacagttttaaaccagaaggtggcactctgtggctccttgtagtattatagctatactgggaaagcatagatacagcaataaagtacagtaattttactttttttcttgtgttacatctaaattacaacccttaattgccacgtgtgcacttactactctccagtatgtcttattactctccagtatgtcacgcatctttaacttttcacgtcctatgtttgctttctcccatttttaagagatggtaagttaactggaattgatttactgaatgaaattaaatgcagatatccctgtttttgaaataagaaaaaa

SEQ ID NO: 325776 - DNA, 2809 bp, Homo sapiens
cgggctggaggcggggccggccgcggggaggcggaggcccccatgggctccttcacggggcagccaggcccgatcccgcgaaggagcggcggtcgcgggcgctgccttggtcgaggctggttccggaggccgctcgcatcccacctccgcggagcgccctgggcacggggtccgcggctgtaggaggacgggctggagctggaggcggctgccggcgactcggccagggggcggccctgggaaggggggacaaccttgctctttttccgcacggccttctctctcctccaccccccctcatttttagcttccaaagttaggaagggcgcggaggcaacgtctccaaagtggtgactgtgaaggcagcctttgcgctttcctaggagagggatccggacccgcagtccggaggcggggcctgcggcggcaggtgttaaatcacctcggcgccggccgagtggcctgaaagaccagcagggcaggagacggaaaaccaaatggcctggaagtacaagaaaattccccaggacacagagctggtttggagcctttctttgattttattgtttctattaatggttcaagattaaataaagacaatgacactcttaaggatctgctgaaagcaaacgttgaaaagcctgtaaagatgcttatctatagcagcaaaacattggaactgcgagagacctcagtcacaccaagtaacctgtggggcggccagggcttattgggagtgagcattcgtttctgcagctttgatggggcaaatgaaaatgtttggcatgtgctggaggtggaatcaaattctcctgcagcactggcaggtcttagaccacacagtgattatataattggagcagatacagtcatgaatgagtctgaagatctattcagccttatcgaaacacatgaagcaaaaccattgaaactgtatgtgtacaacacagacactgataactgtcgagaagtgattattacaccaaattctgcatggggtggagaaggcagcctaggatgtggcattggatatggttatttgcatcgaatacctacacgcccatttgaggaaggaaagaaaatttctcttccaggacaaatggctggtacacctattacacctcttaaagatgggtttacagaggtccagctgtcctcagttaatcccccgtctttgtcaccaccaggaactacaggaattgaacagagtctgactggactttctattagctcaactccaccagctgtcagtagtgttctcagtacaggtgtaccaacagtaccgttattgccaccacaagtaaaccagtccctcacttctgtgccaccaatgaatccagctactacattaccaggtctgatgcctttaccagcaggactgcccaacctccccaacctcaacctcaacctcccagcaccacacatcatgccaggggttggcttaccagaacttgtaaacccaggtctgccacctcttccttccatgcctccccgaaacttacctggcattgcacctctccccctgccatccgagttcctcccgtcattccccttggttccagagagctcttctgcagcaagctcaggagagctgctgtcttccctcccgcccaccagcaacgcaccctctgaccctgccacaactactgcaaaggcagacgctgcctcctcactcactgtggatgtgacgccccccactgccaaggcccccaccaccgttgaggacagagtcggcgactccaccccagtcagcgagaagcctgtttctgcggctgtggatgccaatgcttctgagtcaccttaactttgaaccattctttggaattggcgtggtatatttaaccacgggagcgtgtctggaaacgcaaactatcattaatttcatactagtttgtaccgtatctgtaggcatcctgtaaataattccaaggggaaaactaaacgaggacgtgggttgtatcctgccaggttgagtggggctcacacgctagggtgagatgtcagaaagcgcttgtattttaaacaaccaaaaagaattgtaagggtggcttgctgccaggcttgcactgccgttcctgggggtgtgcatcttcgggaaaggtggtggcggggcgtccactaggtttcctgtcccctgctgctccttccgtaagaaaatgaaatattctatgcctaatactcacacgcaacatttcttgtactttgtaagtcgtttgcgagaatgcagaccacctcactaaactgtaaacggtaaagagatttttacttttggtctccgtgagtcgcatctctactaaggtttacacaggaattccacctgaagacttgtgttaaagttctacagcgcgcactgttaactgaacgtctttttcttcagcctatacgcggatccttgttttgagctctcagaatcactcagacaacattttgtaactgctgctgttgctttctacatacaccttataaagtgacatttcaaaagaaataaggtgccacagttttaaaccagaaggtggcactctgtggctccttgtagtattatagctatactgggaaagcatagatacagcaataaagtacagtaattttactttttttcttgtgttacatctaaattacaacccttaattgccacgtgtgcacttactactctccagtatgtcttattactctccagtatgtcacgcatctttaacttttcacgtcctatgtttgctttctcccatttttaagagatggtaagttaactggaattgatttactgaatgaaattaaatgcagatatccctgtttttgaaataagaaaaaa

SEQ ID NO: 325777 - DNA, 1522 bp, Homo sapiens
agcgagcggacctcataggtcgcaggctcacttctgtgccaccatgaatccagctactacattaccaggtctgatgcctttaccagcaggactgcccaacctccccaacctcaacctcaacctcccagcaccacacatcatgccaggggttggcttaccagaacttgtaaacccaggtctgccacctcttccttccatgcctccccgaaacttacctggcattgcacctctccccctgccatccgagttcctcccgtcattccccttggttccagagagctcttctgcagcaagctcaggagagctgctgtcttccctcccgcccaccagcaacgcaccctctgaccctgccacaactactgcaaaggcagacgctgcctcctcactcactgtggatgtgacgccccccactgccaaggcccccaccaccgttgaggacagagtcggcgactccaccccagtcagcgagaagcctgtttctgcggctgtggatgccaatgcttctgagtcaccttaactttgaaccattctttggaattggcgtggtatatttaaccacgggagcgtgtctggaaacgcaaactatcattaatttcatactagtttgtaccgtatctgtaggcatcctgtaaataattccaaggggaaaactaaacgaggacgtgggttgtatcctgccaggttgagtggggctcacacgctagggtgagatgtcagaaagcgcttgtattttaaacaaccaaaaagaattgtaagggtggcttgctgccaggcttgcactgccgttcctgggggtgtgcatcttcgggaaaggtggtggcggggcgtccactaggtttcctgtcccctgctgctccttccgtaagaaaatgaaatattctatgcctaatactcacacgcaacatttcttgtactttgtaagtcgtttgcgagaatgcagaccacctcactaaactgtaaacggtaaagagatttttacttttggtctccgtgagtcgcatctctactaaggtttacacaggaattccacctgaagacttgtgttaaagttctacagcgcgcactgttaactgaacgtctttttcttcagcctatacgcggatccttgttttgagctctcagaatcactcagacaacattttgtaactgctgctgttgctttctacatacaccttataaagtgacatttcaaaagaaataaggtgccacagttttaaaccagaaggtggcactctgtggctccttgtagtattatagctatactgggaaagcatagatacagcaataaagtacagtaattttactttttttcttgtgttacatctaaattacaacccttaattgccacgtgtgcacttactactctccagtatgtcttattactctccagtatgtcacgcatctttaacttttcacgtcctatgtttgctttctcccatttttaagagatggtaagttaactggaattgatttactgaatgaaattaaatgcagatatccctgtttttgaaataagaaaaaa

SEQ ID NO: 325778 - DNA, 1666 bp, Homo sapiens
  misc_feature (1549)..(1549): n is a, c, g, or t
gtggcgctgtctgcggcgtcgcagcggcccgggctgcagcagagacgatctcccggcgggctgtgcggcccggctctccggcggcagcgagtgccacgtcccaagtgctacgcggaggattagagcaggcggtgcgctgggggcgggagcagcgcggagcccggctcggccacaccgatcgcccgccgccatgggctcctcgcaaagcgtcgagatcccgggcgggggcaccgagggctaccacgttctgcgggtacaagaaaattccccaggacacagagctggtttggagcctttctttgattttattgtttctattaatggttcaagattaaataaagacaatgacactcttaaggatctgctgaaagcaaacgttgaaaagcctgtaaagatgcttatctatagcagcaaaacattggaactgcgagagacctcagtcacaccaagtaacctgtggggcggccagggcttattgggagtgagcattcgtttctgcagctttgatggggcaaatgaaaatgtttggcatgtgctggaggtggaatcaaattctcctgcagcactggcaggtcttagaccacacagtgattatataattggagcagatacagtcatgaatgagtctgaagatctattcagccttatcgaaacacatgaagcaaaaccattgaaactgtatgtgtacaacacagacactgataactgtcgagaagtgattattacaccaaattctgcatggggtggagaaggcagcctaggatgtggcattggatatggttatttgcatcgaatacctacacgcccatttgaggaaggaaagaaaatttctcttccaggacaaatggctggtacacctattacacctcttaaagatgggtttacagaggtccagctgtcctcagttaatcccccgtctttgtcaccaccaggaactacaggaattgaacagagtctgactggactttctattagctcaactccaccagctgtcagtagtgttctcagtacaggtgtaccaacagtaccgttattgccaccacaagtaaaccagtccctcacttctgtgccaccaatgaatccagctactacattaccaggtctgatgcctttaccagcaggactgcccaacctccccaacctcaacctcaacctcccagcaccacacatcatgccaggggttggcttaccagaacttgtaaacccaggtctgccacctcttccttccatgcctccccgaaacttacctggcattgcacctctccccctgccatccgagttcctcccgtcattccccttggttccagagagctcttctgcagcaagctcaggagagctgctgtcttccctcccgcccaccagcaacgcaccctctgaccctgccacaactactgcaaaggcagacgctgcctcctcactcactgtggatgtgacgccccccactgccaaggcccccgcgcctctgctgagaacacagcatcatcgtacccgccagcatctcagacacaaactgcctgggccctattaaggaccgtcatctgggcttagnccgtcgtgagacaggttagttttaccctactgatgatgtgttgatgccatcgcattcctgctcagtacatatcgttactctcatactagcttgtaccgtatgtgctcggcagcgagg

SEQ ID NO: 325779 - DNA, 612 bp, Homo sapiens
gacccggaagcggtcgccggcggccggccggcggtcatccttcacacaggcccggctgcggagcgcagtcgcccaggtttacggcggcagagggccgaggctcccggagaggaccgcgatgagtccacttcaggtcggggctgagtgtgggcgcgcggttcccggcggcgtgtgacccagtcttcgccggccgctgcccgctgcgtgttacgagacagcccttgacggtgaaaacagcagcggcctgcagcagctggcctaccacactgtgaatcgtcgctatcgggagttcttgaatctgcagacccgtctggaggagaaaccagatctacgaaagttcatcaaaaatgtgaagggtcctaaaaagctctttccagatcttccatttggaaacatggacagtgacagagtagaagcccgtaagagcctcctagaatcattcctaaagcaactctgtgccattccagagatcgctaacagtgaggaggtgcaggagttccttgctctgaacacagatgctcgtattgcctttgtcaagaaaccatttatggtctctagaatagacaaggtgttaccgatttggaaactagaaatcacctttttacttaaaaa

SEQ ID NO: 325780 - DNA, 6385 bp, Homo sapiens
gacccggaagcggtcgccggcggccggccggcggtcatccttcacacaggcccggctgcggagcgcagtcgcccaggtttacggcggcagagggccgaggctcccggagaggaccgcgatgagtccacttcaggtcggggctgagtgtgggcgcgcggttcccggcggcgtgtgacccagtcttcgccggccgctgcccgctgcgtgtgtaagtgtccgtgggccccagggccttgcagcgcccgccccgaggccccgaagaggccttccgcctggggcagtgtgaaggccacagagttttcctccaaagccacacctcagctggaaggggcgagttggagggctctgttagtggtagccatggggagacgcggagctgcagctgtcgctttgcagtgcctgtaggactttgagggcctggagccccggttccctgaacagcacccagatcgccccatatctgagacacagttcatgccccccttccctaactctgaagtaaaatcttgagggctgtcatctggggaagccaccttgtccgttcagccatgaagacagaaacagtgccaccgttccaggaaactccagctggatcgagctgtcacctcaataacctgttgagtagccggaagctgatggctgtgggggtcttgcttggctggctcctggtcatacaccttctggtcaacgtgtggctgctgtgccttctgtcggcattgctagtggtgctgggaggatggctgggctccagcctcgctggagtggcttcaggtcgactgcatctggaacgcttcatcccgttggccacctgtcctccatgccctgaggcagaaaggcagctggaacgggagatcaaccgcaccatccagatgattattcgagattttgtgttatcttggtaccgttccgtgagccaggagccagcctttgaggaagaaatggaggcagccatgaaagggttggtccaggagcttcggagaaggatgagcgtgatggacagtcatgctgttgcccagagtgttctgactctctgcggttgtcacctgcagagctacattcaggcaaaggaggccactgcagggaagaatggtccagttgagccttcccacctctgggaggcttactgccgggcgactgccccacatcctgctgtgcacagccccagtgctgaagtcacctatacgcgtggcgttgtgaatttgttgcttcaagggctggtgcccaagccccacttggagactcgtaccggacgccatgtagtggtcgaactcatcacatgcaatgtaatcttaccactgatcagcaggctgtcagatcctgactggatccaccttgtactcgtgggtatcttttccaaggccagagatccagcaccctgcccagccagtgcccccgaacagccctcagtgcccacatctctgccactgattgctgaggtagagcagcttccagaagggagagcttctccagtagcagccccagtattcctaagttacagtgagccagagggttctgcaggcccctctccagaggttgaagaaggccacgaagctgtagagggagatttgggtgggatgtgtgaagaaagaaaagtaggaaacaactcatctcatttcctacagccaaatcttcgaggtcccctgttcttatgtgaagactcagagctggagtctccgctgtctgaactgggcaaagaaaccatcatgctcatgactccaggcagctttctctctgacaggattcaggatgccctgtgtgccctagagagttcccaggctctggaacccaaagatggtgaggcatctgaaggagcagaggctgaggagggtccagggacagaaacagagacaggcctgccggtctccacactgaattcctgcccagagatccatattgacacagcagacaaggagatagaacaaggagatgttaccgcctctgttacagctttgctggaggggccagaaaagacctgcccctcacggccgtcatgcttagagaaggatctcaccaatgatgtgagctcccttgatcctactctgccaccagttctgctttcctcctctccacctggtcctctcagctcagccaccttcagctttgagcccctaagcagtcccgatggtccagttatcatccagaaccttcgtatcactggcaccattacagcccgagagcacagtggcactggattccacccatacacactctatactgtgaagtacgagacagcccttgacggtgaaaacagcagcggcctgcagcagctggcctaccacactgtgaatcgtcgctatcgggagttcttgaatctgcagacccgtctggaggagaaaccagatctacgaaagttcatcaaaaatgtgaagggtcctaaaaagctctttccagatcttccatttggaaacatggacagtgacagagtagaagcccgtaagagcctcctagaatcattcctaaagcaactctgtgccattccagagatcgctaacagtgaggaggtgcaggagttccttgctctgaacacagatgctcgtattgcctttgtcaagaaaccatttatggtctctagaatagacaagatggtggtgagtgccattgtggacaccttgaagacagcgtttcctcgctctgaaccccagagccccacagaggagctgagtgaggccgagaccgaaagcaagccccagacagaaggcaagaaggctagcaagtccaggctgaggttctcatccagtaaaatttctccagcactaagtgtgactgaagcacaagacaagattctttattgtctccaggaaggcagtgtggagtctgagactctatccatgtctgcgatggaatcttttattgaaaaacagacaaagttactggaaatgcagccaacaaaagccccagaaaaagatcctgaacaacctcccaaaggacgtgtggacagttgcgtgtcagatgcagccgtgccagcccaagaccccagcaacagcgatccaggaacagagacagagttagctgacacagccctggatctgctcctcttgctactaacagaacagtggaaatggctatgtaccgaaaacatgcaaaagtttcttcgtcttatctttgggaccctagttcaaaggtggctagaggtgcaggtagctaatttaacaagtccacagcgctgggtgcagtacctccggcttcttcaggagtccatctggcctggtggagttttgcctaagtttccacggcccgtaaggacccaagagcagaaactggctgctgagaaacaggctttgcagagcctgatgggagtcctcccagatctcgtagtagaaattcttggggtgaacaaatgccggctgagctggggtctagtcctggagtcactacaacaacccctcatcaacaggcatttgatttactgccttggggacatcatcctggaattcttggatctcagtgcctctgttgaggagtctgctgctaccacctctgcctcagataccccaggcaactctaagaggatgggtgtctcctcttagctggttattcacgccttcttcccaggtcagggaagtagagttactcggccaccagagaccagtcaggaagcccgtgccctcttcaagtaggctacagctaagaaggcctaggttctcggtggctcacttctctcccacttctgctccatttgtagcaggtgacaggggtctgtgtgtcccagttgcatgcacgtttatttccctgttccttttgtgatgttgggattgttgctggtgagtagatcctgtttcctttgggaaaagaagctgtgaggtagaggaatgaaccccttttgcttctccttttgccatcctccctgagattgtttgccagaatcctggccctgtgcacacatgtgcttaatccaccagcacacaagctctagatagaacaggaaaaaaactgtggccagatttccttggaggagaaaacaaccttctcagctctctgttcctacccggaaactaaaaattcattcagggccattctcaaaaaccagactcctgggtctaatctagtttcccaacagttccagaagaagaaggagggaagaaaatttttcaaggaacttcttgctcatgtgttgctgtttcccaacacatcagccttatggaagatgtcatgaggctgcttgcctgggaggctacactttcctttccagaagacttcaaagctgactgccaaagcttctggtaaatccaccccacccttcacaccctttcctgaaaggcatttataccacccattttatttattggctttgctcccaaccccctgccctagagcaattgagtttttgaatttttgaccctctctctgtcttcagcaaaactgcatgacaagctgcatattcagcctcagtttttccaaggagaatggaaagcacttgcctcctgtcttaagaatgcacaaagagtaggactagcaaggctgggggatgaaatctcccttcctaagtctttgacagagaacttttattattctgaacagataagattagcaaacttacaaggaatagcttcttatttcccattccttacggttataatcagtcctttaacaacaccagcatgaaggcaaaggtgttttgtcagactgcaacatctattagaaaggcaaggcaactgggaattgctggagaaggataaatcaggaggaattgctggtagaaaaggctgcagacagtcacagggaagtgctgtatattaaatgcatgtgaatagctggcaaaaagatgtcaaggatgtcactgggagccctttggcttcacactcgcctgttagcgccttgctttcgctgaattaccagagcctaccactcggaggaaggtcttggagttagactgatgagaaggcaatggggtgtcaaaaacaagtgtcaaagttctcttagattctgaagtcggtgatgagcacacaattaaagtggtttgtggaagaaagttgtaaaatctttttacttttttgcccctctggaggcttttaaccctaaattgtgtctgatgtattcgggaggcttaggtgtgcaattcttgcccaaaggcaaggagatgaatgagatgtctcatggcctcttctagccttaaaagttgaccattacagtgactttatggctccaaagttcttgaagcatctccagccctagactttgacaagaaaaggtagctcagcatctctactttccgtgagtacctgcaggagtccagccaatgtattagagctgatcattaagctccttcagtgagggctaagatcctattctcgatgagcatagggggacagccttgttttatgccacttttctctccccataccttcccctcatgtgtacttagccacctgtgttgctttgaatctgctgccagttctggctcaaatgtggcacaaaatcagtacatcagacacaccatgaaatccctgtggctataaattctaaggaatcttttgacacttccagcccaaagaacttatttttatttcgtattatataagagtccccacctctactccacgtaccccaaaaagataagctgtcctcagatcctccttctacccaggagggaaataatggatattgccaagggaacaatcagaactcatctggctttgaaaacgacctgccaagtttggctagcaggttcagacaacaagagagtaacaattggtagagagccacaggtagggaaaagatactcccagctgacagggtgataaaaggcagggaagaattgggcctgtgctgatccaggaaggttttattgtttgcttgttttttgtatttactcgtgactaaattttattcatttaagtcagaattttgatatttgaaataagactactttcccttttcttactatctataaaaaagacgaggcagggatgctgtgttctttctgtcaaattctaaatgtgatctttgccattgcttatttgaattcaagaaagctatactttttcatcacatataactcacagtttcatttttgcattgttggattagacttaataaaacctaaatggaaaataaattcctaaatctgagcctaggagcatgtataaattttatttttattattattatacattaagttctagggaacatgtgcacaacatgcaggtttgttgcatatgtatacatgtgccgtgttggtgtgctgcacccgttaactcgtcatttacattaggtatatctcctgatgctatcccttccccctcccccgacctcacaacaggccccagtgtgtgatgttcaccttcctgtgtccaagtgttctcattgttcaattcccacctatgagtgagagcatgtataaattttaaaatcaatacaagctactccaatttccattttggaaatt

SEQ ID NO: 325781 - DNA, 5883 bp, Homo sapiens
gacccggaagcggtcgccggcggccggccggcggtcatccttcacacaggcccggctgcggagcgcagtcgcccaggtttacggcggcagagggccgaggctcccggagaggaccgcgatgagtccacttcaggtcggggctgagtgtgggcgcgcggttcccggcggcgtgtgacccagtcttcgccggccgctgcccgctgcgtgtgtaagtgtccgtgggccccagggccttgcagcgcccgccccgaggccccgaagaggccttccgcctggggcagtgtgaaggccacagagttttcctccaaagccacacctcagctggaaggggcgagttggagggctctgttagtggtagccatggggagacgcggagctgcagctgtcgctttgcagtgcctgtaggactttgagggcctggagccccggttccctgaacagcacccagatcgccccatatctgagacacagttcatgccccccttccctaactctgaagtaaaatcttgagggctgtcatctggggaagccaccttgtccgttcagccatgaagacagaaacagtgccaccgttccaggaaactccagctggatcgagctgtcacctcaataacctgttgagtagccggaagctgatggctgtgggggtcttgcttggctggctcctggtcatacaccttctggtcaacgtgtggctgctgtgccttctgtcggcattgctagtggtgctgggaggatggctgggctccagcctcgctggagtggcttcaggtcgactgcatctggaacgcttcatcccgttggccacctgtcctccatgccctgaggcagaaaggcagctggaacgggagatcaaccgcaccatccagatgattattcgagattttgtgttatcttggtaccgttccgtgagccaggagccagcctttgaggaagaaatggaggcagccatgaaagggttggtccaggagcttcggagaaggatgagcgtgatggacagtcatgctgttgcccagagtgttctgactctctgcggttgtcacctgcagagctacattcaggcaaaggaggccactgcagggaagaatggtccagttgagccttcccacctctgggaggcttactgccgggcgactgccccacatcctgctgtgcacagccccagtgctgaagtcacctatacgcgtggcgttgtgaatttgttgcttcaagggctggtgcccaagccccacttggagactcgtaccggacgccatgtagtggtcgaactcatcacatgcaatgtaatcttaccactgatcagcaggctgtcagatcctgactggatccaccttgtactcgtgggtatcttttccaaggccagagatccagcaccctgcccagccagtgcccccgaacagccctcagtgcccacatctctgccactgattgctgaggtagagcagcttccagaagggagagcttctccagtagcagccccagtattcctaagttacagtgagccagagggttctgcaggcccctctccagaggttgaagaaggccacgaagctgtagagggagatttgggtgggatgtgtgaagaaagaaaagtaggaaacaactcatctcatttcctacagccaaatcttcgaggtcccctgttcttatgtgaagactcagagctggagtctccgctgtctgaactgggcaaagaaaccatcatgctcatgactccaggcagctttctctctgacaggattcaggatgccctgtgtgccctagagagttcccaggctctggaacccaaagatggtgaggcatctgaaggagcagaggctgaggagggtccagggacagaaacagagacaggcctgccggtctccacactgaattcctgcccagagatccatattgacacagcagacaaggagatagaacaaggagatgttaccgcctctgttacagctttgctggaggggccagaaaagacctgcccctcacggccgtcatgcttagagaaggatctcaccaatgatgtgagctcccttgatcctactctgccaccagttctgctttcctcctctccacctggtcctctcagctcagccaccttcagctttgagcccctaagcagtcccgatggtccagttatcatccagaaccttcgtatcactggcaccattacagcccgagagcacagtggcactggattccacccatacacactctatactgtgaagtacgagacagcccttgacggtgaaaacagcagcggcctgcagcagctggcctaccacactgtgaatcgtcgctatcgggagttcttgaatctgcagacccgtctggaggagaaaccagatctacgaaagttcatcaaaaatgtgaagggtcctaaaaagctctttccagatcttccatttggaaacatggacagtgacagagtagaagcccgtaagagcctcctagaatcattcctaaagcaactctgtgccattccagagatcgctaacagtgaggaggtgcaggagttccttgctctgaacacagatgctcgtattgcctttgtcaagaaaccatttatggtctctagaatagacaagatggtggtgagtgccattgtggacaccttgaagacagcgtttcctcgctctgaaccccagagccccacagaggagctgagtgaggccgagaccgaaagcaagccccagacagaaggcaagaaggctagcaagtccaggctgaggttctcatccagtaaaatttctccagcactaagtgtgactgaagcacaagacaagattctttattgtctccaggaaggcagtgtggagtctgagactctatccatgtctgcgatggaatcttttattgaaaaacagacaaagttactggaaatgcagccaacaaaagccccagaaaaagatcctgaacaacctcccaaaggacgtgtggacagttgcgtgtcagatgcagccgtgccagcccaagaccccagcaacagcgatccaggaacagagacagagttagctgacacagccctggatctgctcctcttgctactaacagaacagtggaaatggctatgtaccgaaaacatgcaaaagtttcttcgtcttatctttgggaccctagttcaaagatctcgtagtagaaattcttggggtgaacaaatgccggctgagctggggtctagtcctggagtcactacaacaacccctcatcaacaggcatttgatttactgccttggggacatcatcctggaattcttggatctcagtgcctctgttgaggagtctgctgctaccacctctgcctcagataccccaggcaactctaagaggatgggtgtctcctcttagctggttattcacgccttcttcccaggtcagggaagtagagttactcggccaccagagaccagtcaggaagcccgtgccctcttcaagtaggctacagctaagaaggcctaggttctcggtggctcacttctctcccacttctgctccatttgtagcaggtgacaggggtctgtgtgtcccagttgcatgcacgtttatttccctgttccttttgtgatgttgggattgttgctggtgagtagatcctgtttcctttgggaaaagaagctgtgaggtagaggaatgaaccccttttgcttctccttttgccatcctccctgagattgtttgccagaatcctggccctgtgcacacatgtgcttaatccaccagcacacaagctctagatagaacaggaaaaaaactgtggccagatttccttggaggagaaaacaaccttctcagctctctgttcctacccggaaactaaaaattcattcagggccattctcaaaaaccagactcctgggtctaatctagtttcccaacagttccagaagaagaaggagggaagaaaatttttcaaggaacttcttgctcatgtgttgctgtttcccaacacatcagccttatggaagatgtcatgaggctgcttgcctgggaggctacactttcctttccagaagacttcaaagctgactgccaaagcttctggtaaatccaccccacccttcacaccctttcctgaaaggcatttataccacccattttatttattggctttgctcccaaccccctgccctagagcaattgagtttttgaatttttgaccctctctctgtcttcagcaaaactgcatgacaagctgcatattcagcctcagtttttccaaggagaatggaaagcacttgcctcctgtcttaagaatgcacaaagagtaggactagcaaggctgggggatgaaatctcccttcctaagtctttgacagagaacttttattattctgaacagataagattagcaaacttacaaggaatagcttcttatttcccattccttacggttataatcagtcctttaacaacaccagcatgaaggcaaaggtgttttgtcagactgcaacatctattagaaaggcaaggcaactgggaattgctggagaaggataaatcaggaggaattgctggtagaaaaggctgcagacagtcacagggaagtgctgtatattaaatgcatgtgaatagctggcaaaaagatgtcaaggatgtcactgggagccctttggcttcacactcgcctgttagcgccttgctttcgctgaattaccagagcctaccactcggaggaaggtcttggagttagactgatgagaaggcaatggggtgtcaaaaacaagtgtcaaagttctcttagattctgaagtcggtgatgagcacacaattaaagtggtttgtggaagaaagttgtaaaatctttttacttttttgcccctctggaggcttttaaccctaaattgtgtctgatgtattcgggaggcttaggtgtgcaattcttgcccaaaggcaaggagatgaatgagatgtctcatggcctcttctagccttaaaagttgaccattacagtgactttatggctccaaagttcttgaagcatctccagccctagactttgacaagaaaaggtagctcagcatctctactttccgtgagtacctgcaggagtccagccaatgtattagagctgatcattaagctccttcagtgagggctaagatcctattctcgatgagcatagggggacagccttgttttatgccacttttctctccccataccttcccctcatgtgtacttagccacctgtgttgctttgaatctgctgccagttctggctcaaatgtggcacaaaatcagtacatcagacacaccatgaaatccctgtggctataaattctaaggaatcttttgacacttccagcccaaagaacttatttttatttcgtattatataagagtccccacctctactccacgtaccccaaaaagataagctgtcctcagatcctccttctacccaggagggaaataatggatattgccaagggaacaatcagaactcatctggctttgaaaacgacctgccaagtttggctagcaggttcagacaacaagagagtaacaattggtagagagccacaggtagggaaaagatactcccagctgacagggtgataaaaggcagggaagaattgggcctgtgctgatccaggaaggttttattgtttgcttgttttttgtatttactcgtgactaaattttattcatttaagtcagaattttgatatttgaaataagactactttcccttttcttactatctataaaaaagacgaggcagggatgctgtgttctttctgtcaaattctaaatgtgatctttgccattgcttatttgaattcaagaaagctatactttttcatcacatataactcacagtttcatttttgcattgttggattagacttaataaaacctaaatggaaaataaattcctaaatctga

SEQ ID NO: 325782 - DNA, 4236 bp, Homo sapiens
gacccggaagcggtcgccggcggccggccggcggtcatccttcacacaggcccggctgcggagcgcagtcgcccaggtttacggcggcagagggccgaggctcccggagaggaccgcgatgagtccacttcaggtcggggctgagtgtgggcgcgcggttcccggcggcgtgtgacccagtcttcgccggccgctgcccgctgcgtgttacgagacagcccttgacggtgaaaacagcagcggcctgcagcagctggcctaccacactgtgaatcgtcgctatcgggagttcttgaatctgcagacccgtctggaggagaaaccagatctacgaaagttcatcaaaagtcaggagtttccccaacccctactgcccgcttgcttcccacgtcgagccacgctgattggcctgttggtttatgggagggatcggggaggagaatgccgtttcaaggttctctgctccctggatttgcttcaggagttttgaagtttagtgctggacagcagcaatcacattctttcagagatgtgaagggtcctaaaaagctctttccagatcttccatttggaaacatggacagtgacagagtagaagcccgtaagagcctcctagaatcattcctaaagcaactctgtgccattccagagatcgctaacagtgaggaggtgcaggagttccttgctctgaacacagatgctcgtattgcctttgtcaagaaaccatttatggtctctagaatagacaagatggtggtgagtgccattgtggacaccttgaagacagcgtttcctcgctctgaaccccagagccccacagaggagctgagtgaggccgagaccgaaagcaagccccagacagaaggcaagaaggctagcaagtccaggctgaggttctcatccagtaaaatttctccagcactaagtgtgactgaagcacaagacaagattctttattgtctccaggaaggcagtgtggagtctgagactctatccatgtctgcgatggaatcttttattgaaaaacagacaaagttactggaaatgcagccaacaaaagccccagaaaaagatcctgaacaacctcccaaaggacgtgtggacagttgcgtgtcagatgcagccgtgccagcccaagaccccagcaacagcgatccaggaacagagacagagttagctgacacagccctggatctgctcctcttgctactaacagaacagtggaaatggctatgtaccgaaaacatgcaaaagtttcttcgtcttatctttgggaccctagttcaaaggtggctagaggtgcaggtagctaatttaacaagtccacagcgctgggtgcagtacctccggcttcttcaggagtccatctggcctggtggagttttgcctaagtttccacggcccgtaaggacccaagagcagaaactggctgctgagaaacaggctttgcagagcctgatgggagtcctcccagatctcgtagtagaaattcttggggtgaacaaatgccggctgagctggggtctagtcctggagtcactacaacaacccctcatcaacaggcatttgatttactgccttggggacatcatcctggaattcttggatctcagtgcctctgttgaggagtctgctgctaccacctctgcctcagataccccaggcaactctaagaggatgggtgtctcctcttagctggttattcacgccttcttcccaggtcagggaagtagagttactcggccaccagagaccagtcaggaagcccgtgccctcttcaagtaggctacagctaagaaggcctaggttctcggtggctcacttctctcccacttctgctccatttgtagcaggtgacaggggtctgtgtgtcccagttgcatgcacgtttatttccctgttccttttgtgatgttgggattgttgctggtgagtagatcctgtttcctttgggaaaagaagctgtgaggtagaggaatgaaccccttttgcttctccttttgccatcctccctgagattgtttgccagaatcctggccctgtgcacacatgtgcttaatccaccagcacacaagctctagatagaacaggaaaaaaactgtggccagatttccttggaggagaaaacaaccttctcagctctctgttcctacccggaaactaaaaattcattcagggccattctcaaaaaccagactcctgggtctaatctagtttcccaacagttccagaagaagaaggagggaagaaaatttttcaaggaacttcttgctcatgtgttgctgtttcccaacacatcagccttatggaagatgtcatgaggctgcttgcctgggaggctacactttcctttccagaagacttcaaagctgactgccaaagcttctggtaaatccaccccacccttcacaccctttcctgaaaggcatttataccacccattttatttattggctttgctcccaaccccctgccctagagcaattgagtttttgaatttttgaccctctctctgtcttcagcaaaactgcatgacaagctgcatattcagcctcagtttttccaaggagaatggaaagcacttgcctcctgtcttaagaatgcacaaagagtaggactagcaaggctgggggatgaaatctcccttcctaagtctttgacagagaacttttattattctgaacagataagattagcaaacttacaaggaatagcttcttatttcccattccttacggttataatcagtcctttaacaacaccagcatgaaggcaaaggtgttttgtcagactgcaacatctattagaaaggcaaggcaactgggaattgctggagaaggataaatcaggaggaattgctggtagaaaaggctgcagacagtcacagggaagtgctgtatattaaatgcatgtgaatagctggcaaaaagatgtcaaggatgtcactgggagccctttggcttcacactcgcctgttagcgccttgctttcgctgaattaccagagcctaccactcggaggaaggtcttggagttagactgatgagaaggcaatggggtgtcaaaaacaagtgtcaaagttctcttagattctgaagtcggtgatgagcacacaattaaagtggtttgtggaagaaagttgtaaaatctttttacttttttgcccctctggaggcttttaaccctaaattgtgtctgatgtattcgggaggcttaggtgtgcaattcttgcccaaaggcaaggagatgaatgagatgtctcatggcctcttctagccttaaaagttgaccattacagtgactttatggctccaaagttcttgaagcatctccagccctagactttgacaagaaaaggtagctcagcatctctactttccgtgagtacctgcaggagtccagccaatgtattagagctgatcattaagctccttcagtgagggctaagatcctattctcgatgagcatagggggacagccttgttttatgccacttttctctccccataccttcccctcatgtgtacttagccacctgtgttgctttgaatctgctgccagttctggctcaaatgtggcacaaaatcagtacatcagacacaccatgaaatccctgtggctataaattctaaggaatcttttgacacttccagcccaaagaacttatttttatttcgtattatataagagtccccacctctactccacgtaccccaaaaagataagctgtcctcagatcctccttctacccaggagggaaataatggatattgccaagggaacaatcagaactcatctggctttgaaaacgacctgccaagtttggctagcaggttcagacaacaagagagtaacaattggtagagagccacaggtagggaaaagatactcccagctgacagggtgataaaaggcagggaagaattgggcctgtgctgatccaggaaggttttattgtttgcttgttttttgtatttactcgtgactaaattttattcatttaagtcagaattttgatatttgaaataagactactttcccttttcttactatctataaaaaagacgaggcagggatgctgtgttctttctgtcaaattctaaatgtgatctttgccattgcttatttgaattcaagaaagctatactttttcatcacatataactcacagtttcatttttgcattgttggattagacttaataaaacctaaatggaaaataaattcctaaatctga

SEQ ID NO: 325783 - DNA, 5348 bp, Homo sapiens
gacccggaagcggtcgccggcggccggccggcggtcatccttcacacaggcccggctgcggagcgcagtcgcccaggtttacggcggcagagggccgaggctcccggagaggaccgcgatgagtccacttcaggtcggggctgagtgtgggcgcgcggttcccggcggcgtgtgacccagtcttcgccggccgctgcccgctgcgtgtgtaagtgtccgtgggccccagggccttgcagcgcccgccccgaggccccgaagaggccttccgcctggggcagtgtgaaggccacagagttttcctccaaagccacacctcagctggaaggggcgagttggagggctctgttagtggtagccatggggagacgcggagctgcagctgtcgctttgcagtgcctgtaggactttgagggcctggagccccggttccctgaacagcacccagatcgccccatatctgagacacagttcatgccccccttccctaactctgaagtaaaatcttgagggctgtcatctggggaagccaccttgtccgttcagccatgaagacagaaacagtgccaccgttccaggaaactccagctggatcgagctgtcacctcaataacctgttgagtagccggaagctgatggctgtgggggtcttgcttggctggctcctggtcatacaccttctggtcaacgtgtggctgctgtgccttctgtcggcattgctagtggtgctgggaggatggctgggctccagcctcgctggagtggcttcaggtcgactgcatctggaacgcttcatcccgttggccacctgtcctccatgccctgaggcagaaaggcagctggaacgggagatcaaccgcaccatccagatgattattcgagattttgtgttatcttggtaccgttccgtgagccaggagccagcctttgaggaagaaatggaggcagccatgaaagggttggtccaggagcttcggagaaggatgagcgtgatggacagtcatgctgttgcccagagtgttctgactctctgcggttgtcacctgcagagctacattcaggcaaaggaggccactgcagggaagaatggtccagttgagccttcccacctctgggaggcttactgccgggcgactgccccacatcctgctgtgcacagccccagtgctgaagtcacctatacgcgtggcgttgtgaatttgttgcttcaagggctggtgcccaagccccacttggagactcgtaccggacgccatgtagtggtcgaactcatcacatgcaatgtaatcttaccactgatcagcaggctgtcagatcctgactggatccaccttgtactcgtgggtatcttttccaaggccagagatccagcaccctgcccagccagtgcccccgaacagccctcagtgcccacatctctgccactgattgctgaggtagagcagcttccagaagggagagcttctccagtagcagccccagtattcctaagttacagtgagccagagggttctgcaggcccctctccagaggttgaagaaggccacgaagctgtagagggagatttgggtgggatgtgtgaagaaagaaaagtaggaaacaactcatctcatttcctacagccaaatcttcgaggtcccctgttcttatgtgaagactcagagctggagtctccgctgtctgaactgggcaaagaaaccatcatgctcatgactccaggcagctttctctctgacaggattcaggatgccctgtgtgccctagagagttcccaggctctggaacccaaagatggtgaggcatctgaaggagcagaggctgaggagggtccagggacagaaacagagacaggcctgccggtctccacactgaattcctgcccagagatccatattgacacagcagacaaggagatagaacaaggagatgttaccgcctctgttacagctttgctggaggggccagaaaagacctgcccctcacggccgtcatgcttagagaaggatctcaccaatgatgtgagctcccttgatcctactctgccaccagttctgctttcctcctctccacctggtcctctcagctcagccaccttcagctttgagcccctaagcagtcccgatggtccagttatcatccagaaccttcgtatcactggcaccattacagcccgagagcacagtggcactggattccacccatacacactctatactgtgaagtacgagacagcccttgacggtgaaaacagcagcggcctgcagcagctggcctaccacactgtgaatcgtcgctatcgggagttcttgaatctgcagacccgtctggaggagaaaccagatctacgaaagttcatcaaaaatgtgaagggtcctaaaaagctctttccagatcttccatttggaaacatggacagtgacagagtagaagcccgtaagagcctcctagaatcattcctaaagcaactctgtgccattccagagatcgctaacagtgaggaggtgcaggagttccttgctctgaacacagatgctcgtattgcctttgtcaagaaaccatttatggtctctagaatagacaagatggtggtgagtgccattgtggacaccttgaagacagcgtttcctcgctctgaaccccagagccccacagaggagctgagtgaggccgagaccgaaagcaagccccagacagaaggcaagaaggctagcaagtccaggctgaggttctcatccagtaaaatttctccagcactaagtgtgactgaagcacaagacaagattctttattgtctccaggaaggcagtgtggagtctgagactctatccatgtctgcgatggaatcttttattgaaaaacagacaaagttactggaaatgcagccaacaaaagccccagaaaaagatcctgaacaacctcccaaaggacgtgtggacagttgcgtgtcagatgcagccgtgccagcccaagaccccagcaacagcgatccaggaacagagacagagttagctgacacagccctggatctgctcctcttgctactaacagaacagtggaaatggctatgtaccgaaaacatgcaaaagtttcttcgtcttatctttgggaccctagttcaaaggtggctagaggtgcaggtagctaatttaacaagtccacagcgctgggtgcagtacctccggcttcttcaggagtccatctggcctggtggagttttgcctaagtttccacggcccgtaaggacccaagagcagaaactggctgctgagaaacaggctttgcagagcctgatgggagtcctcccagatctcgtagtagaaattcttggggtgaacaaatgccggctgagctggggtctagtcctggagtcactacaacaacccctcatcaacaggcatttgatttactgccttggggacatcatcctggaattcttggatctcagtgcctctgttgaggagtctgctgctaccacctctgcctcagataccccaggcaactctaagaggatgggtgtctcctcttagctggttattcacgccttcttcccaggtcagggaagtagagttactcggccaccagagaccagtcaggaagcccgtgccctcttcaagtaggctacagctaagaaggcctaggttctcggtggctcacttctctcccacttctgctccatttgtagcaggtgacaggggtctgtgtgtcccagttgcatgcacgtttatttccctgttccttttgtgatgttgggattgttgctggtgagtagatcctgtttcctttgggaaaagaagctgtgaggtagaggaatgaaccccttttgcttctccttttgccatcctccctgagattgtttgccagaatcctggccctgtgcacacatgtgcttaatccaccagcacacaagctctagatagaacaggaaaaaaactgtggccagatttccttggaggagaaaacaaccttctcagctctctgttcctacccggaaactaaaaattcattcagggccattctcaaaaaccagactcctgggtctaatctagtttcccaacagttccagaagaagaaggagggaagaaaatttttcaaggaacttcttgctcatgtgttgctgtttcccaacacatcagccttatggaagatgtcatgaggctgcttgcctgggaggctacactttcctttccagaagacttcaaagctgactgccaaagcttctggtaaatccaccccacccttcacaccctttcctgaaaggcatttataccacccattttatttattggctttgctcccaaccccctgccctagagcaattgagtttttgaatttttgaccctctctctgtcttcagcaaaactgcatgacaagctgcatattcagcctcagtttttccaaggagaatggaaagcacttgcctcctgtcttaagaatgcacaaagagtaggactagcaaggctgggggatgaaatctcccttcctaagtctttgacagagaacttttattattctgaacagataagattagcaaacttacaaggaatagcttcttatttcccattccttacggttataatcagtcctttaacaacaccagcatgaaggcaaaggtgttttgtcagactgcaacatctattagaaaggcaaggcaactgggaattgctggagaaggataaatcaggaggaattgctggtagaaaaggctgcagacagtcacagggaagtgctgtatattaaatgcatgtgaatagctggcaaaaagatgtcaaggatgtcactgggagccctttggcttcacactcgcctgttagcgccttgctttcgctgaattaccagagcctaccactcggaggaaggtcttggagttagactgatgagaaggcaatggggtgtcaaaaacaagtgtcaaagttctcttagattctgaagtcggtgatgagcacacaattaaagtggtttgtggaagaaagttgtaaaatctttttacttttttgcccctctggaggcttttaaccctaaattgtgtctgatgtattcgggaggcttaggtgtgcaattcttgcccaaaggcaaggagatgaatgagatgtctcatggcctcttctagccttaaaagttgaccattacagtgactttatggctccaaagttcttgaagcatctccagccctagactttgacaagaaaaggtagctcagcatctctactttccgtgagtacctgcaggagtccagccaatgtattagagctgatctatcaatatcagctagactcatacttttaacattcaattcacttgctcttgatgtgcttcccaataatgagactagatatgggatactctagtgc

SEQ ID NO: 325784 - DNA, 3194 bp, Homo sapiens
gacccggaagcggtcgccggcggccggccggcggtcatccttcacacaggcccggctgcggagcgcagtcgcccaggtttacggcggcagagggccgaggctcccggagaggaccgcgatgagtccacttcaggtcggggctgagtgtgggcgcgcggttcccggcggcgtgtgacccagtcttcgccggccgctgcccgctgcgtgtgtaagtgtccgtgggccccagggccttgcagcgcccgccccgaggccccgaagaggccttccgcctggggcagtgtgaaggccacagagttttcctccaaagccacacctcagctggaaggggcgagttggagggctctgttagtggtagccatggggagacgcggagctgcagctgtcgctttgcagtgcctgtaggactttgagggcctggagccccggttccctgaacagcacccagatcgccccatatctgagacacagttcatgccccccttccctaactctgaagtaaaatcttgagggctgtcatctggggaagccaccttgtccgttcagccatgaagacagaaacagtgccaccgttccaggaaactccagctggatcgagctgtcacctcaataacctgttgagtagccggaagctgatggctgtgggggtcttgcttggctggctcctggtcatacaccttctggtcaacgtgtggctgctgtgccttctgtcggcattgctagtggtgctgggaggatggctgggctccagcctcgctggagtggcttcaggtcgactgcatctggaacgcttcatcccgttggccacctgtcctccatgccctgaggcagaaaggcagctggaacgggagatcaaccgcaccatccagatgattattcgagattttgtgttatcttggtaccgttccgtgagccaggagccagcctttgaggaagaaatggaggcagccatgaaagggttggtccaggagcttcggagaaggatgagcgtgatggacagtcatgctgttgcccagagtgttctgactctctgcggttgtcacctgcagagctacattcaggcaaaggaggccactgcagggaagaatggtccagttgagccttcccacctctgggaggcttactgccgggcgactgccccacatcctgctgtgcacagccccagtgctgaagtcacctatacgcgtggcgttgtgaatttgttgcttcaagggctggtgcccaagccccacttggagactcgtaccggacgccatgtagtggtcgaactcatcacatgcaatgtaatcttaccactgatcagcaggctgtcagatcctgactggatccaccttgtactcgtgggtatcttttccaaggccagagatccagcaccctgcccagccagtgcccccgaacagccctcagtgcccacatctctgccactgattgctgaggtagagcagcttccagaagggagagcttctccagtagcagccccagtattcctaagttacagtgagccagagggttctgcaggcccctctccagaggttgaagaaggccacgaagctgtagagggagatttgggtgggatgtgtgaagaaagaaaagtaggaaacaactcatctcatttcctacagccaaatcttcgaggtcccctgttcttatgtgaagactcagagctggagtctccgctgtctgaactgggcaaagaaaccatcatgctcatgactccaggcagctttctctctgacaggattcaggatgccctgtgtgccctagagagttcccaggctctggaacccaaagatggtgaggcatctgaaggagcagaggctgaggagggtccagggacagaaacagagacaggcctgccggtctccacactgaattcctgcccagagatccatattgacacagcagacaaggagatagaacaaggagatgttaccgcctctgttacagctttgctggaggggccagaaaagacctgcccctcacggccgtcatgcttagagaaggatctcaccaatgatgtgagctcccttgatcctactctgccaccagttctgctttcctcctctccacctggtcctctcagctcagccaccttcagctttgagcccctaagcagtcccgatggtccagttatcatccagaaccttcgtatcactggcaccattacagcccgagagcacagtggcactggattccacccatacacactctatactgtgaagtacgagacagcccttgacggtgaaaacagcagcggcctgcagcagctggcctaccacactgtgaatcgtcgctatcgggagttcttgaatctgcagacccgtctggaggagaaaccagatctacgaaagttcatcaaaaatgtgaagggtcctaaaaagctctttccagatcttccatttggaaacatggacagtgacagagtagaagcccgtaagagcctcctagaatcattcctaaagcaactctgtgccattccagagatcgctaacagtgaggaggtgcaggagttccttgctctgaacacagatgctcgtattgcctttgtcaagaaaccatttatggtctctagaatagacaagatggtggtgagtgccattgtggacaccttgaagacagcgtttcctcgctctgaaccccagagccccacagaggagctgagtgaggccgagaccgaaagcaagccccagacagaaggcaagaaggctagcaagtccaggctgaggttctcatccagtaaaatttctccagcactaagtgtgactgaagcacaagacaagattctttattgtctccaggaaggcagtgtggagtctgagactctatccatgtctgcgatggaatcttttattgaaaaacagacaaagttactggaaatgcagccaacaaaagccccagaaaaagatcctgaacaacctcccaaaggacgtgtggacagttgcgtgtcagatgcagccgtgccagcccaagaccccagcaacagcgatccagctgagcatgccatgtgttgaactccagtgttggaggtgctgtgttggggcacagagatgagtagtacatagttgccacagcggaatcaagcagcagaacagggcacaaacacaggaagttctaatccagcaggatgagatcatgctgataatattgataactcattaaacttatttttggcatgctttggcatatcagactct

SEQ ID NO: 325785 - DNA, 3307 bp, Homo sapiens
gacccggaagcggtcgccggcggccggccggcggtcatccttcacacaggcccggctgcggagcgcagtcgcccaggtttacggcggcagagggccgaggctcccggagaggaccgcgatgagtccacttcaggtcggggctgagtgtgggcgcgcggttcccggcggcgtgtgacccagtcttcgccggccgctgcccgctgcgtgtgtaagtgtccgtgggccccagggccttgcagcgcccgccccgaggccccgaagaggccttccgcctggggcagtgtgaaggccacagagttttcctccaaagccacacctcagctggaaggggcgagttggagggctctgttagtggtagccatggggagacgcggagctgcagctgtcgctttgcagtgcctgtaggactttgagggcctggagccccggttccctgaacagcacccagatcgccccatatctgagacacagttcatgccccccttccctaactctgaagtaaaatcttgagggctgtcatctggggaagccaccttgtccgttcagccatgaagacagaaacagtgccaccgttccaggaaactccagctggatcgagctgtcacctcaataacctgttgagtagccggaagctgatggctgtgggggtcttgcttggctggctcctggtcatacaccttctggtcaacgtgtggctgctgtgccttctgtcggcattgctagtggtgctgggaggatggctgggctccagcctcgctggagtggcttcaggtcgactgcatctggaacgcttcatcccgttggccacctgtcctccatgccctgaggcagaaaggcagctggaacgggagatcaaccgcaccatccagatgattattcgagattttgtgttatcttggtaccgttccgtgagccaggagccagcctttgaggaagaaatggaggcagccatgaaagggttggtccaggagcttcggagaaggatgagcgtgatggacagtcatgctgttgcccagagtgttctgactctctgcggttgtcacctgcagagctacattcaggcaaaggaggccactgcagggaagaatggtccagttgagccttcccacctctgggaggcttactgccgggcgactgccccacatcctgctgtgcacagccccagtgctgaagtcacctatacgcgtggcgttgtgaatttgttgcttcaagggctggtgcccaagccccacttggagactcgtaccggacgccatgtagtggtcgaactcatcacatgcaatgtaatcttaccactgatcagcaggctgtcagatcctgactggatccaccttgtactcgtgggtatcttttccaaggccagagatccagcaccctgcccagccagtgcccccgaacagccctcagtgcccacatctctgccactgattgctgaggtagagcagcttccagaagggagagcttctccagtagcagccccagtattcctaagttacagtgagccagagggttctgcaggcccctctccagaggttgaagaaggccacgaagctgtagagggagatttgggtgggatgtgtgaagaaagaaaagtaggaaacaactcatctcatttcctacagccaaatcttcgaggtcccctgttcttatgtgaagactcagagctggagtctccgctgtctgaactgggcaaagaaaccatcatgctcatgactccaggcagctttctctctgacaggattcaggatgccctgtgtgccctagagagttcccaggctctggaacccaaagatggtgaggcatctgaaggagcagaggctgaggagggtccagggacagaaacagagacaggcctgccggtctccacactgaattcctgcccagagatccatattgacacagcagacaaggagatagaacaaggagatgttaccgcctctgttacagctttgctggaggggccagaaaagacctgcccctcacggccgtcatgcttagagaaggatctcaccaatgatgtgagctcccttgatcctactctgccaccagttctgctttcctcctctccacctggtcctctcagctcagccaccttcagctttgagcccctaagcagtcccgatggtccagttatcatccagaaccttcgtatcactggcaccattacagcccgagagcacagtggcactggattccacccatacacactctatactgtgaagtacgagacagcccttgacggtgaaaacagcagcggcctgcagcagctggcctaccacactgtgaatcgtcgctatcgggagttcttgaatctgcagacccgtctggaggagaaaccagatctacgaaagttcatcaaaaatgtgaagggtcctaaaaagctctttccagatcttccatttggaaacatggacagtgacagagtagaagcccgtaagagcctcctagaatcattcctaaagcaactctgtgccattccagagatcgctaacagtgaggaggtgcaggagttccttgctctgaacacagatgctcgtattgcctttgtcaagaaaccatttatggtctctagaatagacaagatggtggtgagtgccattgtggacaccttgaagacagcgtttcctcgctctgaaccccagagccccacagaggagctgagtgaggccgagaccgaaagcaagccccagacagaaggcaagaaggctagcaagtccaggctgaggttctcatccagtaaaatttctccagcactaagtgtgactgaagcacaagacaagattctttattgtctccaggaaggcagtgtggagtctgagactctatccatgtctgcgatggaatcttttattgaaaaacagacaaagttactggaaatgcagccaacaaaagccccagaaaaagatcctgaacaacctcccaaaggacgtgtggacagttgcgtgtcagatgcagccgtgccagcccaagaccccagcaacagcgatccaggaacagagacagagttagctgacacagccctggatctgctcctcttgctactaacagaacagtggaaatggctatgtaccgaaaacatgcaaaagtttcttcgtcttatctttgggaccctagttcaaaggtaagactgctgaattctccctcacatcagaatctcaagttgcagagaaggtggatgtgatgctgaatagtgtccagggaatctgcagccgtaagagaagatagattctctgttacaggggttacagggatgaaaaatgccttgagagtatcagaaagcttttattgactaccttgttgtctacaa

SEQ ID NO: 325786 - DNA, 3143 bp, Homo sapiens
gacccggaagcggtcgccggcggccggccggcggtcatccttcacacaggcccggctgcggagcgcagtcgcccaggtttacggcggcagagggccgaggctcccggagaggaccgcgatgagtccacttcaggtcggggctgagtgtgggcgcgcggttcccggcggcgtgtgacccagtcttcgccggccgctgcccgctgcgtgtgtaagtgtccgtgggccccagggccttgcagcgcccgccccgaggccccgaagaggccttccgcctggggcagtgtgaaggccacagagttttcctccaaagccacacctcagctggaaggggcgagttggagggctctgttagtggtagccatggggagacgcggagctgcagctgtcgctttgcagtgcctgtaggactttgagggcctggagccccggttccctgaacagcacccagatcgccccatatctgagacacagttcatgccccccttccctaactctgaagtaaaatcttgagggctgtcatctggggaagccaccttgtccgttcagccatgaagacagaaacagtgccaccgttccaggaaactccagctggatcgagctgtcacctcaataacctgttgagtagccggaagctgatggctgtgggggtcttgcttggctggctcctggtcatacaccttctggtcaacgtgtggctgctgtgccttctgtcggcattgctagtggtgctgggaggatggctgggctccagcctcgctggagtggcttcaggtcgactgcatctggaacgcttcatcccgttggccacctgtcctccatgccctgaggcagaaaggcagctggaacgggagatcaaccgcaccatccagatgattattcgagattttgtgttatcttggtaccgttccgtgagccaggagccagcctttgaggaagaaatggaggcagccatgaaagggttggtccaggagcttcggagaaggatgagcgtgatggacagtcatgctgttgcccagagtgttctgactctctgcggttgtcacctgcagagctacattcaggcaaaggaggccactgcagggaagaatggtccagttgagccttcccacctctgggaggcttactgccgggcgactgccccacatcctgctgtgcacagccccagtgctgaagtcacctatacgcgtggcgttgtgaatttgttgcttcaagggctggtgcccaagccccacttggagactcgtaccggacgccatgtagtggtcgaactcatcacatgcaatgtaatcttaccactgatcagcaggctgtcagatcctgactggatccaccttgtactcgtgggtatcttttccaaggccagagatccagcaccctgcccagccagtgcccccgaacagccctcagtgcccacatctctgccactgattgctgaggtagagcagcttccagaagggagagcttctccagtagcagccccagtattcctaagttacagtgagccagagggttctgcaggcccctctccagaggttgaagaaggccacgaagctgtagagggagatttgggtgggatgtgtgaagaaagaaaagtaggaaacaactcatctcatttcctacagccaaatcttcgaggtcccctgttcttatgtgaagactcagagctggagtctccgctgtctgaactgggcaaagaaaccatcatgctcatgactccaggcagctttctctctgacaggattcaggatgccctgtgtgccctagagagttcccaggctctggaacccaaagatggtgaggcatctgaaggagcagaggctgaggagggtccagggacagaaacagagacaggcctgccggtctccacactgaattcctgcccagagatccatattgacacagcagacaaggagatagaacaaggagatgttaccgcctctgttacagctttgctggaggggccagaaaagacctgcccctcacggccgtcatgcttagagaaggatctcaccaatgatgtgagctcccttgatcctactctgccaccagttctgctttcctcctctccacctggtcctctcagctcagccaccttcagctttgagcccctaagcagtcccgatggtccagttatcatccagaaccttcgtatcactggcaccattacagcccgagagcacagtggcactggattccacccatacacactctatactgtgaagtacgagacagcccttgacggtgaaaacagcagcggcctgcagcagctggcctaccacactgtgaatcgtcgctatcgggagttcttgaatctgcagacccgtctggaggagaaaccagatctacgaaagttcatcaaaaatgtgaagggtcctaaaaagctctttccagatcttccatttggaaacatggacagtgacagagtagaagcccgtaagagcctcctagaatcattcctaaagcaactctgtgccattccagagatcgctaacagtgaggaggtgcaggagttccttgctctgaacacagatgctcgtattgcctttgtcaagaaaccatttatggtctctagaatagacaagatggtggtgagtgccattgtggacaccttgaagacagcgtttcctcgctctgaaccccagagccccacagaggagctgagtgaggccgagaccgaaagcaagccccagacagaaggcaagaaggctagcaagtccaggctgaggttctcatccagtaaaatttctccagcactaagtgtgactgaagcacaagacaagattctttattgtctccaggaaggcagtgtgacaaagttactggaaatgcagccaacaaaagccccagaaaaagatcctgaacaacctcccaaaggacgtgtggacagttgcgtgtcagatgcagccgtgccagcccaagaccccagcaacagcgatccagctgagcatgccatgtgttgaactccagtgttggaggtgctgtgttggggcacagagatgagtagtacatagttgccacagcggaatcaagcagcagaacagggcacaaacacaggaagttctaatccagcaggatgagatcatgctgataatattgataactcattaaacttatttttggcatgctttggcatatcagactct

SEQ ID NO: 325787 - DNA, 1719 bp, Homo sapiens
gacccggaagcggtcgccggcggccggccggcggtcatccttcacacaggcccggctgcggagcgcagtcgcccaggtttacggcggcagagggccgaggctcccggagaggaccgcgatgagtccacttcaggtcggggctgagtgtgggcgcgcggttcccggcggcgtgtgacccagtcttcgccggccgctgcccgctgcgtgtgtaagtgtccgtgggccccagggccttgcagcgcccgccccgaggccccgaagaggccttccgcctggggcagtgtgaaggccacagagttttcctccaaagccacacctcagctggaaggggcgagttggagggctctgttagtggtagccatggggagacgcggagctgcagctgtcgctttgcagtgcctgtaggactttgagggcctggagccccggttccctgaacagcacccagatcgccccatatctgagacacagttcatgccccccttccctaactctgaagtaaaatcttgagggctgtcatctggggaagccaccttgtccgttcagccatgaagacagaaacagtgccaccgttccaggaaactccagctggatcgagctgtcacctcaataacctgttgagtagccggaagctgatggctgtgggggtcttgcttggctggctcctggtcatacaccttctggtcaacgtgtggctgctgtgccttctgtcggcattgctagtggtgctgggaggatggctgggctccagcctcgctggagtggcttcaggtcgactgcatctggaacgcttcatcccgttggccacctgtcctccatgccctgaggcagaaaggcagctggaacgggagatcaaccgcaccatccagatgattattcgagattttgtgttatcttggtaccgttccgtgagccaggagccagcctttgaggaagaaatggaggcagccatgaaagggttggtccaggagcttcggagaaggatgagcgtgatggacagtcatgctgttgcccagagtgttctgactctctgcggttgtcacctgcagagctacattcaggcaaaggaggccactgcagggaagaatggtccagttgagccttcccacctctgggaggcttactgccgggcgactgccccacatcctgctgtgcacagccccagtgctgaagtcacctatacgcgtggcgttgtgaatttgttgcttcaagggctggtgcccaagccccacttggagactcgtaccggacgccatgtagtggtcgaactcatcacatgcaatgtaatcttaccactgatcagcaggctgtcagatcctgactggatccaccttgtactcgtggcagcggcctgcagcagctggcctaccacactgtgaatcgtcgctatcgggagttcttgaatctgcagacccgtctggaggagaaaccagatctacgaaagttcatcaaaaatgtgaagggtcctaaaaagctctttccagatcttccatttggaaacatggacagtgacagagtagaagcccgtaagagcctcctagaatcattcctaaagcaactctgtgccattccagagatcgctaacagtgaggaggtgcaggagttccttgctctgaacacagatgctcgtattgcctttgtcaagaaaccatttatggtctctagaatagacaaggtgttaccgatttggaaactagaaatcacctttttacttaaaaa

SEQ ID NO: 325788 - DNA, 6068 bp, Homo sapiens
gacccggaagcggtcgccggcggccggccggcggtcatccttcacacaggcccggctgcggagcgcagtcgcccaggtttacggcggcagagggccgaggctcccggagaggaccgcgatgagtccacttcaggtcggggctgagtgtgggcgcgcggttcccggcggcgtgtgacccagtcttcgccggccgctgcccgctgcgtgtgtaagtgtccgtgggccccagggccttgcagcgcccgccccgaggccccgaagaggccttccgcctggggcagtgtgaaggccacagagttttcctccaaagccacacctcagctggaaggggcgagttggagggctctgttagtggtagccatggggagacgcggagctgcagctgtcgctttgcagtgcctgtaggactttgagggcctggagccccggttccctgaacagcacccagatcgccccatatctgagacacagttcatgccccccttccctaactctgaagtaaaatcttgagggctgtcatctggggaagccaccttgtccgttcagccatgaagacagaaacagtgccaccgttccaggaaactccagctggatcgagctgtcacctcaataacctgttgagtagccggaagctgatggctgtgggggtcttgcttggctggctcctggtcatacaccttctggtcaacgtgtggctgctgtgccttctgtcggcattgctagtggtgctgggaggatggctgggctccagcctcgctggagtggcttcaggtcgactgcatctggaacgcttcatcccgttggccacctgtcctccatgccctgaggcagaaaggcagctggaacgggagatcaaccgcaccatccagatgattattcgagattttgtgttatcttggtaccgttccgtgagccaggagccagcctttgaggaagaaatggaggcagccatgaaagggttggtccaggagcttcggagaaggatgagcgtgatggacagtcatgctgttgcccagagtgttctgactctctgcggttgtcacctgcagagctacattcaggcaaaggaggccactgcagggaagaatggtccagttgagccttcccacctctgggaggcttactgccgggcgactgccccacatcctgctgtgcacagccccagtgctgaagtcacctatacgcgtggcgttgtgaatttgttgcttcaagggctggtgcccaagccccacttggagactcgtaccggacgccatgtagtggtcgaactcatcacatgcaatgtaatcttaccactgatcagcaggctgtcagatcctgactggatccaccttgtactcgtgggtatcttttccaaggccagagatccagcaccctgcccagccagtgcccccgaacagccctcagtgcccacatctctgccactgattgctgaggtagagcagcttccagaagggagagcttctccagtagcagccccagtattcctaagttacagtgagccagagggttctgcaggcccctctccagaggttgaagaaggccacgaagctgtagagggagatttgggtgggatgtgtgaagaaagaaaagtaggaaacaactcatctcatttcctacagccaaatcttcgaggtcccctgttcttatgtgaagactcagagctggagtctccgctgtctgaactgggcaaagaaaccatcatgctcatgactccaggcagctttctctctgacaggattcaggatgccctgtgtgccctagagagttcccaggctctggaacccaaagatggtgaggcatctgaaggagcagaggctgaggagggtccagggacagaaacagagacaggcctgccggtctccacactgaattcctgcccagagatccatattgacacagcagacaaggagatagaacaaggagatgttaccgcctctgttacagctttgctggaggggccagaaaagacctgcccctcacggccgtcatgcttagagaaggatctcaccaatgatgtgagctcccttgatcctactctgccaccagttctgctttcctcctctccacctggtcctctcagctcagccaccttcagctttgagcccctaagcagtcccgatggtccagttatcatccagaaccttcgtatcactggcaccattacagcccgagagcacagtggcactggattccacccatacacactctatactgtgaagtacgagacagcccttgacggtgaaaacagcagcggcctgcagcagctggcctaccacactgtgaatcgtcgctatcgggagttcttgaatctgcagacccgtctggaggagaaaccagatctacgaaagttcatcaaaaatgtgaagggtcctaaaaagctctttccagatcttccatttggaaacatggacagtgacagagtagaagcccgtaagagcctcctagaatcattcctaaagcaactctgtgccattccagagatcgctaacagtgaggaggtgcaggagttccttgctctgaacacagatgctcgtattgcctttgtcaagaaaccatttatggtctctagaatagacaagatggtggtgagtgccattgtggacaccttgaagacagcgtttcctcgctctgaaccccagagccccacagaggagctgagtgaggccgagaccgaaagcaagccccagacagaaggcaagaaggctagcaagtccaggctgaggttctcatccagtaaaatttctccagcactaagtgtgactgaagcacaagacaagattctttattgtctccaggaaggcagtgtggagtctgagactctatccatgtctgcgatggaatcttttattgaaaaacagacaaagttactggaaatgcagccaacaaaagccccagaaaaagatcctgaacaacctcccaaaggacgtgtggacagttgcgtgtcagatgcagccgtgccagcccaagaccccagcaacagcgatccaggaacagagacagagttagctgacacagccctggatctgctcctcttgctactaacagaacagtggaaatggctatgtaccgaaaacatgcaaaagtttcttcgtcttatctttgggaccctagttcaaaggtggctagaggtgcaggtagctaatttaacaagtccacagcgctgggtgcagtacctccggcttcttcaggagtccatctggcctggtggagttttgcctaagtttccacggcccgtaaggacccaagagcagaaactggctgctgagaaacaggctttgcagagcctgatgggagtcctcccagatctcgtagtagaaattcttggggtgaacaaatgccggctgagctggggtctagtcctggagtcactacaacaacccctcatcaacaggcatttgatttactgccttggggacatcatcctggaattcttggatctcagtgcctctgttgaggagtctgctgctaccacctctgcctcagataccccaggcaactctaagaggatgggtgtctcctcttagctggttattcacgccttcttcccaggtcagggaagtagagttactcggccaccagagaccagtcaggaagcccgtgccctcttcaagtaggctacagctaagaaggcctaggttctcggtggctcacttctctcccacttctgctccatttgtagcaggtgacaggggtctgtgtgtcccagttgcatgcacgtttatttccctgttccttttgtgatgttgggattgttgctggtgagtagatcctgtttcctttgggaaaagaagctgtgaggtagaggaatgaaccccttttgcttctccttttgccatcctccctgagattgtttgccagaatcctggccctgtgcacacatgtgcttaatccaccagcacacaagctctagatagaacaggaaaaaaactgtggccagatttccttggaggagaaaacaaccttctcagctctctgttcctacccggaaactaaaaattcattcagggccattctcaaaaaccagactcctgggtctaatctagtttcccaacagttccagaagaagaaggagggaagaaaatttttcaaggaacttcttgctcatgtgttgctgtttcccaacacatcagccttatggaagatgtcatgaggctgcttgcctgggaggctacactttcctttccagaagacttcaaagctgactgccaaagcttctggtaaatccaccccacccttcacaccctttcctgaaaggcatttataccacccattttatttattggctttgctcccaaccccctgccctagagcaattgagtttttgaatttttgaccctctctctgtcttcagcaaaactgcatgacaagctgcatattcagcctcagtttttccaaggagaatggaaagcacttgcctcctgtcttaagaatgcacaaagagtaggactagcaaggctgggggatgaaatctcccttcctaagtctttgacagagaacttttattattctgaacagataagattagcaaacttacaaggaatagcttcttatttcccattccttacggttataatcagtcctttaacaacaccagcatgaaggcaaaggtgttttgtcagactgcaacatctattagaaaggcaaggcaactgggaattgctggagaaggataaatcaggaggaattgctggtagaaaaggctgcagacagtcacagggaagtgctgtatattaaatgcatgtgaatagctggcaaaaagatgtcaaggatgtcactgggagccctttggcttcacactcgcctgttagcgccttgctttcgctgaattaccagagcctaccactcggaggaaggtcttggagttagactgatgagaaggcaatggggtgtcaaaaacaagtgtcaaagttctcttagattctgaagtcggtgatgagcacacaattaaagtggtttgtggaagaaagttgtaaaatctttttacttttttgcccctctggaggcttttaaccctaaattgtgtctgatgtattcgggaggcttaggtgtgcaattcttgcccaaaggcaaggagatgaatgagatgtctcatggcctcttctagccttaaaagttgaccattacagtgactttatggctccaaagttcttgaagcatctccagccctagactttgacaagaaaaggtagctcagcatctctactttccgtgagtacctgcaggagtccagccaatgtattagagctgatcattaagctccttcagtgagggctaagatcctattctcgatgagcatagggggacagccttgttttatgccacttttctctccccataccttcccctcatgtgtacttagccacctgtgttgctttgaatctgctgccagttctggctcaaatgtggcacaaaatcagtacatcagacacaccatgaaatccctgtggctataaattctaaggaatcttttgacacttccagcccaaagaacttatttttatttcgtattatataagagtccccacctctactccacgtaccccaaaaagataagctgtcctcagatcctccttctacccaggagggaaataatggatattgccaagggaacaatcagaactcatctggctttgaaaacgacctgccaagtttggctagcaggttcagacaacaagagagtaacaattggtagagagccacaggtagggaaaagatactcccagctgacagggtgataaaaggcagggaagaattgggcctgtgctgatccaggaaggttttattgtttgcttgttttttgtatttactcgtgactaaattttattcatttaagtcagaattttgatatttgaaataagactactttcccttttcttactatctataaaaaagacgaggcagggatgctgtgttctttctgtcaaattctaaatgtgatctttgccattgcttatttgaattcaagaaagctatactttttcatcacatataactcacagtttcatttttgcattgttggattagacttaataaaacctaaatggaaaataaattcctaaatctga

SEQ ID NO: 325789 - DNA, 1955 bp, Homo sapiens
ctctgtttgccatcatttctggaaatcttggctcagaagttgcatatattagcaataaagaggaaagggttagaatggaaacctgcagggcctattttagtaactggttgactactgctactctttcctgcactagggccctagctgttccctggcagcattcaaagccaacatgtggcaagcaagggcaccacatgtacccttactggaaatttcatctatatctgggtccttatgaaaaaagagagagcatgtgtgtatgtgtgtgtgtctctgtctctgtgcttatgtttcatgggccagcaataacagactcacagtacctaaccttttcttaactgggcccatatattgagggatgaccatgatacctctgcttatgagtctctgtcccttgaaacattgatgttatcacttgcagttccttttctggttttatttggaacacaaggggaaaaaatggatgtccaaaaaggatacaccatgaatagcaataatgaaaacttgctctatgccacctgtctgtttaatcttcagcaaatttttaatgagtgcctattatgtgttagctaatctatcctgtgggaatataaccataatacacactgatgccagttttacttagcagaaaccatttcacaagtgcactgtagacatagcttagtgtatgcgttaacattatctatcaagaattgccagaatatacattgtttgggggattgcagggccgagtctttcctggcagctctgaccacagtaagctccccagaataagtatggatattcttgttgtgttttattatcagtacttgccagcccttagtgtgaggctcaaggccataaattacaacctgtttctgctctttgtttctgtaccaggtccaggctgaggttctcatccagtaaaatttctccagcactaagtgtgactgaagcacaagacaagattctttattgtctccaggaaggcagtgtggtaagaaccaaaacccagagaatgtgaggcaaaaatatctgagatgttggtcctgcagttacaggtagttgagatattctctgaagtcagaaatgtcctgctaaatgacttaatcaacgtttggatctccagcttttatgctaaaagtattttctctaagtggtttggaattcctaccagttctgggttggcaggttggcttctcaaccatggtgggtttcggataatggatgacaagataagaaagaaagctagttcctggaaaaaaaaatggatgaccaaaaatgggtgcagaaatgataatcccagggcaggcctgttttacttgcaacttcggtaaaaaataaaatctttcctaaaggagtcatagcatcagttgggttttatacccaaggtacttatgcaggggagaggcagggaaacctagagtgctgcatttgctcccctactgtcagcattccatatgtgatatgccactgactatttcttaggagtctgagactctatccatgtctgcgatggaatcttttattgaaaaacagacaaagttactggaaatgcagccaacaaaagccccagaaaaagatcctgaacaacctcccaaaggacgtgtggacagttgcgtgtcagatgcagccgtgccagcccaagaccccagcaacagcgatccaggtgagtggcgaggtctctgctcccatggagaagggagccagggtggcatccacttggtacttggggtagttggagtttgtaactttgatttctgttccattcagctgagcatgccatgtgttgaactccagtgttggaggtgctgtgttggggcacagagatgagtagtacatagttgccacagcggaatcaagcagcagaacagggcacaaacacaggaagttctaatccagcaggatgagatcatgctgataatattgataactcattaaacttatttttggcatgctttggcatatcagactct

SEQ ID NO: 325790 - DNA, 6708 bp, Homo sapiens
gacccggaagcggtcgccggcggccggccggcggtcatccttcacacaggcccggctgcggagcgcagtcgcccaggtttacggcggcagagggccgaggctcccggagaggaccgcgatgagtccacttcaggtcggggctgagtgtgggcgcgcggttcccggcggcgtgtgacccagtcttcgccggccgctgcccgctgcgtgtgtaagtgtccgtgggccccagggccttgcagcgcccgccccgaggccccgaagaggccttccgcctggggcagtgtgaaggccacagagttttcctccaaagccacacctcagctggaaggggcgagttggagggctctgttagtggtagccatggggagacgcggagctgcagctgtcgctttgcagtgcctgtaggactttgagggcctggagccccggttccctgaacagcacccagatcgccccatatctgagacacagttcatgccccccttccctaactctgaagtaaaatcttgagggctgtcatctggggaagccaccttgtccgttcagccatgaagacagaaacagtgccaccgttccaggaaactccagctggatcgagctgtcacctcaataacctgttgagtagccggaagctgatggctgtgggggtcttgcttggctggctcctggtcatacaccttctggtcaacgtgtggctgctgtgccttctgtcggcattgctagtggtgctgggaggatggctgggctccagcctcgctggagtggcttcaggtcgactgcatctggaacgcttcatcccgttggccacctgtcctccatgccctgaggcagaaaggcagctggaacgggagatcaaccgcaccatccagatgattattcgagattttgtgttatcttggtaccgttccgtgagccaggagccagcctttgaggaagaaatggaggcagccatgaaagggttggtccaggagcttcggagaaggatgagcgtgatggacagtcatgctgttgcccagagtgttctgactctctgcggttgtcacctgcagagctacattcaggcaaaggaggccactgcagggaagaatggtccagttgagccttcccacctctgggaggcttactgccgggcgactgccccacatcctgctgtgcacagccccagtgctgaagtcacctatacgcgtggcgttgtgaatttgttgcttcaagggctggtgcccaagccccacttggagactcgtaccggacgccatgtagtggtcgaactcatcacatgcaatgtaatcttaccactgatcagcaggctgtcagatcctgactggatccaccttgtactcgtgggtatcttttccaaggccagagatccagcaccctgcccagccagtgcccccgaacagccctcagtgcccacatctctgccactgattgctgaggtagagcagcttccagaagggagagcttctccagtagcagccccagtattcctaagttacagtgagccagagggttctgcaggcccctctccagaggttgaagaaggccacgaagctgtagagggagatttgggtgggatgtgtgaagaaagaaaagtaggaaacaactcatctcatttcctacagccaaatcttcgaggtcccctgttcttatgtgaagactcagagctggagtctccgctgtctgaactgggcaaagaaaccatcatgctcatgactccaggcagctttctctctgacaggattcaggatgccctgtgtgccctagagagttcccaggctctggaacccaaagatggtgaggcatctgaaggagcagaggctgaggagggtccagggacagaaacagagacaggcctgccggtctccacactgaattcctgcccagagatccatattgacacagcagacaaggagatagaacaaggagatgttaccgcctctgttacagctttgctggaggggccagaaaagacctgcccctcacggccgtcatgcttagagaaggatctcaccaatgatgtgagctcccttgatcctactctgccaccagttctgctttcctcctctccacctggtcctctcagctcagccaccttcagctttgagcccctaagcagtcccgatggtccagttatcatccagaaccttcgtatcactggcaccattacagcccgagagcacagtggcactggattccacccatacacactctatactgtgaagtacgagacagcccttgacggtgaaaacagcagcggcctgcagcagctggcctaccacactgtgaatcgtcgctatcgggagttcttgaatctgcagacccgtctggaggagaaaccagatctacgaaagttcatcaaaaatgtgaagggtcctaaaaagctctttccagatcttccatttggaaacatggacagtgacagagtagaagcccgtaagagcctcctagaatcattcctaaagcaactctgtgccattccagagatcgctaacagtgaggaggtgcaggagttccttgctctgaacacagatgctcgtattgcctttgtcaagaaaccatttatggtctctagaatagacaagatggtggtgagtgccattgtggacaccttgaagacagcgtttcctcgctctgaaccccagagccccacagaggagctgagtgaggccgagaccgaaagcaagccccagacagaaggcaagaaggctagcaagtccaggctgaggttctcatccagtaaaatttctccagcactaagtgtgactgaagcacaagacaagattctttattgtctccaggaaggcagtgtggagtctgagactctatccatgtctgcgatggaatcttttattgaaaaacagacaaagttactggaaatgcagccaacaaaagccccagaaaaagatcctgaacaacctcccaaaggacgtgtggacagttgcgtgtcagatgcagccgtgccagcccaagaccccagcaacagcgatccaggaacagagacagagttagctgacacagccctggatctgctcctcttgctactaacagaacagtggaaatggctatgtaccgaaaacatgcaaaagtttcttcgtcttatctttgggaccctagttcaaaggtggctagaggtgcaggtagctaatttaacaagtccacagcgctgggtgcagtacctccggcttcttcaggagtccatctggcctggtggagttttgcctaagtttccacggcccgtaaggacccaagagcagaaactggctgctgagaaacaggctttgcagagcctgatgggagtcctcccagatctcgtagtagaaattcttggggtgaacaaatgccggctgagctggggtctagtcctggagtcactacaacaacccctcatcaacaggcatttgatttactgccttggggacatcatcctggaattcttggatctcagtgcctctgttgaggagtctgctgctaccacctctgcctcagataccccaggcaactctaagaggatgggtgtctcctcttagctggttattcacgccttcttcccaggtcagggaagtagagttactcggccaccagagaccagtcaggaagcccgtgccctcttcaagtaggctacagctaagaaggcctaggttctcggtggctcacttctctcccacttctgctccatttgtagcaggtgacaggggtctgtgtgtcccagttgcatgcacgtttatttccctgttccttttgtgatgttgggattgttgctggtgagtagatcctgtttcctttgggaaaagaagctgtgaggtagaggaatgaaccccttttgcttctccttttgccatcctccctgagattgtttgccagaatcctggccctgtgcacacatgtgcttaatccaccagcacacaagctctagatagaacaggaaaaaaactgtggccagatttccttggaggagaaaacaaccttctcagctctctgttcctacccggaaactaaaaattcattcagggccattctcaaaaaccagactcctgggtctaatctagtttcccaacagttccagaagaagaaggagggaagaaaatttttcaaggaacttcttgctcatgtgttgctgtttcccaacacatcagccttatggaagatgtcatgaggctgcttgcctgggaggctacactttcctttccagaagacttcaaagctgactgccaaagcttctggtaaatccaccccacccttcacaccctttcctgaaaggcatttataccacccattttatttattggctttgctcccaaccccctgccctagagcaattgagtttttgaatttttgaccctctctctgtcttcagcaaaactgcatgacaagctgcatattcagcctcagtttttccaaggagaatggaaagcacttgcctcctgtcttaagaatgcacaaagagtaggactagcaaggctgggggatgaaatctcccttcctaagtctttgacagagaacttttattattctgaacagataagattagcaaacttacaaggaatagcttcttatttcccattccttacggttataatcagtcctttaacaacaccagcatgaaggcaaaggtgttttgtcagactgcaacatctattagaaaggcaaggcaactgggaattgctggagaaggataaatcaggaggaattgctggtagaaaaggctgcagacagtcacagggaagtgctgtatattaaatgcatgtgaatagctggcaaaaagatgtcaaggatgtcactgggagccctttggcttcacactcgcctgttagcgccttgctttcgctgaattaccagagcctaccactcggaggaaggtcttggagttagactgatgagaaggcaatggggtgtcaaaaacaagtgtcaaagttctcttagattctgaagtcggtgatgagcacacaattaaagtggtttgtggaagaaagttgtaaaatctttttacttttttgcccctctggaggcttttaaccctaaattgtgtctgatgtattcgggaggcttaggtgtgcaattcttgcccaaaggcaaggagatgaatgagatgtctcatggcctcttctagccttaaaagttgaccattacagtgactttatggctccaaagttcttgaagcatctccagccctagactttgacaagaaaaggtagctcagcatctctactttccgtgagtacctgcaggagtccagccaatgtattagagctgatcattaagctccttcagtgagggctaagatcctattctcgatgagcatagggggacagccttgttttatgccacttttctctccccataccttcccctcatgtgtacttagccacctgtgttgctttgaatctgctgccagttctggctcaaatgtggcacaaaatcagtacatcagacacaccatgaaatccctgtggctataaattctaaggaatcttttgacacttccagcccaaagaacttatttttatttcgtattatataagagtccccacctctactccacgtaccccaaaaagataagctgtcctcagatcctccttctacccaggagggaaataatggatattgccaagggaacaatcagaactcatctggctttgaaaacgacctgccaagtttggctagcaggttcagacaacaagagagtaacaattggtagagagccacaggtagggaaaagatactcccagctgacagggtgataaaaggcagggaagaattgggcctgtgctgatccaggaaggttttattgtttgcttgttttttgtatttactcgtgactaaattttattcatttaagtcagaattttgatatttgaaataagactactttcccttttcttactatctataaaaaagacgaggcagggatgctgtgttctttctgtcaaattctaaatgtgatctttgccattgcttatttgaattcaagaaagctatactttttcatcacatataactcacagtttcatttttgcattgttggattagacttaataaaacctaaatggaaaataaattcctaaatctgaaaaaaaaaaaaaaaaaaaaaaaaaaaaaaaaaaaaaaaaaaaaaaaaaaaaaaaaaaaaaaaaaaccacacacacaaaaaaaacaaaaacaaaaacaaaaaagacaaggcggggacccgaacacaccgagggggaggccgacaagatacccacaccacaagaagaccagcggcgccccacaagcaaacaagaaaataaacgaacaagaggagaacgcggcaaaccacacacagaacgactgcacaccggaccgagagaacggaagacacacacactacacagaggggacaaagaagagagaagacacacgccagaacaaaacccacaccccagcgaaaacgaccaaccaccgccagcacacgagccaacaaaacacgaacacgaacagagacaaaactagcgcccgaccaacaacaaacgagcaaacacacagcggcacagaccgagaggcgcaccaacgaccacgcaacgcacgacggagggggaggcacaggcgacaggggcaagacgggcgggcagaggccgagcacgcacaccaagccaaccaggggggacgacacagggacgagagagagacgaagaggcggcacaagagacgaggagggcgacacagacggagaagcggaaaaacacaccaccc

SEQ ID NO: 325791 - DNA, 4054 bp, Homo sapiens
gacccggaagcggtcgccggcggccggccggcggtcatccttcacacaggcccggctgcggagcgcagtcgcccaggtttacggcggcagagggccgaggctcccggagaggaccgcgatgagtccacttcaggtcggggctgagtgtgggcgcgcggttcccggcggcgtgtgacccagtcttcgccggccgctgcccgctgcgtgttacgagacagcccttgacggtgaaaacagcagcggcctgcagcagctggcctaccacactgtgaatcgtcgctatcgggagttcttgaatctgcagacccgtctggaggagaaaccagatctacgaaagttcatcaaaaatgtgaagggtcctaaaaagctctttccagatcttccatttggaaacatggacagtgacagagtagaagcccgtaagagcctcctagaatcattcctaaagcaactctgtgccattccagagatcgctaacagtgaggaggtgcaggagttccttgctctgaacacagatgctcgtattgcctttgtcaagaaaccatttatggtctctagaatagacaagatggtggtgagtgccattgtggacaccttgaagacagcgtttcctcgctctgaaccccagagccccacagaggagctgagtgaggccgagaccgaaagcaagccccagacagaaggcaagaaggctagcaagtccaggctgaggttctcatccagtaaaatttctccagcactaagtgtgactgaagcacaagacaagattctttattgtctccaggaaggcagtgtggagtctgagactctatccatgtctgcgatggaatcttttattgaaaaacagacaaagttactggaaatgcagccaacaaaagccccagaaaaagatcctgaacaacctcccaaaggacgtgtggacagttgcgtgtcagatgcagccgtgccagcccaagaccccagcaacagcgatccaggaacagagacagagttagctgacacagccctggatctgctcctcttgctactaacagaacagtggaaatggctatgtaccgaaaacatgcaaaagtttcttcgtcttatctttgggaccctagttcaaaggtggctagaggtgcaggtagctaatttaacaagtccacagcgctgggtgcagtacctccggcttcttcaggagtccatctggcctggtggagttttgcctaagtttccacggcccgtaaggacccaagagcagaaactggctgctgagaaacaggctttgcagagcctgatgggagtcctcccagatctcgtagtagaaattcttggggtgaacaaatgccggctgagctggggtctagtcctggagtcactacaacaacccctcatcaacaggcatttgatttactgccttggggacatcatcctggaattcttggatctcagtgcctctgttgaggagtctgctgctaccacctctgcctcagataccccaggcaactctaagaggatgggtgtctcctcttagctggttattcacgccttcttcccaggtcagggaagtagagttactcggccaccagagaccagtcaggaagcccgtgccctcttcaagtaggctacagctaagaaggcctaggttctcggtggctcacttctctcccacttctgctccatttgtagcaggtgacaggggtctgtgtgtcccagttgcatgcacgtttatttccctgttccttttgtgatgttgggattgttgctggtgagtagatcctgtttcctttgggaaaagaagctgtgaggtagaggaatgaaccccttttgcttctccttttgccatcctccctgagattgtttgccagaatcctggccctgtgcacacatgtgcttaatccaccagcacacaagctctagatagaacaggaaaaaaactgtggccagatttccttggaggagaaaacaaccttctcagctctctgttcctacccggaaactaaaaattcattcagggccattctcaaaaaccagactcctgggtctaatctagtttcccaacagttccagaagaagaaggagggaagaaaatttttcaaggaacttcttgctcatgtgttgctgtttcccaacacatcagccttatggaagatgtcatgaggctgcttgcctgggaggctacactttcctttccagaagacttcaaagctgactgccaaagcttctggtaaatccaccccacccttcacaccctttcctgaaaggcatttataccacccattttatttattggctttgctcccaaccccctgccctagagcaattgagtttttgaatttttgaccctctctctgtcttcagcaaaactgcatgacaagctgcatattcagcctcagtttttccaaggagaatggaaagcacttgcctcctgtcttaagaatgcacaaagagtaggactagcaaggctgggggatgaaatctcccttcctaagtctttgacagagaacttttattattctgaacagataagattagcaaacttacaaggaatagcttcttatttcccattccttacggttataatcagtcctttaacaacaccagcatgaaggcaaaggtgttttgtcagactgcaacatctattagaaaggcaaggcaactgggaattgctggagaaggataaatcaggaggaattgctggtagaaaaggctgcagacagtcacagggaagtgctgtatattaaatgcatgtgaatagctggcaaaaagatgtcaaggatgtcactgggagccctttggcttcacactcgcctgttagcgccttgctttcgctgaattaccagagcctaccactcggaggaaggtcttggagttagactgatgagaaggcaatggggtgtcaaaaacaagtgtcaaagttctcttagattctgaagtcggtgatgagcacacaattaaagtggtttgtggaagaaagttgtaaaatctttttacttttttgcccctctggaggcttttaaccctaaattgtgtctgatgtattcgggaggcttaggtgtgcaattcttgcccaaaggcaaggagatgaatgagatgtctcatggcctcttctagccttaaaagttgaccattacagtgactttatggctccaaagttcttgaagcatctccagccctagactttgacaagaaaaggtagctcagcatctctactttccgtgagtacctgcaggagtccagccaatgtattagagctgatcattaagctccttcagtgagggctaagatcctattctcgatgagcatagggggacagccttgttttatgccacttttctctccccataccttcccctcatgtgtacttagccacctgtgttgctttgaatctgctgccagttctggctcaaatgtggcacaaaatcagtacatcagacacaccatgaaatccctgtggctataaattctaaggaatcttttgacacttccagcccaaagaacttatttttatttcgtattatataagagtccccacctctactccacgtaccccaaaaagataagctgtcctcagatcctccttctacccaggagggaaataatggatattgccaagggaacaatcagaactcatctggctttgaaaacgacctgccaagtttggctagcaggttcagacaacaagagagtaacaattggtagagagccacaggtagggaaaagatactcccagctgacagggtgataaaaggcagggaagaattgggcctgtgctgatccaggaaggttttattgtttgcttgttttttgtatttactcgtgactaaattttattcatttaagtcagaattttgatatttgaaataagactactttcccttttcttactatctataaaaaagacgaggcagggatgctgtgttctttctgtcaaattctaaatgtgatctttgccattgcttatttgaattcaagaaagctatactttttcatcacatataactcacagtttcatttttgcattgttggattagacttaataaaacctaaatggaaaataaattcctaaatctga

SEQ ID NO: 325792 - DNA, 4003 bp, Homo sapiens
gacccggaagcggtcgccggcggccggccggcggtcatccttcacacaggcccggctgcggagcgcagtcgcccaggtttacggcggcagagggccgaggctcccggagaggaccgcgatgagtccacttcaggtcggggctgagtgtgggcgcgcggttcccggcggcgtgtgacccagtcttcgccggccgctgcccgctgcgtgttacgagacagcccttgacggtgaaaacagcagcggcctgcagcagctggcctaccacactgtgaatcgtcgctatcgggagttcttgaatctgcagacccgtctggaggagaaaccagatctacgaaagttcatcaaaaatgtgaagggtcctaaaaagctctttccagatcttccatttggaaacatggacagtgacagagtagaagcccgtaagagcctcctagaatcattcctaaagcaactctgtgccattccagagatcgctaacagtgaggaggtgcaggagttccttgctctgaacacagatgctcgtattgcctttgtcaagaaaccatttatggtctctagaatagacaagatggtggtgagtgccattgtggacaccttgaagacagcgtttcctcgctctgaaccccagagccccacagaggagctgagtgaggccgagaccgaaagcaagccccagacagaaggcaagaaggctagcaagtccaggctgaggttctcatccagtaaaatttctccagcactaagtgtgactgaagcacaagacaagattctttattgtctccaggaaggcagtgtgacaaagttactggaaatgcagccaacaaaagccccagaaaaagatcctgaacaacctcccaaaggacgtgtggacagttgcgtgtcagatgcagccgtgccagcccaagaccccagcaacagcgatccaggaacagagacagagttagctgacacagccctggatctgctcctcttgctactaacagaacagtggaaatggctatgtaccgaaaacatgcaaaagtttcttcgtcttatctttgggaccctagttcaaaggtggctagaggtgcaggtagctaatttaacaagtccacagcgctgggtgcagtacctccggcttcttcaggagtccatctggcctggtggagttttgcctaagtttccacggcccgtaaggacccaagagcagaaactggctgctgagaaacaggctttgcagagcctgatgggagtcctcccagatctcgtagtagaaattcttggggtgaacaaatgccggctgagctggggtctagtcctggagtcactacaacaacccctcatcaacaggcatttgatttactgccttggggacatcatcctggaattcttggatctcagtgcctctgttgaggagtctgctgctaccacctctgcctcagataccccaggcaactctaagaggatgggtgtctcctcttagctggttattcacgccttcttcccaggtcagggaagtagagttactcggccaccagagaccagtcaggaagcccgtgccctcttcaagtaggctacagctaagaaggcctaggttctcggtggctcacttctctcccacttctgctccatttgtagcaggtgacaggggtctgtgtgtcccagttgcatgcacgtttatttccctgttccttttgtgatgttgggattgttgctggtgagtagatcctgtttcctttgggaaaagaagctgtgaggtagaggaatgaaccccttttgcttctccttttgccatcctccctgagattgtttgccagaatcctggccctgtgcacacatgtgcttaatccaccagcacacaagctctagatagaacaggaaaaaaactgtggccagatttccttggaggagaaaacaaccttctcagctctctgttcctacccggaaactaaaaattcattcagggccattctcaaaaaccagactcctgggtctaatctagtttcccaacagttccagaagaagaaggagggaagaaaatttttcaaggaacttcttgctcatgtgttgctgtttcccaacacatcagccttatggaagatgtcatgaggctgcttgcctgggaggctacactttcctttccagaagacttcaaagctgactgccaaagcttctggtaaatccaccccacccttcacaccctttcctgaaaggcatttataccacccattttatttattggctttgctcccaaccccctgccctagagcaattgagtttttgaatttttgaccctctctctgtcttcagcaaaactgcatgacaagctgcatattcagcctcagtttttccaaggagaatggaaagcacttgcctcctgtcttaagaatgcacaaagagtaggactagcaaggctgggggatgaaatctcccttcctaagtctttgacagagaacttttattattctgaacagataagattagcaaacttacaaggaatagcttcttatttcccattccttacggttataatcagtcctttaacaacaccagcatgaaggcaaaggtgttttgtcagactgcaacatctattagaaaggcaaggcaactgggaattgctggagaaggataaatcaggaggaattgctggtagaaaaggctgcagacagtcacagggaagtgctgtatattaaatgcatgtgaatagctggcaaaaagatgtcaaggatgtcactgggagccctttggcttcacactcgcctgttagcgccttgctttcgctgaattaccagagcctaccactcggaggaaggtcttggagttagactgatgagaaggcaatggggtgtcaaaaacaagtgtcaaagttctcttagattctgaagtcggtgatgagcacacaattaaagtggtttgtggaagaaagttgtaaaatctttttacttttttgcccctctggaggcttttaaccctaaattgtgtctgatgtattcgggaggcttaggtgtgcaattcttgcccaaaggcaaggagatgaatgagatgtctcatggcctcttctagccttaaaagttgaccattacagtgactttatggctccaaagttcttgaagcatctccagccctagactttgacaagaaaaggtagctcagcatctctactttccgtgagtacctgcaggagtccagccaatgtattagagctgatcattaagctccttcagtgagggctaagatcctattctcgatgagcatagggggacagccttgttttatgccacttttctctccccataccttcccctcatgtgtacttagccacctgtgttgctttgaatctgctgccagttctggctcaaatgtggcacaaaatcagtacatcagacacaccatgaaatccctgtggctataaattctaaggaatcttttgacacttccagcccaaagaacttatttttatttcgtattatataagagtccccacctctactccacgtaccccaaaaagataagctgtcctcagatcctccttctacccaggagggaaataatggatattgccaagggaacaatcagaactcatctggctttgaaaacgacctgccaagtttggctagcaggttcagacaacaagagagtaacaattggtagagagccacaggtagggaaaagatactcccagctgacagggtgataaaaggcagggaagaattgggcctgtgctgatccaggaaggttttattgtttgcttgttttttgtatttactcgtgactaaattttattcatttaagtcagaattttgatatttgaaataagactactttcccttttcttactatctataaaaaagacgaggcagggatgctgtgttctttctgtcaaattctaaatgtgatctttgccattgcttatttgaattcaagaaagctatactttttcatcacatataactcacagtttcatttttgcattgttggattagacttaataaaacctaaatggaaaataaattcctaaatctga

SEQ ID NO: 325793 - DNA, 4964 bp, Homo sapiens
gacccggaagcggtcgccggcggccggccggcggtcatccttcacacaggcccggctgcggagcgcagtcgcccaggtttacggcggcagagggccgaggctcccggagaggaccgcgatgagtccacttcaggtcggggctgagtgtgggcgcgcggttcccggcggcgtgtgacccagtcttcgccggccgctgcccgctgcgtgtgtaagtgtccgtgggccccagggccttgcagcgcccgccccgaggccccgaagaggccttccgcctggggcagtgtgaaggccacagagttttcctccaaagccacacctcagctggaaggggcgagttggagggctctgttagtggtagccatggggagacgcggagctgcagctgtcgctttgcagtgcctgtaggactttgagggcctggagccccggttccctgaacagcacccagatcgccccatatctgagacacagttcatgccccccttccctaactctgaagtaaaatcttgagggctgtcatctggggaagccaccttgtccgttcagccatgaagacagaaacagtgccaccgttccaggaaactccagctggatcgagctgtcacctcaataacctgttgagtagccggaagctgatggctgtgggggtcttgcttggctggctcctggtcatacaccttctggtcaacgtgtggctgctgtgccttctgtcggcattgctagtggtgctgggaggatggctgggctccagcctcgctggagtggcttcaggtcgactgcatctggaacgcttcatcccgttggccacctgtcctccatgccctgaggcagaaaggcagctggaacgggagatcaaccgcaccatccagatgattattcgagattttgtgttatcttggtaccgttccgtgagccaggagccagcctttgaggaagaaatggaggcagccatgaaagggttggtccaggagcttcggagaaggatgagcgtgatggacagtcatgctgttgcccagagtgttctgactctctgcggttgtcacctgcagagctacattcaggcaaaggaggccactgcagggaagaatggtccagttgagccttcccacctctgggaggcttactgccgggcgactgccccacatcctgctgtgcacagccccagtgctgaagtcacctatacgcgtggcgttgtgaatttgttgcttcaagggctggtgcccaagccccacttggagactcgtaccggacgccatgtagtggtcgaactcatcacatgcaatgtaatcttaccactgatcagcaggctgtcagatcctgactggatccaccttgtactcgtgggtatcttttccaaggccagagatccagcaccctgcccagccagtgcccccgaacagccctcagtgcccacatctctgccactgattgctgaggtagagcagcttccagaagggagagcttctccagtagcagccccagtattcctaagttacagtgagccagagggttctgcaggcccctctccagaggttgaagaaggccacgaagctgtagagggagatttgggtgggatgtgtgaagaaagaaaagtaggaaacaactcatctcatttcctacagccaaatcttcgaggtcccctgttcttatgtgaagactcagagctggagtctccgctgtctgaactgggcaaagaaaccatcatgctcatgactccaggcagctttctctctgacaggattcaggatgccctgtgtgccctagagagttcccaggctctggaacccaaagatggtgaggcatctgaaggagcagaggctgaggagggtccagggacagaaacagagacaggcctgccggtctccacactgaattcctgcccagagatccatattgacacagcagacaaggagatagaacaaggagatgttaccgcctctgttacagctttgctggaggggccagaaaagacctgcccctcacggccgtcatgcttagagaaggatctcaccaatgatgtgagctcccttgatcctactctgccaccagttctgctttcctcctctccacctggtcctctcagctcagccaccttcagctttgagcccctaagcagtcccgatggtccagttatcatccagaaccttcgtatcactggcaccattacagcccgagagcacagtggcactggattccacccatacacactctatactgtgaagtacgagacagcccttgacggtgaaaacagcagcggcctgcagcagctggcctaccacactgtgaatcgtcgctatcgggagttcttgaatctgcagacccgtctggaggagaaaccagatctacgaaagttcatcaaaaatgtgaagggtcctaaaaagctctttccagatcttccatttggaaacatggacagtgacagagtagaagcccgtaagagcctcctagaatcattcctaaagcaactctgtgccattccagagatcgctaacagtgaggaggtgcaggagttccttgctctgaacacagatgctcgtattgcctttgtcaagaaaccatttatggtctctagaatagacaagatggtggtgagtgccattgtggacaccttgaagacagcgtttcctcgctctgaaccccagagccccacagaggagctgagtgaggccgagaccgaaagcaagccccagacagaaggcaagaaggctagcaagtccaggctgaggttctcatccagtaaaatttctccagcactaagtgtgactgaagcacaagacaagattctttattgtctccaggaaggcagtgtggagtctgagactctatccatgtctgcgatggaatcttttattgaaaaacagacaaagttactggaaatgcagccaacaaaagccccagaaaaagatcctgaacaacctcccaaaggacgtgtggacagttgcgtgtcagatgcagccgtgccagcccaagaccccagcaacagcgatccaggaacagagacagagttagctgacacagccctggatctgctcctcttgctactaacagaacagtggaaatggctatgtaccgaaaacatgcaaaagtttcttcgtcttatctttgggaccctagttcaaaggtggctagaggtgcaggtagctaatttaacaagtccacagcgctgggtgcagtacctccggcttcttcaggagtccatctggcctggtggagttttgcctaagtttccacggcccgtaaggacccaagagcagaaactggctgctgagaaacaggctttgcagagcctgatgggagtcctcccagatctcgtagtagaaattcttggggtgaacaaatgccggctgagctggggtctagtcctggagtcactacaacaacccctcatcaacaggcatttgatttactgccttggggacatcatcctggaattcttggatctcagtgcctctgttgaggagtctgctgctaccacctctgcctcagataccccaggcaactctaagaggatgggtgtctcctcttagctggttattcacgccttcttcccaggtcagggaagtagagttactcggccaccagagaccagtcaggaagcccgtgccctcttcaagtaggctacagctaagaaggcctaggttctcggtggctcacttctctcccacttctgctccatttgtagcaggtgacaggggtctgtgtgtcccagttgcatgcacgtttatttccctgttccttttgtgatgttgggattgttgctggtgagtagatcctgtttcctttgggaaaagaagctgtgaggtagaggaatgaaccccttttgcttctccttttgccatcctccctgagattgtttgccagaatcctggccctgtgcacacatgtgcttaatccaccagcacacaagctctagatagaacaggaaaaaaactgtggccagatttccttggaggagaaaacaaccttctcagctctctgttcctacccggaaactaaaaattcattcagggccattctcaaaaaccagactcctgggtctaatctagtttcccaacagttccagaagaagaaggagggaagaaaatttttcaaggaacttcttgctcatgtgttgctgtttcccaacacatcagccttatggaagatgtcatgaggctgcttgcctgggaggctacactttcctttccagaagacttcaaagctgactgccaaagcttctggtaaatccaccccacccttcacaccctttcctgaaaggcatttataccacccattttatttattggctttgctcccaaccccctgccctagagcaattgagtttttgaatttttgaccctctctctgtcttcagcaaaactgcatgacaagctgcatattcagcctcagtttttccaaggagaatggaaagcacttgcctcctgtcttaagaatgcacaaagagtaggactagcaaggctgggggatgaaatctcccttcctaagtctttgacagagaacttttattattctgaacagataagattagcaaacttacaaggaatagcttcttatttcccattccttacggttataatcagtcctttaacaacaccagcatgaaggcaaaggtgttttgtcagactgcaacatctattagaaaggcaaggcaactgggaattgctggagaaggataaatcaggaggaattgctggtagaaaaggctgcagacagtcacagggaagtgctgtatattaaatgcatgtgaatagctggcaaaaagatgtcaaggatgtcactgggagccctttggcttcacactcgcctgttagcgccttgctttcgctgaattaccagagcctaccactcggaggaaggtcttggagttagactgatgagaaggcaatggggtgtcaaaaacaagtgtcaaagttctcttagattctgaagtcggtgatgagcacacaattaaagtggtttgtgga

SEQ ID NO: 325794 - DNA, 3327 bp, Homo sapiens
gacccggaagcggtcgccggcggccggccggcggtcatccttcacacaggcccggctgcggagcgcagtcgcccaggtttacggcggcagagggccgaggctcccggagaggaccgcgatgagtccacttcaggtcggggctgagtgtgggcgcgcggttcccggcggcgtgtgacccagtcttcgccggccgctgcccgctgcgtgtgtaagtgtccgtgggccccagggccttgcagcgcccgccccgaggccccgaagaggccttccgcctggggcagtgtgaaggccacagagttttcctccaaagccacacctcagctggaaggggcgagttggagggctctgttagtggtagccatggggagacgcggagctgcagctgtcgctttgcagtgcctgtaggactttgagggcctggagccccggttccctgaacagcacccagatcgccccatatctgagacacagttcatgccccccttccctaactctgaagtaaaatcttgagggctgtcatctggggaagccaccttgtccgttcagccatgaagacagaaacagtgccaccgttccaggaaactccagctggatcgagctgtcacctcaataacctgttgagtagccggaagctgatggctgtgggggtcttgcttggctggctcctggtcatacaccttctggtcaacgtgtggctgctgtgccttctgtcggcattgctagtggtgctgggaggatggctgggctccagcctcgctggagtggcttcaggtcgactgcatctggaacgcttcatcccgttggccacctgtcctccatgccctgaggcagaaaggcagctggaacgggagatcaaccgcaccatccagatgattattcgagattttgtgttatcttggtaccgttccgtgagccaggagccagcctttgaggaagaaatggaggcagccatgaaagggttggtccaggagcttcggagaaggatgagcgtgatggacagtcatgctgttgcccagagtgttctgactctctgcggttgtcacctgcagagctacattcaggcaaaggaggccactgcagggaagaatggtccagttgagccttcccacctctgggaggcttactgccgggcgactgccccacatcctgctgtgcacagccccagtgctgaagtcacctatacgcgtggcgttgtgaatttgttgcttcaagggctggtgcccaagccccacttggagactcgtaccggacgccatgtagtggtcgaactcatcacatgcaatgtaatcttaccactgatcagcaggctgtcagatcctgactggatccaccttgtactcgtgggtatcttttccaaggccagagatccagcaccctgcccagccagtgcccccgaacagccctcagtgcccacatctctgccactgattgctgaggtagagcagcttccagaagggagagcttctccagtagcagccccagtattcctaagttacagtgagccagagggttctgcaggcccctctccagaggttgaagaaggccacgaagctgtagagggagatttgggtgggatgtgtgaagaaagaaaagtaggaaacaactcatctcatttcctacagccaaatcttcgaggtcccctgttcttatgtgaagactcagagctggagtctccgctgtctgaactgggcaaagaaaccatcatgctcatgactccaggcagctttctctctgacaggattcaggatgccctgtgtgccctagagagttcccaggctctggaacccaaagatggtgaggcatctgaaggagcagaggctgaggagggtccagggacagaaacagagacaggcctgccggtctccacactgaattcctgcccagagatccatattgacacagcagacaaggagatagaacaaggagatgttaccgcctctgttacagctttgctggaggggccagaaaagacctgcccctcacggccgtcatgcttagagaaggatctcaccaatgatgtgagctcccttgatcctactctgccaccagttctgctttcctcctctccacctggtcctctcagctcagccaccttcagctttgagcccctaagcagtcccgatggtccagttatcatccagaaccttcgtatcactggcaccattacagcccgagagcacagtggcactggattccacccatacacactctatactgtgaagtacgagacagcccttgacggtgaaaacagcagcggcctgcagcagctggcctaccacactgtgaatcgtcgctatcgggagttcttgaatctgcagacccgtctggaggagaaaccagatctacgaaagttcatcaaaaatgtgaagggtcctaaaaagctctttccagatcttccatttggaaacatggacagtgacagagtagaagcccgtaagagcctcctagaatcattcctaaagcaactctgtgccattccagagatcgctaacagtgaggaggtgcaggagttccttgctctgaacacagatgctcgtattgcctttgtcaagaaaccatttatggtctctagaatagacaagatggtggtgagtgccattgtggacaccttgaagacagcgtttcctcgctctgaaccccagagccccacagaggagctgagtgaggccgagaccgaaagcaagccccagacagaaggcaagaaggctagcaagtccaggctgaggttctcatccagtaaaatttctccagcactaagtgtgactgaagcacaagacaagattctttattgtctccaggaaggcagtgtggagtctgagactctatccatgtctgcgatggaatcttttattgaaaaacagacaaagttactggaaatgcagccaacaaaagccccagaaaaagatcctgaacaacctcccaaaggacgtgtggacagttgcgtgtcagatgcagccgtgccagcccaagaccccagcaacagcgatccaggaacagagacagagttagctgacacagccctggatctgctcctcttgctactaacagaacagtggaaatggctatgtaccgaaaacatgcaaaagtttcttcgtcttatctttgggaccctagttcaaagagttctagggttctgcagaagtgcttctgaagccaacttagaagctcagggaaaactgagtggaccatgacccaaccacagaagttacactttgatcagtttaatatactggggctctaggtaacgctttgtttgaaaaggggctccactctgtttaaaatatgcatttatttctttatattaaaattccacctcctttcttaatt

SEQ ID NO: 325795 - DNA, 2626 bp, Homo sapiens
gacccggaagcggtcgccggcggccggccggcggtcatccttcacacaggcccggctgcggagcgcagtcgcccaggtttacggcggcagagggccgaggctcccggagaggaccgcgatgagtccacttcaggtcggggctgagtgtgggcgcgcggttcccggcggcgtgtgacccagtcttcgccggccgctgcccgctgcgtgtgtaagtgtccgtgggccccagggccttgcagcgcccgccccgaggccccgaagaggccttccgcctggggcagtgtgaaggccacagagttttcctccaaagccacacctcagctggaaggggcgagttggagggctctgttagtggtagccatggggagacgcggagctgcagctgtcgctttgcagtgcctgtaggactttgagggcctggagccccggttccctgaacagcacccagatcgccccatatctgagacacagttcatgccccccttccctaactctgaagtaaaatcttgagggctgtcatctggggaagccaccttgtccgttcagccatgaagacagaaacagtgccaccgttccaggaaactccagctggatcgagctgtcacctcaataacctgttgagtagccggaagctgatggctgtgggggtcttgcttggctggctcctggtcatacaccttctggtcaacgtgtggctgctgtgccttctgtcggcattgctagtggtgctgggaggatggctgggctccagcctcgctggagtggcttcaggtcgactgcatctggaacgcttcatcccgttggccacctgtcctccatgccctgaggcagaaaggcagctggaacgggagatcaaccgcaccatccagatgattattcgagattttgtgttatcttggtaccgttccgtgagccaggagccagcctttgaggaagaaatggaggcagccatgaaagggttggtccaggagcttcggagaaggatgagcgtgatggacagtcatgctgttgcccagagtgttctgactctctgcggttgtcacctgcagagctacattcaggcaaaggaggccactgcagggaagaatggtccagttgagccttcccacctctgggaggcttactgccgggcgactgccccacatcctgctgtgcacagccccagtgctgaagtcacctatacgcgtggcgttgtgaatttgttgcttcaagggctggtgcccaagccccacttggagactcgtaccggacgccatgtagtggtcgaactcatcacatgcaatgtaatcttaccactgatcagcaggctgtcagatcctgactggatccaccttgtactcgtgggtatcttttccaaggccagagatccagcaccctgcccagccagtgcccccgaacagccctcagtgcccacatctctgccactgattgctgaggtagagcagcttccagaagggagagcttctccagtagcagccccagtattcctaagttacagtgagccagagggttctgcaggcccctctccagaggttgaagaaggccacgaagctgtagagggagatttgggtgggatgtgtgaagaaagaaaagtaggaaacaactcatctcatttcctacagccaaatcttcgaggtcccctgttcttatgtgaagactcagagctggagtctccgctgtctgaactgggcaaagaaaccatcatgctcatgactccaggcagctttctctctgacaggattcaggatgccctgtgtgccctagagagttcccaggctctggaacccaaagatggtgaggcatctgaaggagcagaggctgaggagggtccagggacagaaacagagacaggcctgccggtctccacactgaattcctgcccagagatccatattgacacagcagacaaggagatagaacaaggagatgttaccgcctctgttacagctttgctggaggggccagaaaagacctgcccctcacggccgtcatgcttagagaaggatctcaccaatgatgtgagctcccttgatcctactctgccaccagttctgctttcctcctctccacctggtcctctcagctcagccaccttcagctttgagcccctaagcagtcccgatggtccagttatcatccagaaccttcgtatcactggcaccattacagcccgagagcacagtggcactggattccacccatacacactctatactgtgaagtacgagacagcccttgacggtgaaaacagcagcggcctgcagcagctggcctaccacactgtgaatcgtcgctatcgggagttcttgaatctgcagacccgtctggaggagaaaccagatctacgaaagttcatcaaaaatgtgaagggtcctaaaaagctctttccagatcttccatttggaaacatggacagtgacagagtagaagcccgtaagagcctcctagaatcattcctaaagcaactctgtgccattccagagatcgctaacagtgaggaggtgcaggagttccttgctctgaacacagatgctcgtattgcctttgtcaagaaaccatttatggtctctagaatagacaaggtgttaccgatttggaaactagaaatcacctttttacttaaaaa

SEQ ID NO: 325796 - DNA, 2284 bp, Homo sapiens
gacccggaagcggtcgccggcggccggccggcggtcatccttcacacaggcccggctgcggagcgcagtcgcccaggtttacggcggcagagggccgaggctcccggagaggaccgcgatgagtccacttcaggtcggggctgagtgtgggcgcgcggttcccggcggcgtgtgacccagtcttcgccggccgctgcccgctgcgtgtgtaagtgtccgtgggccccagggccttgcagcgcccgccccgaggccccgaagaggccttccgcctggggcagtgtgaaggccacagagttttcctccaaagccacacctcagctggaaggggcgagttggagggctctgttagtggtagccatggggagacgcggagctgcagctgtcgctttgcagtgcctgtaggactttgagggcctggagccccggttccctgaacagcacccagatcgccccatatctgagacacagttcatgccccccttccctaactctgaagtaaaatcttgagggctgtcatctggggaagccaccttgtccgttcagccatgaagacagaaacagtgccaccgttccaggaaactccagctggatcgagctgtcacctcaataacctgttgagtagccggaagctgatggctgtgggggtcttgcttggctggctcctggtcatacaccttctggtcaacgtgtggctgctgtgccttctgtcggcattgctagtggtgctgggaggatggctgggctccagcctcgctggagtggcttcaggtcgactgcatctggaacgcttcatcccgttggccacctgtcctccatgccctgaggcagaaaggcagctggaacgggagatcaaccgcaccatccagatgattattcgagattttgtgttatcttggtaccgttccgtgagccaggagccagcctttgaggaagaaatggaggcagccatgaaagggttggtccaggagcttcggagaaggatgagcgtgatggacagtcatgctgttgcccagagtgttctgactctctgcggttgtcacctgcagagctacattcaggcaaaggaggccactgcagggaagaatggtccagttgagccttcccacctctgggaggcttactgccgggcgactgccccacatcctgctgtgcacagccccagtgctgaagtcacctatacgcgtggcgttgtgaatttgttgcttcaagggctggtgcccaagccccacttggagactcgtaccggacgccatgtagtggtcgaactcatcacatgcaatgtaatcttaccactgatcagcaggctgtcagatcctgactggatccaccttgtactcgtgggtatcttttccaaggccagagatccagcaccctgcccagccagtgcccccgaacagccctcagtgcccacatctctgccactgattgctgaggtagagcagcttccagaagggagagcttctccagtagcagccccagtattcctaagttacagtgagccagagggttctgcaggcccctctccagaggttgaagaaggccacgaagctgtagagggagatttgggtgggatgtgtgaagaaagaaaagtaggaaacaactcatctcatttcctacagccaaatcttcgaggtcccctgttcttatgtgaagactcagagctggagtctccgctgtctgaactgggcaaagaaaccatcatgctcatgactccaggcagctttctctctgacaggattcaggatgccctgtgtgccctagagagttcccaggctctggaacccaaagatggtgaggcatctgaaggagcagaggctgaggagggtccagggacagaaacagagacaggcctgccggtctccacactgaattcctgcccagagatccatattgacacagcagacaaggagatagaacaaggagatgttaccgcctctgttacagctttgctggaggggccagaaaagacctgcccctcacggccgtcatgcttagagaaggatctcaccaatgatgtgagctcccttgatcctactctgccaccagttctgctttcctcctctccacctggtcctctcagctcagccaccttcagctttgagcccctaagcagtcccgatggtccagttatcatccagaaccttcgtatcactggcaccattacagcccgagagcacagtggcactggattccacccatacacactctatactgtgaagcgagacaccccttgcaggctaagcccaggcctactaatttgctgacagtgacacaagcccgg

SEQ ID NO: 325797 - DNA, 1212 bp, Homo sapiens
gcaacttgcccttctcaaacatggccgccacggcgcctctggaagggaaccgctctgggccccgcctttgatctcgttggtggggctgggggatgagagctgcaccgcgcgggacaagtcgccggcggcgcccgacggagcagaagagagagcatggagctggagaggatcgtcagtgcagccctccttgcctttgtccagacacacctcccggaggccgacctcagtggcttggatgaggtcatcttctcctatgtgcttggggtcctggaggacctgggcccctcgggcccatcagaggagaacttcgatatggaggctttcactgagatgatggaggcctatgtgcctggcttcgcccacatccccaggggcacaataggggacatgatgcagaagctctcagggcagctgagcgatgccaggaacaaagagaacctgcaaccgcagagctctggtgtccaaggtcaggtgcccatctccccagagcccctgcagcggcccgaaatgctcaaagaagagactaggtcttcggctgctgctgctgcagacacccaagatgaggcaactggcgctgaggaggagcttctgccaggggtggatgtactcctggaggtgttccctacctgttcggtggagcaggcccagtgggtgctggccaaagctcggggggacttggaagaagctgtgcagatgctggtagagggaaaggaagaggggcctgcagcctgggagggccccaaccaggacctgcccagacgcctcagaggcccccaaaaggatgagctgaagtccttcatcctgcagaagtacatgatggtggatagcgcagaggatcagaagattcaccggcccatggctcccaaggaggcccccaagaagctgatccgatacatcgacaaccaggtagtgagcaccaaaggggagcgattcaaagatgtgcggaaccctgaggccgaggagatgaaggccacatacatcaacctcaagccagccagaaagtaccgcttccattgaggcactcgccggactctgcccgagccttctaggctcagatcccagagggatgcaggagccctatacccctacacaggggccccctaactcctgtcccccttctctactcctttgctccatagtgttaacctactctcggagctgcctccatgggcacagtaaaggtggcccaaggaaaagtaattagtgcattct

SEQ ID NO: 325798 - DNA, 1297 bp, Homo sapiens
gcaacttgcccttctcaaacatggccgccacggcgcctctggaagggaaccgctctgggccccgcctttgatctcgttggtggggctgggggatgagagctgcaccgcgcgggacaagtcgccggcggcgcccgacggagcagaagagagagcatggagctggagaggatcgtcagtgcagccctccttgcctttgtccagacacacctcccggaggccgacctcagtggcttggatgaggtcatcttctcctatgtgcttggggtcctggaggacctgggcccctcgggcccatcagaggagaacttcgatatggaggctttcactgagatgatggaggcctatgtgcctggcttcgcccacatccccaggggcacaataggggacatgatgcagaagctctcagggcagctgagcgatgccaggaacaaagagaacctgcaaccgcagagctctggtgtccaaggtcaggtgcccatctccccagagcccctgcagcggcccgaaatgctcaaagaagagactaggtcttcggctgctgctgctgcagacacccaagatgaggtactggtagaggagggtaccgatgagggacccagggggctggaaaggggggagtattgcctcttgttaacgtttgtacccttaggcaactggcgctgaggaggagcttctgccaggggtggatgtactcctggaggtgttccctacctgttcggtggagcaggcccagtgggtgctggccaaagctcggggggacttggaagaagctgtgcagatgctggtagagggaaaggaagaggggcctgcagcctgggagggccccaaccaggacctgcccagacgcctcagaggcccccaaaaggatgagctgaagtccttcatcctgcagaagtacatgatggtggatagcgcagaggatcagaagattcaccggcccatggctcccaaggaggcccccaagaagctgatccgatacatcgacaaccaggtagtgagcaccaaaggggagcgattcaaagatgtgcggaaccctgaggccgaggagatgaaggccacatacatcaacctcaagccagccagaaagtaccgcttccattgaggcactcgccggactctgcccgagccttctaggctcagatcccagagggatgcaggagccctatacccctacacaggggccccctaactcctgtcccccttctctactcctttgctccatagtgttaacctactctcggagctgcctccatgggcacagtaaaggtggcccaaggaaaagtaattagtgcattct

SEQ ID NO: 325799 - DNA, 432 bp, Homo sapiens
aggagcttcacccagccagtttttgacaggtacatgatggtggatagcgcagaggatcagaagattcaccggcccatggctcccaaggaggcccccaagaagctgatccgatacatcgacaaccaggtagtgagcaccaaaggggagcgattcaaagatgtgcggaaccctgaggccgaggagatgaaggccacatacatcaacctcaagccagccagaaagtaccgcttccattgaggcactcgccggactctgcccgagccttctaggctcagatcccagagggatgcaggagccctatacccctacacaggggccccctaactcctgtcccccttctctactcctttgctccatagtgttaacctactctcggagctgcctccatgggcacagtaaaggtggcccaaggaaaagtaattagtgcattct

SEQ ID NO: 325800 - DNA, 1307 bp, Homo sapiens
gcaacttgcccttctcaaacatggccgccacggcgcctctggaagggaaccgctctgggccccgcctttgatctcgttggtggggctgggggatgagagctgcaccgcgcgggacaagtcgccggcggcgcccgacggagcagaagagagagcatggagctggagaggatcgtcagtgcagccctccttgcctttgtccagacacacctcccggaggccgacctcagtggcttggatgaggtcatcttctcctatgtgcttggggtcctggaggacctgggcccctcgggcccatcagaggagaacttcgatatggaggctttcactgagatgatggaggcctatgtgcctggcttcgcccacatccccaggggcacaataggggacatgatgcagaagctctcagggcagctgagcgatgccaggaacaaagagaacctgcaaccgcagagctctggtgtccaaggtcaggtgcccatctccccagagcccctgcagcggcccgaaatgctcaaagaagagactaggtcttcggctgctgctgctgcagacacccaagatgaggcaactggcgctgaggaggagcttctgccaggggtggatgtactcctggaggtgttccctacctgttcggtggagcaggcccagtgggtgctggccaaagctcggggggacttggaagaagctgtgcagatgctggtagagggaaaggaagaggggcctgcagcctgggagggccccaaccaggacctgcccagacgcctcagaggcccccaaaaggatgagctgaagtccttcatcctgcagaagtacatgatggtggatagcgcagaggatcagaagattcaccggcccatggctcccaaggaggcccccaagaagctgatccgatacatcgacaaccaggtagtgagcaccaaaggggagcgattcaaagatgtgcggaaccctgaggccgaggagatgaaggccacatacatcaacctcaagccagccagaaagtaccgcttccattgaggcactcgccggactctgcccgagccttctaggctcagatcccagagggatgcaggagccctatacccctacacaggggccccctaactcctgtcccccttctctactcctttgctccatagtgttaacctactctcggagctgcctccatgggcacagtaaaggtgcgggggaaaaataaaaatacatttatctcgtctatgttattgtgcgtttctctcgttgattattttaccgtactattttctaaaatttgttgggggggggggggcccctacaccaaaatattt

SEQ ID NO: 325801 - DNA, 1123 bp, Homo sapiens
  misc_feature (1031)..(1031): n is a, c, g, or t
  misc_feature (1036)..(1036): n is a, c, g, or t
  misc_feature (1038)..(1038): n is a, c, g, or t
gcaacttgcccttctcaaacatggccgccacggcgcctctggaagggaaccgctctgggccccgcctttgatctcgttggtggggctgggggatgagagctgcaccgcgcgggacaagtcgccggcggcgcccgacggagcagaagagagagcatggagctggagaggatcgtcagtgcagccctccttgcctttgtccagacacacctcccggaggccgacctcagtggcttggatgaggtcatcttctcctatgtgcttggggtcctggaggacctgggcccctcgggcccatcagaggagaacttcgatatggaggctttcactgagatgatggaggcctatgtgcctggcttcgcccacatccccaggggcacaataggggacatgatgcagaagctctcagggcagctgagcgatgccaggaacaaagagaacctgcaaccgcagagctctggtgtccaaggtcaggtgcccatctccccagagcccctgcagcggcccgaaatgctcaaagaagagactaggtcttcggctgctgctgctgcagacacccaagatgaggcaactggcgctgaggaggagcttctgccaggggtggatgtactcctggaggtgttccctacctgttcggtggagcaggcccagtgggtgctggccaaagctcggggggacttggaagaagctgtgcagatgctggtagagggaaaggaagaggggcctgcagcctgggagggccccaaccaggacctgcccagacgcctcagaggcccccaaaaggatgagctgaagtccttcatcctgcagaagtacatgatggtggatagcgcagaggatcagaagattcaccggcccatggctcccaaggaggcccccaagaagctgatccgatacatcgacaaccaggtagtgagcaccaaaggggagcgattcaaagatgtgcggaaccctgaggccgaggagatgaaggccacatacatcaacctcaagccagccagaaagtaccgcttccattgaggcactcgcgaatntgccnancatcagggcaacccaggggagtcgcgccatataccacagggggcccaaacagggccacagaagcctgaggcagtgaatcacgcgg

SEQ ID NO: 325802 - DNA, 1234 bp, Homo sapiens
gcaacttgcccttctcaaacatggccgccacggcgcctctggaagggaaccgctctgggccccgcctttgatctcgttggtggggctgggggatgagagctgcaccgcgcgggacaagtcgccggcggcgcccgacggagcagaagagagagcatggagctggagaggatcgtcagtgcagccctccttgcctttgtccagacacacctcccggaggccgacctcagtggcttggatgaggtcatcttctcctatgtgcttggggtcctggaggacctgggcccctcgggcccatcagaggagaacttcgatatggaggctttcactgagatgatggaggcctatgtgcctggcttcgcccacatccccaggggcacaataggggacatgatgcagaagctctcagggcagctgagcgatgccaggaacaaagagaacctgcaaccgcagagctctggtgtccaaggtcaggtgcccatctccccagagcccctgcagcggcccgaaatgctcaaagaagagactaggtcttcggctgctgctgctgcagacacccaagatgaggcaactggcgctgaggaggagcttctgccaggggtggatgtactcctggaggtgttccctacctgttcggtggagcaggcccagtgggtgctggccaaagctcggggggacttggaagaagctgtgcagatgctggtagagggaaaggaagaggggcctgcagcctgggagggccccaaccagaccaggcctcccctctctgcaggacctgcccagacgcctcagaggcccccaaaaggatgagctgaagtccttcatcctgcagaagtacatgatggtggatagcgcagaggatcagaagattcaccggcccatggctcccaaggaggcccccaagaagctgatccgatacatcgacaaccaggtagtgagcaccaaaggggagcgattcaaagatgtgcggaaccctgaggccgaggagatgaaggccacatacatcaacctcaagccagccagaaagtaccgcttccattgaggcactcgccggactctgcccgagccttctaggctcagatcccagagggatgcaggagccctatacccctacacaggggccccctaactcctgtcccccttctctactcctttgctccatagtgttaacctactctcggagctgcctccatgggcacagtaaaggtggcccaaggaaaagtaattagtgcattct

SEQ ID NO: 325803 - DNA, 924 bp, Homo sapiens
  misc_feature (546)..(546): n is a, c, g, or t
  misc_feature (551)..(551): n is a, c, g, or t
  misc_feature (553)..(553): n is a, c, g, or t
  misc_feature (563)..(564): n is a, c, g, or t
  misc_feature (567)..(567): n is a, c, g, or t
  misc_feature (579)..(579): n is a, c, g, or t
  misc_feature (583)..(583): n is a, c, g, or t
  misc_feature (585)..(585): n is a, c, g, or t
  misc_feature (597)..(598): n is a, c, g, or t
  misc_feature (606)..(606): n is a, c, g, or t
  misc_feature (612)..(612): n is a, c, g, or t
  misc_feature (719)..(719): n is a, c, g, or t
  misc_feature (729)..(729): n is a, c, g, or t
  misc_feature (732)..(732): n is a, c, g, or t
  misc_feature (734)..(734): n is a, c, g, or t
  misc_feature (740)..(740): n is a, c, g, or t
  misc_feature (762)..(762): n is a, c, g, or t
  misc_feature (768)..(768): n is a, c, g, or t
  misc_feature (772)..(772): n is a, c, g, or t
  misc_feature (791)..(791): n is a, c, g, or t
  misc_feature (797)..(798): n is a, c, g, or t
  misc_feature (803)..(803): n is a, c, g, or t
  misc_feature (827)..(827): n is a, c, g, or t
  misc_feature (845)..(845): n is a, c, g, or t
  misc_feature (861)..(861): n is a, c, g, or t
  misc_feature (896)..(896): n is a, c, g, or t
gcaacttgcccttctcaaacatggccgccacggcgcctctggaagggaaccgctctgggccccgcctttgatctcgttggtggggctgggggatgagagctgcaccgcgcgggacaagtcgccggcggcgcccgacggagcagaagagagagcatggagctggagaggatcgtcagtgcagccctccttgcctttgtccagacacacctcccggaggccgacctcagtggcttggatgaggtcatcttctcctatgtgcttggggtcctggaggacctgggcccctcgggcccatcagaggagaacttcgatatggaggctttcactgagatgatggaggcctatgtgcctggcttcgcccacatccccaggggcacaataggggacatgatgcagaagctctcagggcagctgagcgatgccaggaacaaagagaacctgcaaccgcagagctctggtgtccaaggtcaggtgcccatctccccagagcccctgcagcggcccgaaatgctcaaagaagagactaggtgttggggtggtgatganggcgncnaggccgctgnnggncgtgggggtgcngcgncngttgtaggcggnntggctgtngtagtngcggtagttagatcggtgttgggtggaggcggaggagtgaggtggtggagcccggtggagggggcgttggccgccggtgtagcgctggtggtagagggcccggccgnggggggtggnggntnggcggnggggccggcggcggtggggcgnggggtncgcnggggggccccggctgcggngccgtnntttcnggtggcgcagtagctgctggtggntcggggcgcggctgcgcngcttgcgggggggctnggtggaccggcgggggggcagccggtgctgggcangcaggcgcaggctttctttcaggggccc

SEQ ID NO: 325804 - DNA, 951 bp, Homo sapiens
tttgtccctggtgtgattccgtcctgcgcggttgttctctggagcagcgttcttttatctccgtccgccttctctcctacctaagtgcgtgccgccacccgatggaagattcgatggacatggacatgagccccctgaggccccagaactatcttttcggttgtgaactaaaggccgacaaagattatcactttaaggtggataatgatgaaaatgagcaccagttatctttaagaacggtcagtttaggggctggtgcaaaggatgagttgcacattgttgaagcagaggcaatgaattacgaaggcagtccaattaaagtaacactggcaactttgaaaatgtctgtacagccaacggtttcccttgggggctttgaaataacaccaccagtggtcttaaggttgaagtgtggttcagggccagtgcatattagtggacagcacttagtagctgtggaggaagatgcagagtcagaagatgaagaggaggaggatgtgaaactcttaagtatatctggaaagcggtctgcccctggaggtggtagcaaggttccacagaaaaaagtaaaacttgctgctgatgaagatgatgacgatgatgatgaagaggatgatgatgaagatgatgatgatgatgattttgatgatgaggaagctgaagaaaaagcgccagtgaagaaatctatacgagatactccagccaaaaatgcacaaaagtcaaatcagaatggaaaagactcaaaacatcatcaacaccaagatcaaaaggacaagaatccttcaagaaacaggaaaaactcctaaaacaccaaaaggacctagttctgtagaagacattaaagcaaaaatgcagcagtttggaaaagcgcatgacgccgggcacgcacggtcctccgccccgagggaacagcgacaggggacacaacgcaccggaggccaaacaagagcc

SEQ ID NO: 325805 - DNA, 1217 bp, Homo sapiens
tttgtccctggtgtgattccgtcctgcgcggttgttctctggagcagcgttcttttatctccgtccgccttctctcctacctaagtgcgtgccgccacccgatggaagattcgatggacatggacatgagccccctgaggccccagaactatcttttcggttgtgaactaaaggccgacaaagattatcactttaaggtggataatgatgaaaatgagcaccagttatctttaagaacggtcagtttaggggctggtgcaaaggatgagttgcacattgttgaagcagaggcaatgaattacgaaggcagtccaattaaagtaacactggcaactttgaaaatgtctgtacagccaacggtttcccttgggggctttgaaataacaccaccagtggtcttaaggttgaagtgtggttcagggccagtgcatattagtggacagcacttagtagctgtggaggaagatgcagagtcagaagatgaagaggaggaggatgtgaaactcttaagtatatctggaaagcggtctgcccctggaggtggtagcaaggttccacagaaaaaagtaaaacttgctgctgatgaagatgatgacgatgatgatgaagaggatgatgatgaagatgatgatgatgatgattttgatgatgaggaagctgaagaaaaagcgccagtgaagaaatgacaagaatccttcaagaaacaggaaaaactcctaaaacaccaaaaggacctagttctgtagaagacattaaagcaaaaatgcaagcaagtatagaaaaaggtggttctcttcccaaagtggaagccaaattcatcaattatgtgaagaattgcttccggatgactgaccaagaggctattcaagatctctggcagtggaggaagtctctttaagaaaatagtttaaacaatttgttaaaaaattttccgtcttatttcatttctgtaacagttgatatctggctgtcctttttataatgcagagtgagaactttccctaccgtgtttgataaatgttgtccaggttctattgccaagaatgtgttgtccaaaatgcctgtttagtttttaaagatggaactccaccctttgcttggttttaagtatgtatggaatgttatgataggacatagtagtagcggtggtcagacatggaaatggtggggagacaaaaatatacatgtgaaataaaactcagtattttaataaagta

SEQ ID NO: 325806 - DNA, 1303 bp, Homo sapiens
tttgtccctggtgtgattccgtcctgcgcggttgttctctggagcagcgttcttttatctccgtccgccttctctcctacctaagtgcgtgccgccacccgatggaagattcgatggacatggacatgagccccctgaggccccagaactatcttttcggttgtgaactaaaggccgacaaagattatcactttaaggtggataatgatgaaaatgagcaccagttatctttaagaacggtcagtttaggggctggtgcaaaggatgagttgcacattgttgaagcagaggcaatgaattacgaaggcagtccaattaaagtaacactggcaactttgaaaatgtctgtacagccaacggtttcccttgggggctttgaaataacaccaccagtggtcttaaggttgaagtgtggttcagggccagtgcatattagtggacagcacttagtagctgtggaggaagatgcagagtcagaagatgaagaggaggaggatgtgaaactcttaagtatatctggaaagcggtctgcccctggaggtggtagcaaggttccacagaaaaaagtaaaacttgctgctgatgaagatgatgacgatgatgatgaagaggatgatgatgaagatgatgatgatgatgattttgatgatgaggaagctgaagaaaaagcgccagtgaagaaatctatacgagatactccagccaaaaatgcacaaaagtcaaatcagaatggaaaagactcaaaacatcatcaacaccaagatcaaaaggacaagaatccttcaagaaacaggaaaaactcctaaaacaccaaaaggacctagttctgtagaagacattaaagcaaaaatgcaagcaagtatagaaaaaggtggttctcttcccaaagtggaagccaaattcatcaattatgtgaagaattgcttccggatgactgaccaagaggctattcaagatctctggcagtggaggaagtctctttaagaaaatagtttaaacaatttgttaaaaaattttccgtcttatttcatttctgtaacagttgatatctggctgtcctttttataatgcagagtgagaactttccctaccgtgtttgataaatgttgtccaggttctattgccaagaatgtgttgtccaaaatgcctgtttagtttttaaagatggaactccaccctttgcttggttttaagtatgtatggaatgttatgataggacatagtagtagcggtggtcagacatggaaatggtggggagacaaaaatatacatgtgaaataaaactcagtattttaataaagta

SEQ ID NO: 325807 - DNA, 824 bp, Homo sapiens
tttgtccctggtgtgattccgtcctgcgcggttgttctctggagcagcgttcttttatctccgtccgccttctctcctacctaagtgcgtgccgccacccgatggaagattcgatggacatggacatgagccccctgaggccccagaactatcttttcggttgtgaactaaaggccgacaaagattatcactttaaggtggataatgatgaaaatgagcaccagttatctttaagaacggtcagtttaggggctggtgcaaaggatgagttgcacattgttgaagcagaggcaatgaattacgaaggcagtccaattaaagtaacactggcaactttgaaaatgtctgtacagccaacggtttcccttgggggctttgaaataacaccaccagtggtcttaaggttgaagtgtggttcagggccagtgcatattagtggacagcacttagtagctgtggaggaagatgcagagtcagaagatgaagaggaggaggatgtgaaactcttaagtatatctggaaagcggtctgcccctggaggtggtagcaaggttccacagaaaaaagtaaaacttgctgctgatgaagatgatgacgatgatgatgaagaggatgatgatgaagatgatgatgatgatgattttgatgatgaggaagcagctgaaaggagctattgaaaaacactgacatggaatgctcctaaactgatcgcaaagtatttgtgggacgacttaagtctcgtacagaacgagaagctgaacttggagctagggcaaaagaattcaccaatgtttacatcaagaatctcggcgaagacatggatg

SEQ ID NO: 325808 - DNA, 1151 bp, Homo sapiens
tttgtccctggtgtgattccgtcctgcgcggttgttctctggagcagcgttcttttatctccgtccgccttctctcctacctaagtgcgtgccgccacccgatggaagattcgatggacatggacatgagccccctgaggccccagaactatcttttcggttgtgaactaaaggccgacaactttgaaaatgtctgtacagccaacggtttcccttgggggctttgaaataacaccaccagtggtcttaaggttgaagtgtggttcagggccagtgcatattagtggacagcacttagtagctgtggaggaagatgcagagtcagaagatgaagaggaggaggatgtgaaactcttaagtatatctggaaagcggtctgcccctggaggtggtagcaaggttccacagaaaaaagtaaaacttgctgctgatgaagatgatgacgatgatgatgaagaggatgatgatgaagatgatgatgatgatgattttgatgatgaggaagctgaagaaaaagcgccagtgaagaaatctatacgagatactccagccaaaaatgcacaaaagtcaaatcagaatggaaaagactcaaaacatcatcaacaccaagatcaaaaggacaagaatccttcaagaaacaggaaaaactcctaaaacaccaaaaggacctagttctgtagaagacattaaagcaaaaatgcaagcaagtatagaaaaaggtggttctcttcccaaagtggaagccaaattcatcaattatgtgaagaattgcttccggatgactgaccaagaggctattcaagatctctggcagtggaggaagtctctttaagaaaatagtttaaacaatttgttaaaaaattttccgtcttatttcatttctgtaacagttgatatctggctgtcctttttataatgcagagtgagaactttccctaccgtgtttgataaatgttgtccaggttctattgccaagaatgtgttgtccaaaatgcctgtttagtttttaaagatggaactccaccctttgcttggttttaagtatgtatggaatgttatgataggacatagtagtagcggtggtcagacatggaaatggtggggagacaaaaatatacatgtgaaataaaactcagtattttaataaagta

SEQ ID NO: 325809 - DNA, 1180 bp, Homo sapiens
tttgtccctggtgtgattccgtcctgcgcggttgttctctggagcagcgttcttttatctccgtccgccttctctcctacctaagtgcgtgccgccacccgatggaagattcgatggacatggacatgagccccctgaggccccagaactatcttttcggttgtgaactaaaggccgacaaagattatcactttaaggtggataatgatgaaaatgagcaccagttatctttaagaacggtcagtttaggggctggtgcaaaggatgagttgcacattgttgaagcagaggcaatgaattacgaaggcagtccaattaaagtaacactggcaactttgaaaatgtctgtacagccaacggtttcccttgggggctttgaaataacaccaccagtggtcttaaggttgaagtgtggttcagggccagtgcatattagtggacagcacttagtagctgtggaggaagatgcagagtcagaagatgaagaggatgatgatgaagatgatgatgatgatgattttgatgatgaggaagctgaagaaaaagcgccagtgaagaaatctatacgagatactccagccaaaaatgcacaaaagtcaaatcagaatggaaaagactcaaaacatcatcaacaccaagatcaaaaggacaagaatccttcaagaaacaggaaaaactcctaaaacaccaaaaggacctagttctgtagaagacattaaagcaaaaatgcaagcaagtatagaaaaaggtggttctcttcccaaagtggaagccaaattcatcaattatgtgaagaattgcttccggatgactgaccaagaggctattcaagatctctggcagtggaggaagtctctttaagaaaatagtttaaacaatttgttaaaaaattttccgtcttatttcatttctgtaacagttgatatctggctgtcctttttataatgcagagtgagaactttccctaccgtgtttgataaatgttgtccaggttctattgccaagaatgtgttgtccaaaatgcctgtttagtttttaaagatggaactccaccctttgcttggttttaagtatgtatggaatgttatgataggacatagtagtagcggtggtcagacatggaaatggtggggagacaaaaatatacatgtgaaataaaactcagtattttaataaagta

SEQ ID NO: 325810 - DNA, 848 bp, Homo sapiens
tttgtccctggtgtgattccgtcctgcgcggttgttctctggagcagcgttcttttatctccgtccgccttctctcctacctaagtgcgtgccgccacccgatggaagattcgatggacatggacatgagccccctgaggccccagaactatcttttcggttgtgaactaaaggccgacaaagattatcactttaaggtggataatgatgaaaatgagcaccagttatctttaagaacggtcagtttaggggctggtgcaaaggatgagttgcacattgttgaagcagaggcaatgaattacgaaggcagtccaattaaagtaacactggcaactttgaaaatgtctgtacagccaacggtttcccttgggggctttgaaataacaccaccagtggtcttaaggttgaagtgtggttcagggccagtgcatattagtggacagcacttagtagctgtggaggaaattgcttccggatgactgaccaagaggctattcaagatctctggcagtggaggaagtctctttaagaaaatagtttaaacaatttgttaaaaaattttccgtcttatttcatttctgtaacagttgatatctggctgtcctttttataatgcagagtgagaactttccctaccgtgtttgataaatgttgtccaggttctattgccaagaatgtgttgtccaaaatgcctgtttagtttttaaagatggaactccaccctttgcttggttttaagtatgtatggaatgttatgataggacatagtagtagcggtggtcagacatggaaatggtggggagacaaaaatatacatgtgaaataaaactcagtattttaataaagta

SEQ ID NO: 325811 - DNA, 1226 bp, Homo sapiens
tttgtccctggtgtgattccgtcctgcgcggttgttctctggagcagcgttcttttatctccgtccgccttctctcctacctaagtgcgtgccgccacccgatggaagattcgatggacatggacatgagccccctgaggccccagaactatcttttcggttgtgaactaaaggccgacaaagattatcactttaaggtggataatgatgaaaatgagcaccagttatctttaagaacggtcagtttaggggctggtgcaaaggatgagttgcacattgttgaagcagaggcaatgaattacgaaggcagtccaattaaagtaacactggcaactttgaaaatgtctgtacagccaacggtttcccttgggggctttgaaataacaccaccagtggtcttaaggttgaagtgtggttcagggccagtgcatattagtggacagcacttagtagctgtggaggagtggtagcaaggttccacagaaaaaagtaaaacttgctgctgatgaagatgatgacgatgatgatgaagaggatgatgatgaagatgatgatgatgatgattttgatgatgaggaagctgaagaaaaagcgccagtgaagaaatctatacgagatactccagccaaaaatgcacaaaagtcaaatcagaatggaaaagactcaaaacatcatcaacaccaagatcaaaaggacaagaatccttcaagaaacaggaaaaactcctaaaacaccaaaaggacctagttctgtagaagacattaaagcaaaaatgcaagcaagtatagaaaaaggtggttctcttcccaaagtggaagccaaattcatcaattatgtgaagaattgcttccggatgactgaccaagaggctattcaagatctctggcagtggaggaagtctctttaagaaaatagtttaaacaatttgttaaaaaattttccgtcttatttcatttctgtaacagttgatatctggctgtcctttttataatgcagagtgagaactttccctaccgtgtttgataaatgttgtccaggttctattgccaagaatgtgttgtccaaaatgcctgtttagtttttaaagatggaactccaccctttgcttggttttaagtatgtatggaatgttatgataggacatagtagtagcggtggtcagacatggaaatggtggggagacaaaaatatacatgtgaaataaaactcagtattttaataaagta

SEQ ID NO: 325812 - DNA, 143 bp, Homo sapiens
tgtgctcatatccctacgacttcaaataccactgacatgctaatgaccaccaaatacaaccaggctagaccctctgcccaagctccatgcttatatattcggtgcttcctggacacctccaagcagatgtcctttaagctcag

SEQ ID NO: 325813 - DNA, 1263 bp, Homo sapiens
ccttgagacctaatgccaaatagaaatttagatgtcttgtcggggctgattaacagaaaaagtaattatcaatcagttcacaggaaattatcattagctgtcttactgatactggttctctgtgagcgatcctctttataatttgtagagatgatttatttctaaaggaatggcaatgtgaataaaggtttctatatgttttagttgagaagagccctagagatcagctgtgtgtctcttgttttataattgtgaaaattgaggctcttggaaggcacatgatttgcccagggtcagtggccaagccaaggattagagagtgggctcttctctttttctgggtgaactttctactgcatttggacattccttgttttgtggattaacagaagtcagcatccggtattgtagctgtccctttcagcgaatggctccttggaagcaaacctgccagtggttatcaagctccttacatacccagcaccgacccccaggactggcttacccaaaagcagaccttggagaacagtcaggtctgttgctgcttttattgtttcctacagtagacacagcagtaggtggagttagttactaatcagtagtactatgtgtcattgttaactttttggttgcagtctggaaacatatttattaatagtctcttcatcatagaaagtttagaaaataaggaactctttatcatagaaaattttaaaaataaagaattttatattaaaaaagcccacaaacccataatctcaacacaaagagaaaaacactgtaacaataaaagtgaagtatttatatacttcagttttctatacatacatattttaaaagaaccattctgtaagtcctgtttcggtaggtagattttttttttcaccaggataacattaacatatttctctgtcatttaatttcttctgtaaagtatttagtagtatataattgattggctgtaatttaaattcaagtttttctggatataaaaaaggattccctaaacatccaggagccaattatttgtgtgcattcttgattagttccttaggagtacatttatagaaattgcattcctagattataattctgcttacgctttaagactttggatacatattgccaatttggcttcccaggaagttgccaacagtttatagtctcaccagcagaatattcagggtacctgcttccctgaaacctaagagtaatagtcatttaggttttttgctctgaatttgacacaaaatagcaattttg

SEQ ID NO: 325814 - DNA, 3487 bp, Homo sapiens
ctggagttgccgtgtgacgcgtgggcgggacgaggcccgggctcggggacctttcgcactcgggtcaggggtaaagcagcctgtcgcttgccgggcagctggtgagtcggtgacctggcctgtgaggagcagtgaggagaatgaataccttccaagaccagagtggcagctccagtaatagagaaccccttttgaggtgtagtgatgcacggagggacttggagcttgctattggtggagttctccgggctgaacagcaaattaaagataacttgcgagaggtcaaagctcagattcacagttgcataagccgtcacctggaatgtcttagaagccgtgaggtatggctgtatgaacaggtggaccttatttatcagcttaaagaggagacacttcaacagcaggctcagcagctctactcgttattgggccagttcaattgtcttactcatcaactggagtgtacccaaaacaaagatctagccaatcaagtctctgtgtgcctggagagactgggcagtttgacccttaagcctgaagattcaactgtcctgctctttgaagctgacacaattactctgcgccagaccatcaccacatttgggtctctcaaaaccattcaaattcctgagcacttgatggctcatgctagttcagcaaatattgggcccttcctggagaagagaggctgtatctccatgccagagcagaagtcagcatccggtattgtagctgtccctttcagcgaatggctccttggaagcaaacctgccagtggttatcaagctccttacatacccagcaccgacccccaggactggcttacccaaaagcagaccttggagaacagtcagacttcttccagagcctgcaatttcttcaataatgtcgggggaaacctaaagggcttagaaaactggctcctcaagagtgaaaaatcaagttatcaaaagtgtaacagccattccactactagttctttctccattgaaatggaaaaggttggagatcaagagcttcctgatcaagatgagatggacctatcagattggctagtgactccccaggaatcccataagctgcggaagcctgagaatggcagtcgtgaaaccagtgagaagtttaagctcttattccagtcctataatgtgaatgattggcttgtcaagactgactcctgtaccaactgtcagggaaaccagcccaaaggtgtggagattgaaaacctgggcaatctgaagtgcctgaatgaccacttggaggccaagaaaccattgtccacccccagcatggttacagaggattggcttgtccagaaccatcaggacccatgtaaggtagaggaggtgtgcagagccaatgagccctgcacaagctttgcagagtgtgtgtgtgatgagaattgtgagaaggaggctctgtataagtggcttctgaagaaagaaggaaaggataaaaatgggatgcctgtggaacccaaacctgagcctgagaagcataaagattccctgaatatgtggctctgtcctagaaaagaagtaatagaacaaactaaagcaccaaaggcaatgactccttctagaattgctgattccttccaagtcataaagaacagccccttgtcggagtggcttatcaggcccccatacaaagaaggaagtcccaaggaagtgcctggtactgaagacagagctggcaaacagaagtttaaaagccccatgaatacttcctggtgttcctttaacacagctgactgggtcctgccaggaaagaagatgggcaacctcagccagttatcttctggagaagacaagtggctgcttcgaaagaaggcccaggaagtattacttaattcacctctacaggaggaacataacttccccccagaccattatggcctccctgcagtttgtgatctctttgcctgtatgcagcttaaagttgataaagagaagtggttatatcgaactcctctacagatgtgaaggaatggacaagagttgagcagcctttctgctgattatcacacatcatgagctgagtgactgcagcttgccaaatctttgtgtttctgggtctgaccaattagcttagttcttctcctgcctaattttgaactagtaaagcaaagtgagtcatcagattatgagttactgtttaaaagaaaaatgctgtttattcatgctgaggtgattcagttccctccttcttacagaagtattttaattcaccccacactagaaatgcagcatctttgtggacgtctttttcacaagcctccaaggctccttagattgggtcgttactaaaagtacattaaaacactcttgtttatcgaagtatattgatgtattctaaagctagtaaacttccctaacgtttaattgccctacagatgcttctcttgctgtgggttttcttttgttagtggtctgaaataattattttcctgttctattaatacatagtgtattttgcacaaaaaaattaacctggtcaatagtgattaccaaaatatatattaataatcttggcaatttttgacattaattatgaaacattttagcccacgttagttctacattattcttcacttaaactcagctactgcaaattttgtctttctgtaaatgttattaaaatatccagtgagctctttagaaggactcagtattatttcaagactatttttgaggtaattctagccttttaaaatattctacagacctacggggcttaaaagaaccccagtaccgactaagcaaataggcaaaagacatgttggaaatgtagtatagtacttgaaacagtcactatcatagggataattggtgcatcctgtgtaaatggaagctgagcttgacacctggtgcttttaagtagggataaagtcatcctctcactgcaagcacagcatacctgtacctccaaaagtgacgttttagtgaacaggccgttttcaacacttgtgccttggggtgttcattgaagctttgtgaaaactactgatgttttctcagtctccttaaagttacgtccatgctttaaaatgtctgtgtaggagagaagtggggtttataatgttttctctaagatatctttgctgctttccagactttgaaactattaagcttcttaactgcctcttaccggaaatacttctggggaaacttcatggtcccaaaatgtcattgccatacagcttcactagagttctttgaaccacagctgaaaagagctttgtattattttttaattccctccccagatatcatttaggagtattatataaaggtggtgggcaaaaacaatgtaaggagcctttccagttatcttgagttgcagctctgtagtttcttgaggccaaacacactgtattttacaagtcaaaatataatttacattaatcactatgttaatgagtatgtaaaacattcttttgcattgatgaattttgtatctgcttccattaaaagcataacagcca

SEQ ID NO: 325815 - DNA, 3355 bp, Homo sapiens
ctggagttgccgtgtgacgcgtgggcgggacgaggcccgggctcggggacctttcgcactcgggtcaggggtaaagcagcctgtcgcttgccgggcagctggtgagtcggtgacctggcctgtgaggagcagtgaggagaatgaataccttccaagaccagagtggcagctccagtaatagagaaccccttttgaggtgtagtgatgcacggagggacttggagcttgctattggtggagttctccgggctgaacagcaaattaaagataacttgcgagaggtcaaagctcagattcacagttgcataagccgtcacctggaatgtcttagaagccgtgaggtatggctgtatgaacaggtggaccttatttatcagcttaaagaggagacacttcaacagcaggctcagcagctctactcgttattgggccagttcaattgtcttactcatcaactggagtgtacccaaaacaaagatctagccaatcaagtctctgtgtgcctggagagactgggcagtttgacccttaagcctgaagattcaactgtcctgctctttgaagctgacacaattactctgcgccagaccatcaccacatttgggtctctcaaaaccattcaaattcctgagcacttgatggctcatgctagttcagcaaatattgggcccttcctggagaagagaggctgtatctccatgccagagcagaagtcagcatccggtattgtagctgtccctttcagcgaatggctccttggaagcaaacctgccagtggttatcaagctccttacatacccagcaccgacccccaggactggcttacccaaaagcagaccttggagaacagtcagacttcttccagagcctgcaatttcttcaataatgtcgggggaaacctaaagggcttagaaaactggctcctcaagagtgaaaaatcaagttatcaaaagtgtaacagccattccactactagttctttctccattgaaatggaaaaggttggagatcaagagcttcctgatcaagatgagatggacctatcagattggctagtgactccccaggaatcccataagctgcggaagcctgagaatggcagtcgtgaaaccagtgagaagtttaagctcttattccagtcctataatgtgaatgattggcttgtcaagactgactcctgtaccaactgtcagggaaaccagcccaaaggtgtggagattgaaaacctgggcaatctgaagtgcctgaatgaccacttggaggccaagaaaccattgtccacccccagcatggttacagaggattggcttgtccagaaccatcaggacccatgtaaggtagaggaggtgtgcagagccaatgagccctgcacaagctttgcagagtgtgtgtgtgatgagaattgtgagaaggaggctctgtataagtggcttctgaagaaagaaggaaaggataaaaatgggatgcctgtggaacccaaacctgagcctgagaagcataaagattccctgaatatgtggctctgtcctagaaaagaagtaatagaacaaactaaagcaccaaaggcaatgactccttctagaattgctgattccttccaagtcataaagaacagccccttgtcggagtggcttatcaggcccccatacaaagaaggaagtcccaaggaagtgcctggtactgaagacagagctggcaaacagaaggaagtattacttaattcacctctacaggaggaacataacttccccccagaccattatggcctccctgcagtttgtgatctctttgcctgtatgcagcttaaagttgataaagagaagtggttatatcgaactcctctacagatgtgaaggaatggacaagagttgagcagcctttctgctgattatcacacatcatgagctgagtgactgcagcttgccaaatctttgtgtttctgggtctgaccaattagcttagttcttctcctgcctaattttgaactagtaaagcaaagtgagtcatcagattatgagttactgtttaaaagaaaaatgctgtttattcatgctgaggtgattcagttccctccttcttacagaagtattttaattcaccccacactagaaatgcagcatctttgtggacgtctttttcacaagcctccaaggctccttagattgggtcgttactaaaagtacattaaaacactcttgtttatcgaagtatattgatgtattctaaagctagtaaacttccctaacgtttaattgccctacagatgcttctcttgctgtgggttttcttttgttagtggtctgaaataattattttcctgttctattaatacatagtgtattttgcacaaaaaaattaacctggtcaatagtgattaccaaaatatatattaataatcttggcaatttttgacattaattatgaaacattttagcccacgttagttctacattattcttcacttaaactcagctactgcaaattttgtctttctgtaaatgttattaaaatatccagtgagctctttagaaggactcagtattatttcaagactatttttgaggtaattctagccttttaaaatattctacagacctacggggcttaaaagaaccccagtaccgactaagcaaataggcaaaagacatgttggaaatgtagtatagtacttgaaacagtcactatcatagggataattggtgcatcctgtgtaaatggaagctgagcttgacacctggtgcttttaagtagggataaagtcatcctctcactgcaagcacagcatacctgtacctccaaaagtgacgttttagtgaacaggccgttttcaacacttgtgccttggggtgttcattgaagctttgtgaaaactactgatgttttctcagtctccttaaagttacgtccatgctttaaaatgtctgtgtaggagagaagtggggtttataatgttttctctaagatatctttgctgctttccagactttgaaactattaagcttcttaactgcctcttaccggaaatacttctggggaaacttcatggtcccaaaatgtcattgccatacagcttcactagagttctttgaaccacagctgaaaagagctttgtattattttttaattccctccccagatatcatttaggagtattatataaaggtggtgggcaaaaacaatgtaaggagcctttccagttatcttgagttgcagctctgtagtttcttgaggccaaacacactgtattttacaagtcaaaatataatttacattaatcactatgttaatgagtatgtaaaacattcttttgcattgatgaattttgtatctgcttccattaaaagcataacagcca

SEQ ID NO: 325816 - DNA, 279 bp, Homo sapiens
gcacgaggttcaaagaactctagctgaaaaggctccttacattgtttttgcccaccacctttatataatactcctaaatgatatctgtggtgggcaaaaacaatgtaaggagcctttccagttatcttgagttgcagctctgtagtttcttgaggccaaacacactgtattttacaagtcaaaatataatttacattaatcactatgttaatgagtatgtaaaacattcttttgcattgatgaattttgtatctgcttccattaaaagcataacagcca

SEQ ID NO: 325817 - DNA, 375 bp, Homo sapiens
gctgcggaagcctgagaatggcagtcgtgaaaccagtgagaagtttaagctcttattccagtcctataatgtgaatgattggcttgtcaagactggcttacccaaaagcagaccttggagaacagtcagacttcttccagagcctgcaatttcttcaataatgtcgggggaaacctaaagggcttagaaaactggctcctcaagagtgaaaaatcaattatcttgagttgcagctctgtagtttcttgaggccaaacacactgtattttacaagtcaaaatataatttacattaatcactatgttaatgagtatgtaaaacattcttttgcattgatgaattttgtatctgcttccattaaaagcataacagcca

SEQ ID NO: 325818 - DNA, 3548 bp, Homo sapiens
agggcagtcaagggcttctggctgacccgagcggagatctcgcgagactgtcagacgtatggcgagaggtgtgggaggaagattgtgttgtcgcgagaactctgcctttgggccgtaggttagtgtggggccgtgtctcagtccacccaaggtctcctcggatcgcctggagaggcactcggacctggagcagtgaggagaatgaataccttccaagaccagagtggcagctccagtaatagagaaccccttttgaggtgtagtgatgcacggagggacttggagcttgctattggtggagttctccgggctgaacagcaaattaaagataacttgcgagaggtcaaagctcagattcacagttgcataagccgtcacctggaatgtcttagaagccgtgaggtatggctgtatgaacaggtggaccttatttatcagcttaaagaggagacacttcaacagcaggctcagcagctctactcgttattgggccagttcaattgtcttactcatcaactggagtgtacccaaaacaaagatctagccaatcaagtctctgtgtgcctggagagactgggcagtttgacccttaagcctgaagattcaactgtcctgctctttgaagctgacacaattactctgcgccagaccatcaccacatttgggtctctcaaaaccattcaaattcctgagcacttgatggctcatgctagttcagcaaatattgggcccttcctggagaagagaggctgtatctccatgccagagcagaagtcagcatccggtattgtagctgtccctttcagcgaatggctccttggaagcaaacctgccagtggttatcaagctccttacatacccagcaccgacccccaggactggcttacccaaaagcagaccttggagaacagtcagacttcttccagagcctgcaatttcttcaataatgtcgggggaaacctaaagggcttagaaaactggctcctcaagagtgaaaaatcaagttatcaaaagtgtaacagccattccactactagttctttctccattgaaatggaaaaggttggagatcaagagcttcctgatcaagatgagatggacctatcagattggctagtgactccccaggaatcccataagctgcggaagcctgagaatggcagtcgtgaaaccagtgagaagtttaagctcttattccagtcctataatgtgaatgattggcttgtcaagactgactcctgtaccaactgtcagggaaaccagcccaaaggtgtggagattgaaaacctgggcaatctgaagtgcctgaatgaccacttggaggccaagaaaccattgtccacccccagcatggttacagaggattggcttgtccagaaccatcaggacccatgtaaggtagaggaggtgtgcagagccaatgagccctgcacaagctttgcagagtgtgtgtgtgatgagaattgtgagaaggaggctctgtataagtggcttctgaagaaagaaggaaaggataaaaatgggatgcctgtggaacccaaacctgagcctgagaagcataaagattccctgaatatgtggctctgtcctagaaaagaagtaatagaacaaactaaagcaccaaaggcaatgactccttctagaattgctgattccttccaagtcataaagaacagccccttgtcggagtggcttatcaggcccccatacaaagaaggaagtcccaaggaagtgcctggtactgaagacagagctggcaaacagaagtttaaaagccccatgaatacttcctggtgttcctttaacacagctgactgggtcctgccaggaaagaagatgggcaacctcagccagttatcttctggagaagacaagtggctgcttcgaaagaaggcccaggaagtattacttaattcacctctacaggaggaacataacttccccccagaccattatggcctccctgcagtttgtgatctctttgcctgtatgcagcttaaagttgataaagagaagtggttatatcgaactcctctacagatgtgaaggaatggacaagagttgagcagcctttctgctgattatcacacatcatgagctgagtgactgcagcttgccaaatctttgtgtttctgggtctgaccaattagcttagttcttctcctgcctaattttgaactagtaaagcaaagtgagtcatcagattatgagttactgtttaaaagaaaaatgctgtttattcatgctgaggtgattcagttccctccttcttacagaagtattttaattcaccccacactagaaatgcagcatctttgtggacgtctttttcacaagcctccaaggctccttagattgggtcgttactaaaagtacattaaaacactcttgtttatcgaagtatattgatgtattctaaagctagtaaacttccctaacgtttaattgccctacagatgcttctcttgctgtgggttttcttttgttagtggtctgaaataattattttcctgttctattaatacatagtgtattttgcacaaaaaaattaacctggtcaatagtgattaccaaaatatatattaataatcttggcaatttttgacattaattatgaaacattttagcccacgttagttctacattattcttcacttaaactcagctactgcaaattttgtctttctgtaaatgttattaaaatatccagtgagctctttagaaggactcagtattatttcaagactatttttgaggtaattctagccttttaaaatattctacagacctacggggcttaaaagaaccccagtaccgactaagcaaataggcaaaagacatgttggaaatgtagtatagtacttgaaacagtcactatcatagggataattggtgcatcctgtgtaaatggaagctgagcttgacacctggtgcttttaagtagggataaagtcatcctctcactgcaagcacagcatacctgtacctccaaaagtgacgttttagtgaacaggccgttttcaacacttgtgccttggggtgttcattgaagctttgtgaaaactactgatgttttctcagtctccttaaagttacgtccatgctttaaaatgtctgtgtaggagagaagtggggtttataatgttttctctaagatatctttgctgctttccagactttgaaactattaagcttcttaactgcctcttaccggaaatacttctggggaaacttcatggtcccaaaatgtcattgccatacagcttcactagagttctttgaaccacagctgaaaagagctttgtattattttttaattccctccccagatatcatttaggagtattatataaaggtggtgggcaaaaacaatgtaaggagcctttccagttatcttgagttgcagctctgtagtttcttgaggccaaacacactgtattttacaagtcaaaatataatttacattaatcactatgttaatgagtatgtaaaacattcttttgcattgatgaattttgtatctgcttccattaaaagcataacagcca

SEQ ID NO: 325819 - DNA, 3491 bp, Homo sapiens
agggcagtcaagggcttctggctgacccgagcggagatctcgcgagactgtcagacgtatggcgagaggtgtgggaggaagattgtgttgtcgcgagaactctgcctttgggccgtaggttagtgtggggccgtgtctcagtccacccaaggtctcctcggatcgcctggagaggcactcggacctggagcagtgaggagaatgaataccttccaagaccagagtggcagctccagtaatagagaaccccttttgaggtgtagtgatgcacggagggacttggagcttgctattggtggagttctccgggctgaacagcaaattaaagataacttgcgagaggtcaaagctcagattcacagttgcataagccgtcacctggaatgtcttagaagccgtgaggtatggctgtatgaacaggtggaccttatttatcagcttaaagaggagacacttcaacagcaggctcagcagctctactcgttattgggccagttcaattgtcttactcatcaactggagtgtacccaaaacaaagatctagccaatcaagtctctgtgtgcctggagagactgggcagtttgacccttaagcctgaagattcaactgtcctgctctttgaagctgacacaattactctgcgccagaccatcaccacatttgggtctctcaaaaccattcaaattcctgagcacttgatggctcatgctagttcagcaaatattgggcccttcctggagaagagaggctgtatctccatgccagagcagaagtcagcatccggtattgtagctgtccctttcagcgaatggctccttggaagcaaacctgccagtggttatcaagctccttacatacccagcaccgacccccaggactggcttacccaaaagcagaccttggagaacagtcagacttcttccagagcctgcaatttcttcaataatgtcgggggaaacctaaagggcttagaaaactggctcctcaagagtgaaaaatcaagttatcaaaagtgtaacagccattccactactagttctttctccattgaaatggaaaaggttggagatcaagagcttcctgatcaagatgagatggacctatcagattggctagtgactccccaggaatcccataagctgcggaagcctgagaatggcagtcgtgaaaccagtgagaagtttaagctcttattccagtcctataatgtgaatgattggcttgtcaagactgactcctgtaccaactgtcagggaaaccagcccaaaggtgtggagattgaaaacctgggcaatctgaagtgcctgaatgaccacttggaggccaagaaaccattgtccacccccagcatggttacagaggattggcttgtccagaaccatcaggacccatgtaaggtagaggaggtgtgcagagccaatgagccctgcacaagctttgcagagtgtgtgtgtgatgagaattgtgagaaggaggctctgtataagtggcttctgaagaaagaaggaaaggataaaaatgggatgcctgtggaacccaaacctgagcctgagaagcataaagattccctgaatatgtggctctgtcctagaaaagaagtaatagaacaaactaaagcaccaaaggcaatgactccttctagaattgctgattccttccaagtcataaagaacagccccttgtcggagtggcttatcaggcccccatacaaagaaggaagtcccaaggaagtgcctggtactgaagacagagctggcaaacagaagccaggaaagaagatgggcaacctcagccagttatcttctggagaagacaagtggctgcttcgaaagaaggcccaggaagtattacttaattcacctctacaggaggaacataacttccccccagaccattatggcctccctgcagtttgtgatctctttgcctgtatgcagcttaaagttgataaagagaagtggttatatcgaactcctctacagatgtgaaggaatggacaagagttgagcagcctttctgctgattatcacacatcatgagctgagtgactgcagcttgccaaatctttgtgtttctgggtctgaccaattagcttagttcttctcctgcctaattttgaactagtaaagcaaagtgagtcatcagattatgagttactgtttaaaagaaaaatgctgtttattcatgctgaggtgattcagttccctccttcttacagaagtattttaattcaccccacactagaaatgcagcatctttgtggacgtctttttcacaagcctccaaggctccttagattgggtcgttactaaaagtacattaaaacactcttgtttatcgaagtatattgatgtattctaaagctagtaaacttccctaacgtttaattgccctacagatgcttctcttgctgtgggttttcttttgttagtggtctgaaataattattttcctgttctattaatacatagtgtattttgcacaaaaaaattaacctggtcaatagtgattaccaaaatatatattaataatcttggcaatttttgacattaattatgaaacattttagcccacgttagttctacattattcttcacttaaactcagctactgcaaattttgtctttctgtaaatgttattaaaatatccagtgagctctttagaaggactcagtattatttcaagactatttttgaggtaattctagccttttaaaatattctacagacctacggggcttaaaagaaccccagtaccgactaagcaaataggcaaaagacatgttggaaatgtagtatagtacttgaaacagtcactatcatagggataattggtgcatcctgtgtaaatggaagctgagcttgacacctggtgcttttaagtagggataaagtcatcctctcactgcaagcacagcatacctgtacctccaaaagtgacgttttagtgaacaggccgttttcaacacttgtgccttggggtgttcattgaagctttgtgaaaactactgatgttttctcagtctccttaaagttacgtccatgctttaaaatgtctgtgtaggagagaagtggggtttataatgttttctctaagatatctttgctgctttccagactttgaaactattaagcttcttaactgcctcttaccggaaatacttctggggaaacttcatggtcccaaaatgtcattgccatacagcttcactagagttctttgaaccacagctgaaaagagctttgtattattttttaattccctccccagatatcatttaggagtattatataaaggtggtgggcaaaaacaatgtaaggagcctttccagttatcttgagttgcagctctgtagtttcttgaggccaaacacactgtattttacaagtcaaaatataatttacattaatcactatgttaatgagtatgtaaaacattcttttgcattgatgaattttgtatctgcttccattaaaagcataacagcca

SEQ ID NO: 325820 - DNA, 3485 bp, Homo sapiens
cccttccctgttatattggctgatacgggggcgtatctatacatctatcaatttgataggcaaatcggcgaccgaatcgcgagagcgaggtctcctcgatcgcctggagaggcactcggacctggagcagtgaggagaatgaataccttccaagaccagagtggcagctccagtaatagagaaccccttttgaggtgtagtgatgcacggagggacttggagcttgctattggtggagttctccgggctgaacagcaaattaaagataacttgcgagaggtcaaagctcagattcacagttgcataagccgtcacctggaatgtcttagaagccgtgaggtatggctgtatgaacaggtggaccttatttatcagcttaaagaggagacacttcaacagcaggctcagcagctctactcgttattgggccagttcaattgtcttactcatcaactggagtgtacccaaaacaaagatctagccaatcaagtctctgtgtgcctggagagactgggcagtttgacccttaagcctgaagattcaactgtcctgctctttgaagctgacacaattactctgcgccagaccatcaccacatttgggtctctcaaaaccattcaaattcctgagcacttgatggctcatgctagttcagcaaatattgggcccttcctggagaagagaggctgtatctccatgccagagcagaagtcagcatccggtattgtagctgtccctttcagcgaatggctccttggaagcaaacctgccagtggttatcaagctccttacatacccagcaccgacccccaggactggcttacccaaaagcagaccttggagaacagtcagacttcttccagagcctgcaatttcttcaataatgtcgggggaaacctaaagggcttagaaaactggctcctcaagagtgaaaaatcaagttatcaaaagtgtaacagccattccactactagttctttctccattgaaatggaaaaggttggagatcaagagcttcctgatcaagatgagatggacctatcagattggctagtgactccccaggaatcccataagctgcggaagcctgagaatggcagtcgtgaaaccagtgagaagtttaagctcttattccagtcctataatgtgaatgattggcttgtcaagactgactcctgtaccaactgtcagggaaaccagcccaaaggtgtggagattgaaaacctgggcaatctgaagtgcctgaatgaccacttggaggccaagaaaccattgtccacccccagcatggttacagaggattggcttgtccagaaccatcaggacccatgtaaggtagaggaggtgtgcagagccaatgagccctgcacaagctttgcagagtgtgtgtgtgatgagaattgtgagaaggaggctctgtataagtggcttctgaagaaagaaggaaaggataaaaatgggatgcctgtggaacccaaacctgagcctgagaagcataaagattccctgaatatgtggctctgtcctagaaaagaagtaatagaacaaactaaagcaccaaaggcaatgactccttctagaattgctgattccttccaagtcataaagaacagccccttgtcggagtggcttatcaggcccccatacaaagaaggaagtcccaaggaagtgcctggtactgaagacagagctggcaaacagaagtttaaaagccccatgaatacttcctggtgttcctttaacacagctgactgggtcctgccaggaaagaagatgggcaacctcagccagttatcttctggagaagacaagtggctgcttcgaaagaaggcccaggaagtattacttaattcacctctacaggaggaacataacttccccccagaccattatggcctccctgcagtttgtgatctctttgcctgtatgcagcttaaagttgataaagagaagtggttatatcgaactcctctacagatgtgaaggaatggacaagagttgagcagcctttctgctgattatcacacatcatgagctgagtgactgcagcttgccaaatctttgtgtttctgggtctgaccaattagcttagttcttctcctgcctaattttgaactagtaaagcaaagtgagtcatcagattatgagttactgtttaaaagaaaaatgctgtttattcatgctgaggtgattcagttccctccttcttacagaagtattttaattcaccccacactagaaatgcagcatctttgtggacgtctttttcacaagcctccaaggctccttagattgggtcgttactaaaagtacattaaaacactcttgtttatcgaagtatattgatgtattctaaagctagtaaacttccctaacgtttaattgccctacagatgcttctcttgctgtgggttttcttttgttagtggtctgaaataattattttcctgttctattaatacatagtgtattttgcacaaaaaaattaacctggtcaatagtgattaccaaaatatatattaataatcttggcaatttttgacattaattatgaaacattttagcccacgttagttctacattattcttcacttaaactcagctactgcaaattttgtctttctgtaaatgttattaaaatatccagtgagctctttagaaggactcagtattatttcaagactatttttgaggtaattctagccttttaaaatattctacagacctacggggcttaaaagaaccccagtaccgactaagcaaataggcaaaagacatgttggaaatgtagtatagtacttgaaacagtcactatcatagggataattggtgcatcctgtgtaaatggaagctgagcttgacacctggtgcttttaagtagggataaagtcatcctctcactgcaagcacagcatacctgtacctccaaaagtgacgttttagtgaacaggccgttttcaacacttgtgccttggggtgttcattgaagctttgtgaaaactactgatgttttctcagtctccttaaagttacgtccatgctttaaaatgtctgtgtaggagagaagtggggtttataatgttttctctaagatatctttgctgctttccagactttgaaactattaagcttcttaactgcctcttaccggaaatacttctggggaaacttcatggtcccaaaatgtcattgccatacagcttcactagagttctttgaaccacagctgaaaagagctttgtattattttttaattccctccccagatatcatttaggagtattatataaaggtggtgggcaaaaacaatgtaaggagcctttccagttatcttgagttgcagctctgtagtttcttgaggccaaacacactgtattttacaagtcaaaatataatttacattaatcactatgttaatgagtatgtaaaacattcttttgcattgatgaattttgtatctgcttccattaaaagcataacagcca

SEQ ID NO: 325821 - DNA, 3468 bp, Homo sapiens
atcgagcaatagtacgaggcggccggattaattcatcgagggtggtgtagtgcatgttctggtcgtcggcgacattctcaaatcgcctggagaggcactcggacctggagcagtgaggagaatgaataccttccaagaccagagtggcagctccagtaatagagaaccccttttgaggtgtagtgatgcacggagggacttggagcttgctattggtggagttctccgggctgaacagcaaattaaagataacttgcgagaggtcaaagctcagattcacagttgcataagccgtcacctggaatgtcttagaagccgtgaggtatggctgtatgaacaggtggaccttatttatcagcttaaagaggagacacttcaacagcaggctcagcagctctactcgttattgggccagttcaattgtcttactcatcaactggagtgtacccaaaacaaagatctagccaatcaagtctctgtgtgcctggagagactgggcagtttgacccttaagcctgaagattcaactgtcctgctctttgaagctgacacaattactctgcgccagaccatcaccacatttgggtctctcaaaaccattcaaattcctgagcacttgatggctcatgctagttcagcaaatattgggcccttcctggagaagagaggctgtatctccatgccagagcagaagtcagcatccggtattgtagctgtccctttcagcgaatggctccttggaagcaaacctgccagtggttatcaagctccttacatacccagcaccgacccccaggactggcttacccaaaagcagaccttggagaacagtcagacttcttccagagcctgcaatttcttcaataatgtcgggggaaacctaaagggcttagaaaactggctcctcaagagtgaaaaatcaagttatcaaaagtgtaacagccattccactactagttctttctccattgaaatggaaaaggttggagatcaagagcttcctgatcaagatgagatggacctatcagattggctagtgactccccaggaatcccataagctgcggaagcctgagaatggcagtcgtgaaaccagtgagaagtttaagctcttattccagtcctataatgtgaatgattggcttgtcaagactgactcctgtaccaactgtcagggaaaccagcccaaaggtgtggagattgaaaacctgggcaatctgaagtgcctgaatgaccacttggaggccaagaaaccattgtccacccccagcatggttacagaggattggcttgtccagaaccatcaggacccatgtaaggtagaggaggtgtgcagagccaatgagccctgcacaagctttgcagagtgtgtgtgtgatgagaattgtgagaaggaggctctgtataagtggcttctgaagaaagaaggaaaggataaaaatgggatgcctgtggaacccaaacctgagcctgagaagcataaagattccctgaatatgtggctctgtcctagaaaagaagtaatagaacaaactaaagcaccaaaggcaatgactccttctagaattgctgattccttccaagtcataaagaacagccccttgtcggagtggcttatcaggcccccatacaaagaaggaagtcccaaggaagtgcctggtactgaagacagagctggcaaacagaagtttaaaagccccatgaatacttcctggtgttcctttaacacagctgactgggtcctgccaggaaagaagatgggcaacctcagccagttatcttctggagaagacaagtggctgcttcgaaagaaggcccaggaagtattacttaattcacctctacaggaggaacataacttccccccagaccattatggcctccctgcagtttgtgatctctttgcctgtatgcagcttaaagttgataaagagaagtggttatatcgaactcctctacagatgtgaaggaatggacaagagttgagcagcctttctgctgattatcacacatcatgagctgagtgactgcagcttgccaaatctttgtgtttctgggtctgaccaattagcttagttcttctcctgcctaattttgaactagtaaagcaaagtgagtcatcagattatgagttactgtttaaaagaaaaatgctgtttattcatgctgaggtgattcagttccctccttcttacagaagtattttaattcaccccacactagaaatgcagcatctttgtggacgtctttttcacaagcctccaaggctccttagattgggtcgttactaaaagtacattaaaacactcttgtttatcgaagtatattgatgtattctaaagctagtaaacttccctaacgtttaattgccctacagatgcttctcttgctgtgggttttcttttgttagtggtctgaaataattattttcctgttctattaatacatagtgtattttgcacaaaaaaattaacctggtcaatagtgattaccaaaatatatattaataatcttggcaatttttgacattaattatgaaacattttagcccacgttagttctacattattcttcacttaaactcagctactgcaaattttgtctttctgtaaatgttattaaaatatccagtgagctctttagaaggactcagtattatttcaagactatttttgaggtaattctagccttttaaaatattctacagacctacggggcttaaaagaaccccagtaccgactaagcaaataggcaaaagacatgttggaaatgtagtatagtacttgaaacagtcactatcatagggataattggtgcatcctgtgtaaatggaagctgagcttgacacctggtgcttttaagtagggataaagtcatcctctcactgcaagcacagcatacctgtacctccaaaagtgacgttttagtgaacaggccgttttcaacacttgtgccttggggtgttcattgaagctttgtgaaaactactgatgttttctcagtctccttaaagttacgtccatgctttaaaatgtctgtgtaggagagaagtggggtttataatgttttctctaagatatctttgctgctttccagactttgaaactattaagcttcttaactgcctcttaccggaaatacttctggggaaacttcatggtcccaaaatgtcattgccatacagcttcactagagttctttgaaccacagctgaaaagagctttgtattattttttaattccctccccagatatcatttaggagtattatataaaggtggtgggcaaaaacaatgtaaggagcctttccagttatcttgagttgcagctctgtagtttcttgaggccaaacacactgtattttacaagtcaaaatataatttacattaatcactatgttaatgagtatgtaaaacattcttttgcattgatgaattttgtatctgcttccattaaaagcataacagcca

SEQ ID NO: 325822 - DNA, 3416 bp, Homo sapiens
agggcagtcaagggcttctggctgacccgagcggagatctcgcgagactgtcagacgtatggcgagaggtgtgggaggaagattgtgttgtcgcgagaactctgcctttgggccgtaggttagtgtggggccgtgtctcagtccacccaaggtctcctcggatcgcctggagaggcactcggacctggagcagtgaggagaatgaataccttccaagaccagagtggcagctccagtaatagagaaccccttttgaggtgtagtgatgcacggagggacttggagcttgctattggtggagttctccgggctgaacagcaaattaaagataacttgcgagaggtcaaagctcagattcacagttgcataagccgtcacctggaatgtcttagaagccgtgaggtatggctgtatgaacaggtggaccttatttatcagcttaaagaggagacacttcaacagcaggctcagcagctctactcgttattgggccagttcaattgtcttactcatcaactggagtgtacccaaaacaaagatctagccaatcaagtctctgtgtgcctggagagactgggcagtttgacccttaagcctgaagattcaactgtcctgctctttgaagctgacacaattactctgcgccagaccatcaccacatttgggtctctcaaaaccattcaaattcctgagcacttgatggctcatgctagttcagcaaatattgggcccttcctggagaagagaggctgtatctccatgccagagcagaagtcagcatccggtattgtagctgtccctttcagcgaatggctccttggaagcaaacctgccagtggttatcaagctccttacatacccagcaccgacccccaggactggcttacccaaaagcagaccttggagaacagtcagacttcttccagagcctgcaatttcttcaataatgtcgggggaaacctaaagggcttagaaaactggctcctcaagagtgaaaaatcaagttatcaaaagtgtaacagccattccactactagttctttctccattgaaatggaaaaggttggagatcaagagcttcctgatcaagatgagatggacctatcagattggctagtgactccccaggaatcccataagctgcggaagcctgagaatggcagtcgtgaaaccagtgagaagtttaagctcttattccagtcctataatgtgaatgattggcttgtcaagactgactcctgtaccaactgtcagggaaaccagcccaaaggtgtggagattgaaaacctgggcaatctgaagtgcctgaatgaccacttggaggccaagaaaccattgtccacccccagcatggttacagaggattggcttgtccagaaccatcaggacccatgtaaggtagaggaggtgtgcagagccaatgagccctgcacaagctttgcagagtgtgtgtgtgatgagaattgtgagaaggaggctctgtataagtggcttctgaagaaagaaggaaaggataaaaatgggatgcctgtggaacccaaacctgagcctgagaagcataaagattccctgaatatgtggctctgtcctagaaaagaagtaatagaacaaactaaagcaccaaaggcaatgactccttctagaattgctgattccttccaagtcataaagaacagccccttgtcggagtggcttatcaggcccccatacaaagaaggaagtcccaaggaagtgcctggtactgaagacagagctggcaaacagaaggaagtattacttaattcacctctacaggaggaacataacttccccccagaccattatggcctccctgcagtttgtgatctctttgcctgtatgcagcttaaagttgataaagagaagtggttatatcgaactcctctacagatgtgaaggaatggacaagagttgagcagcctttctgctgattatcacacatcatgagctgagtgactgcagcttgccaaatctttgtgtttctgggtctgaccaattagcttagttcttctcctgcctaattttgaactagtaaagcaaagtgagtcatcagattatgagttactgtttaaaagaaaaatgctgtttattcatgctgaggtgattcagttccctccttcttacagaagtattttaattcaccccacactagaaatgcagcatctttgtggacgtctttttcacaagcctccaaggctccttagattgggtcgttactaaaagtacattaaaacactcttgtttatcgaagtatattgatgtattctaaagctagtaaacttccctaacgtttaattgccctacagatgcttctcttgctgtgggttttcttttgttagtggtctgaaataattattttcctgttctattaatacatagtgtattttgcacaaaaaaattaacctggtcaatagtgattaccaaaatatatattaataatcttggcaatttttgacattaattatgaaacattttagcccacgttagttctacattattcttcacttaaactcagctactgcaaattttgtctttctgtaaatgttattaaaatatccagtgagctctttagaaggactcagtattatttcaagactatttttgaggtaattctagccttttaaaatattctacagacctacggggcttaaaagaaccccagtaccgactaagcaaataggcaaaagacatgttggaaatgtagtatagtacttgaaacagtcactatcatagggataattggtgcatcctgtgtaaatggaagctgagcttgacacctggtgcttttaagtagggataaagtcatcctctcactgcaagcacagcatacctgtacctccaaaagtgacgttttagtgaacaggccgttttcaacacttgtgccttggggtgttcattgaagctttgtgaaaactactgatgttttctcagtctccttaaagttacgtccatgctttaaaatgtctgtgtaggagagaagtggggtttataatgttttctctaagatatctttgctgctttccagactttgaaactattaagcttcttaactgcctcttaccggaaatacttctggggaaacttcatggtcccaaaatgtcattgccatacagcttcactagagttctttgaaccacagctgaaaagagctttgtattattttttaattccctccccagatatcatttaggagtattatataaaggtggtgggcaaaaacaatgtaaggagcctttccagttatcttgagttgcagctctgtagtttcttgaggccaaacacactgtattttacaagtcaaaatataatttacattaatcactatgttaatgagtatgtaaaacattcttttgcattgatgaattttgtatctgcttccattaaaagcataacagcca

SEQ ID NO: 325823 - DNA, 3818 bp, Homo sapiens
agggcagtcaagggcttctggctgacccgagcggagatctcgcgagactgtcagacgtatggcgagaggtgtgggaggaagattgtgttgtcgcgagaactctgcctttgggccgtaggttagtgtggggccgtgtctcagtccacccaaggtctcctcggatcgcctggagaggcactcggacctggagcagtgaggagaatgaataccttccaagaccagagtggcagctccagtaatagagaaccccttttgaggtgtagtgatgcacggagggacttggagcttgctattggtggagttctccgggctgaacagcaaattaaagataacttgcgagaggtcaaagctcagattcacagttgcataagccgtcacctggaatgtcttagaagccgtgaggtatggctgtatgaacaggtggaccttatttatcagcttaaagaggagacacttcaacagcaggctcagcagctctactcgttattgggccagttcaattgtcttactcatcaactggagtgtacccaaaacaaagatctagccaatcaagtctctgtgtgcctggagagactgggcagtttgacccttaagcctgaagattcaactgtcctgctctttgaagctgacacaattactctgcgccagaccatcaccacatttgggtctctcaaaaccattcaaattcctgagcacttgatggctcatgctagttcagcaaatattgggcccttcctggagaagagaggctgtatctccatgccagagcagaagtcagcatccggtattgtagctgtccctttcagcgaatggctccttggaagcaaacctgccagtggttatcaagctccttacatacccagcaccgacccccaggactggcttacccaaaagcagaccttggagaacagtcagacttcttccagagcctgcaatttcttcaataatgtcgggggaaacctaaagggcttagaaaactggctcctcaagagtgaaaaatcaagttatcaaaagtgtaacagccattccactactagttctttctccattgaaatggaaaaggttggagatcaagagcttcctgatcaagatgagatggacctatcagattggctagtgactccccaggaatcccataagctgcggaagcctgagaatggcagtcgtgaaaccagtgagaagtttaagctcttattccagtcctataatgtgaatgattggcttgtcaagactgactcctgtaccaactgtcagggaaaccagcccaaaggtgtggagattgaaaacctgggcaatctgaagtgcctgaatgaccacttggaggccaagaaaccattgtccacccccagcatggttacagaggattggcttgtccagaaccatcaggacccatgtaaggtagaggaggtgtgcagagccaatgagccctgcacaagctttgcagagtgtgtgtgtgatgagaattgtgagaaggaggctctgtataagtggcttctgaagaaagaaggaaaggataaaaatgggatgcctgtggaacccaaacctgagcctgagaagcataaagattccctgaatatgtggctctgtcctagaaaagaagtaatagaacaaactaaagcaccaaaggcaatgactccttctagaattgctgattccttccaagtcataaagaacagccccttgtcggagtggcttatcaggcccccatacaaagaaggaagtcccaaggaagtgcctggtactgaagacagagctggcaaacagaagtttaaaagccccatgaatacttcctggtgttcctttaacacagctgactgggtcctgccaggaaagaagatgggcaacctcagccagttatcttctggagaagacaagtggctgcttcgaaagaaggcccaggaagtattacttaattcacctctacaggaggaacataacttccccccagaccattatggcctccctgcagtttgtgatctctttgcctgtatgcagcttaaagttgataaagagaagtggttatatcgaactcctctacagatgtgaaggaatggacaagagttgagcagcctttctgctgattatcacacatcatgagctgagtgactgcagcttgccaaatctttgtgtttctgggtctgaccaattagcttagttcttctcctgcctaattttgaactagtaaagcaaagtgagtcatcagattatgagttactgtttaaaagaaaaatgctgtttattcatgctgaggtgattcagttccctccttcttacagaagtattttaattcaccccacactagaaatgcagcatctttgtggacgtctttttcacaagcctccaaggctccttagattgggtcgttactaaaagtacattaaaacactcttgtttatcgaagtatattgatgtattctaaagctagtaaacttccctaacgtttaattgccctacagatgcttctcttgctgtgggttttcttttgttagtggtctgaaataattattttcctgttctattaatacatagtgtattttgcacaaaaaaattaacctggtcaatagtgattaccaaaatatatattaataatcttggcaatttttgacattaattatgaaacattttagcccacgttagttctacattattcttcacttaaactcagctactgcaaattttgtctttctgtaaatgttattaaaatatccagtgagctctttagaaggactcagtattatttcaagactatttttgaggtaattctagccttttaaaatattctacagacctacggggcttaaaagaaccccagtaccgactaagcaaataggcaaaagacatgttggaaatgtagtatagtacttgaaacagtcactatcatagggataattggtgcatcctgtgtaaatggaagctgagcttgacacctggtgcttttaagtagggataaagtcatcctctcactgcaagcacagcatacctgtacctccaaaagtgacgttttagtgaacaggccgttttcaacacttgtgccttggggtgttcattgaagctttgtgaaaactactgatgttttctcagtctccttaaagttacgtccatgctttaaaatgtctgtgtaggagagaagtggggtttataatgttttctctaagatatctttgctgctttccagactttgaaactattaagcttcttaactgcctcttaccggaaatacttctggggaaacttcatggtcccaaaatgtcattgccatacagcttcactagagttctttgaaccacagctgaaaagagctttgtattattttttaattccctccccagatatcatttaggagtattatataaaggtggtgggcaaaaacaatgtaaggagcctttccagttatcttgagttgcagctctgtagtttcttgaggccaaacacactgtattttacaagtcaaaatataatttacattaatcactatgttaatgagtatgtaaaacattcttttgcattgatgaattttgtatctgcttccattaaaagcataacagccaaaaaaacaagcgggggggacaaaatcctcgaggggccgttagcctaccgttcttgtcccaggggccctaagagagcgacaaaaacaaaagagagcccgtaaacactcatcgtgcaactcctgggatctggaacacccacctgcccgtgcaatggcacacccacatagccgcacaaaacgtcttgtgaacgcatgccatgtgtacatccacacatcctcacctgcctccccgtcatcgtatctcgtcaccgtgttcatatccgattaccac

SEQ ID NO: 325824 - DNA, 3495 bp, Homo sapiens
agggcagtcaagggcttctggctgacccgagcggagatctcgcgagactgtcagacgtatggcgagaggtgtgggaggaagattgtgttgtcgcgagaactctgcctttgggccgtaggttagtgtggggccgtgtctcagtccacccaaggtctcctcggatcgcctggagaggcactcggacctggagcagtgaggagaatgaataccttccaagaccagagtggcagctccagtaatagagaaccccttttgaggtgtagtgatgcacggagggacttggagcttgctattggtggagttctccgggctgaacagcaaattaaagataacttgcgagaggtcaaagctcagattcacagttgcataagccgtcacctggaatgtcttagaagccgtgaggtatggctgtatgaacaggtggaccttatttatcagcttaaagaggagacacttcaacagcaggctcagcagctctactcgttattgggccagttcaattgtcttactcatcaactggagtgtacccaaaacaaagatctagccaatcaagtctctgtgtgcctggagagactgggcagtttgacccttaagcctgaagattcaactgtcctgctctttgaagctgacacaattactctgcgccagaccatcaccacatttgggtctctcaaaaccattcaaattcctgagcacttgatggctcatgctagttcagcaaatattgggcccttcctggagaagagaggctgtatctccatgccagagcagaagtcagcatccggtattgtagctgtccctttcagcgaatggctccttggaagcaaacctgccagtggttatcaagctccttacatacccagcaccgacccccaggactggcttacccaaaagcagaccttggagaacagtcagacttcttccagagcctgcaatttcttcaataatgtcgggggaaacctaaagggcttagaaaactggctcctcaagagtgaaaaatcaagttatcaaaagtgtaacagccattccactactagttctttctccattgaaatggaaaaggttggagatcaagagcttcctgatcaagatgagatggacctatcagattggctagtgactccccaggaatcccataagctgcggaagcctgagaatggcagtcgtgaaaccagtgagaagtttaagctcttattccagtcctataatgtgaatgattggcttgtcaagactgactcctgtaccaactgtcagggaaaccagcccaaaggtgtggagattgaaaacctgggcaatctgaagtgcctgaatgaccacttggaggccaagaaaccattgtccacccccagcatggttacagaggattggcttgtccagaaccatcaggacccatgtaaggtagaggaggtgtgcagagccaatgagccctgcacaagctttgcagagtgtgtgtgtgatgagaattgtgagaaggaggctctgtataagtggcttctgaagaaagaaggaaaggataaaaatgggatgcctgtggaacccaaacctgagcctgagaagcataaagattccctgaatatgtggctctgtcctagaaaagaagtaatagaacaaactaaagcaccaaaggcaatgactccttctagaattgctgattccttccaagtcataaagaacagccccttgtcggagtggcttatcaggcccccatacaaagaaggaagtcccaaggaagtgcctggtactgaagacagagctggcaaacagaagtttaaaagccccatgaatacttcctggtgttcctttaacacagctgactgggtcctgccaggaaagaagatgggcaacctcagccagttatcttctggagaagacaagtggctgcttcgaaagaaggcccaggaagtattacttaattcacctctacaggaggaacataacttccccccagaccattatggcctccctgcagtttgtgatctctttgcctgtatgcagcttaaagttgataaagagaagtggttatatcgaactcctctacagatgtgaaggaatggacaagagttgagcagcctttctgctgattatcacacatcatgagctgagtgactgcagcttgccaaatctttgtgtttctgggtctgaccaattagcttagttcttctcctgcctaattttgaactagtaaagcaaagtgagtcatcagattatgagttactgtttaaaagaaaaatgctgtttattcatgctgaggtgattcagttccctccttcttacagaagtattttaattcaccccacactagaaatgcagcatctttgtggacgtctttttcacaagcctccaaggctccttagattgggtcgttactaaaagtacattaaaacactcttgtttatcgaagtatattgatgtattctaaagctagtaaacttccctaacgtttaattgccctacagatgcttctcttgctgtgggttttcttttgttagtggtctgaaataattattttcctgttctattaatacatagtgtattttgcacaaaaaaattaacctggtcaatagtgattaccaaaatatatattaataatcttggcaatttttgacattaattatgaaacattttagcccacgttagttctacattattcttcacttaaactcagctactgcaaattttgtctttctgtaaatgttattaaaatatccagtgagctctttagaaggactcagtattatttcaagactatttttgaggtaattctagccttttaaaatattctacagacctacggggcttaaaagaaccccagtaccgactaagcaaatagggataattggtgcatcctgtgtaaatggaagctgagcttgacacctggtgcttttaagtagggataaagtcatcctctcactgcaagcacagcatacctgtacctccaaaagtgacgttttagtgaacaggccgttttcaacacttgtgccttggggtgttcattgaagctttgtgaaaactactgatgttttctcagtctccttaaagttacgtccatgctttaaaatgtctgtgtaggagagaagtggggtttataatgttttctctaagatatctttgctgctttccagactttgaaactattaagcttcttaactgcctcttaccggaaatacttctggggaaacttcatggtcccaaaatgtcattgccatacagcttcactagagttctttgaaccacagctgaaaagagctttgtattattttttaattccctccccagatatcatttaggagtattatataaaggtggtgggcaaaaacaatgtaaggagcctttccagttatcttgagttgcagctctgtagtttcttgaggccaaacacactgtattttacaagtcaaaatataatttacattaatcactatgttaatgagtatgtaaaacattcttttgcattgatgaattttgtatctgcttccattaaaagcataacagcca

SEQ ID NO: 325825 - DNA, 3319 bp, Homo sapiens
agggcagtcaagggcttctggctgacccgagcggagatctcgcgagactgtcagacgtatggcgagaggtgtgggaggaagattgtgttgtcgcgagaactctgcctttgggccgtaggttagtgtggggccgtgtctcagtccacccaaggtctcctcggatcgcctggagaggcactcggacctggagcagtgaggagaatgaataccttccaagaccagagtggcagctccagtaatagagaaccccttttgaggtgtagtgatgcacggagggacttggagcttgctattggtggagttctccgggctgaacagcaaattaaagataacttgcgagaggtcaaagctcagattcacagttgcataagccgtcacctggaatgttctttgaagctgacacaattactctgcgccagaccatcaccacatttgggtctctcaaaaccattcaaattcctgagcacttgatggctcatgctagttcagcaaatattgggcccttcctggagaagagaggctgtatctccatgccagagcagaagtcagcatccggtattgtagctgtccctttcagcgaatggctccttggaagcaaacctgccagtggttatcaagctccttacatacccagcaccgacccccaggactggcttacccaaaagcagaccttggagaacagtcagacttcttccagagcctgcaatttcttcaataatgtcgggggaaacctaaagggcttagaaaactggctcctcaagagtgaaaaatcaagttatcaaaagtgtaacagccattccactactagttctttctccattgaaatggaaaaggttggagatcaagagcttcctgatcaagatgagatggacctatcagattggctagtgactccccaggaatcccataagctgcggaagcctgagaatggcagtcgtgaaaccagtgagaagtttaagctcttattccagtcctataatgtgaatgattggcttgtcaagactgactcctgtaccaactgtcagggaaaccagcccaaaggtgtggagattgaaaacctgggcaatctgaagtgcctgaatgaccacttggaggccaagaaaccattgtccacccccagcatggttacagaggattggcttgtccagaaccatcaggacccatgtaaggtagaggaggtgtgcagagccaatgagccctgcacaagctttgcagagtgtgtgtgtgatgagaattgtgagaaggaggctctgtataagtggcttctgaagaaagaaggaaaggataaaaatgggatgcctgtggaacccaaacctgagcctgagaagcataaagattccctgaatatgtggctctgtcctagaaaagaagtaatagaacaaactaaagcaccaaaggcaatgactccttctagaattgctgattccttccaagtcataaagaacagccccttgtcggagtggcttatcaggcccccatacaaagaaggaagtcccaaggaagtgcctggtactgaagacagagctggcaaacagaagtttaaaagccccatgaatacttcctggtgttcctttaacacagctgactgggtcctgccaggaaagaagatgggcaacctcagccagttatcttctggagaagacaagtggctgcttcgaaagaaggcccaggaagtattacttaattcacctctacaggaggaacataacttccccccagaccattatggcctccctgcagtttgtgatctctttgcctgtatgcagcttaaagttgataaagagaagtggttatatcgaactcctctacagatgtgaaggaatggacaagagttgagcagcctttctgctgattatcacacatcatgagctgagtgactgcagcttgccaaatctttgtgtttctgggtctgaccaattagcttagttcttctcctgcctaattttgaactagtaaagcaaagtgagtcatcagattatgagttactgtttaaaagaaaaatgctgtttattcatgctgaggtgattcagttccctccttcttacagaagtattttaattcaccccacactagaaatgcagcatctttgtggacgtctttttcacaagcctccaaggctccttagattgggtcgttactaaaagtacattaaaacactcttgtttatcgaagtatattgatgtattctaaagctagtaaacttccctaacgtttaattgccctacagatgcttctcttgctgtgggttttcttttgttagtggtctgaaataattattttcctgttctattaatacatagtgtattttgcacaaaaaaattaacctggtcaatagtgattaccaaaatatatattaataatcttggcaatttttgacattaattatgaaacattttagcccacgttagttctacattattcttcacttaaactcagctactgcaaattttgtctttctgtaaatgttattaaaatatccagtgagctctttagaaggactcagtattatttcaagactatttttgaggtaattctagccttttaaaatattctacagacctacggggcttaaaagaaccccagtaccgactaagcaaataggcaaaagacatgttggaaatgtagtatagtacttgaaacagtcactatcatagggataattggtgcatcctgtgtaaatggaagctgagcttgacacctggtgcttttaagtagggataaagtcatcctctcactgcaagcacagcatacctgtacctccaaaagtgacgttttagtgaacaggccgttttcaacacttgtgccttggggtgttcattgaagctttgtgaaaactactgatgttttctcagtctccttaaagttacgtccatgctttaaaatgtctgtgtaggagagaagtggggtttataatgttttctctaagatatctttgctgctttccagactttgaaactattaagcttcttaactgcctcttaccggaaatacttctggggaaacttcatggtcccaaaatgtcattgccatacagcttcactagagttctttgaaccacagctgaaaagagctttgtattattttttaattccctccccagatatcatttaggagtattatataaaggtggtgggcaaaaacaatgtaaggagcctttccagttatcttgagttgcagctctgtagtttcttgaggccaaacacactgtattttacaagtcaaaatataatttacattaatcactatgttaatgagtatgtaaaacattcttttgcattgatgaattttgtatctgcttccattaaaagcataacagcca

SEQ ID NO: 325826 - DNA, 3093 bp, Homo sapiens
ctgcactccagcctgggcggcagagctagactccgtctcaaaacaaaaaaaaaacccaaaaccaacctttaaaaaaaagacggaagaaagaacgtgtgaagtgaaaaaagtctcaagactgggcagtttgacccttaagcctgaagattcaactgtcctgctctttgaagctgacacaattactctgcgccagaccatcaccacatttgggtctctcaaaaccattcaaattcctgagcacttgatggctcatgctagttcagcaaatattgggcccttcctggagaagagaggctgtatctccatgccagagcagaagtcagcatccggtattgtagctgtccctttcagcgaatggctccttggaagcaaacctgccagtggttatcaagctccttacatacccagcaccgacccccaggactggcttacccaaaagcagaccttggagaacagtcagacttcttccagagcctgcaatttcttcaataatgtcgggggaaacctaaagggcttagaaaactggctcctcaagagtgaaaaatcaagttatcaaaagtgtaacagccattccactactagttctttctccattgaaatggaaaaggttggagatcaagagcttcctgatcaagatgagatggacctatcagattggctagtgactccccaggaatcccataagctgcggaagcctgagaatggcagtcgtgaaaccagtgagaagtttaagctcttattccagtcctataatgtgaatgattggcttgtcaagactgactcctgtaccaactgtcagggaaaccagcccaaaggtgtggagattgaaaacctgggcaatctgaagtgcctgaatgaccacttggaggccaagaaaccattgtccacccccagcatggttacagaggattggcttgtccagaaccatcaggacccatgtaaggtagaggaggtgtgcagagccaatgagccctgcacaagctttgcagagtgtgtgtgtgatgagaattgtgagaaggaggctctgtataagtggcttctgaagaaagaaggaaaggataaaaatgggatgcctgtggaacccaaacctgagcctgagaagcataaagattccctgaatatgtggctctgtcctagaaaagaagtaatagaacaaactaaagcaccaaaggcaatgactccttctagaattgctgattccttccaagtcataaagaacagccccttgtcggagtggcttatcaggcccccatacaaagaaggaagtcccaaggaagtgcctggtactgaagacagagctggcaaacagaagtttaaaagccccatgaatacttcctggtgttcctttaacacagctgactgggtcctgccaggaaagaagatgggcaacctcagccagttatcttctggagaagacaagtggctgcttcgaaagaaggcccaggaagtattacttaattcacctctacaggaggaacataacttccccccagaccattatggcctccctgcagtttgtgatctctttgcctgtatgcagcttaaagttgataaagagaagtggttatatcgaactcctctacagatgtgaaggaatggacaagagttgagcagcctttctgctgattatcacacatcatgagctgagtgactgcagcttgccaaatctttgtgtttctgggtctgaccaattagcttagttcttctcctgcctaattttgaactagtaaagcaaagtgagtcatcagattatgagttactgtttaaaagaaaaatgctgtttattcatgctgaggtgattcagttccctccttcttacagaagtattttaattcaccccacactagaaatgcagcatctttgtggacgtctttttcacaagcctccaaggctccttagattgggtcgttactaaaagtacattaaaacactcttgtttatcgaagtatattgatgtattctaaagctagtaaacttccctaacgtttaattgccctacagatgcttctcttgctgtgggttttcttttgttagtggtctgaaataattattttcctgttctattaatacatagtgtattttgcacaaaaaaattaacctggtcaatagtgattaccaaaatatatattaataatcttggcaatttttgacattaattatgaaacattttagcccacgttagttctacattattcttcacttaaactcagctactgcaaattttgtctttctgtaaatgttattaaaatatccagtgagctctttagaaggactcagtattatttcaagactatttttgaggtaattctagccttttaaaatattctacagacctacggggcttaaaagaaccccagtaccgactaagcaaataggcaaaagacatgttggaaatgtagtatagtacttgaaacagtcactatcatagggataattggtgcatcctgtgtaaatggaagctgagcttgacacctggtgcttttaagtagggataaagtcatcctctcactgcaagcacagcatacctgtacctccaaaagtgacgttttagtgaacaggccgttttcaacacttgtgccttggggtgttcattgaagctttgtgaaaactactgatgttttctcagtctccttaaagttacgtccatgctttaaaatgtctgtgtaggagagaagtggggtttataatgttttctctaagatatctttgctgctttccagactttgaaactattaagcttcttaactgcctcttaccggaaatacttctggggaaacttcatggtcccaaaatgtcattgccatacagcttcactagagttctttgaaccacagctgaaaagagctttgtattattttttaattccctccccagatatcatttaggagtattatataaaggtggtgggcaaaaacaatgtaaggagcctttccagttatcttgagttgcagctctgtagtttcttgaggccaaacacactgtattttacaagtcaaaatataatttacattaatcactatgttaatgagtatgtaaaacattcttttgcattgatgaattttgtatctgcttccattaaaagcataacagcca

SEQ ID NO: 325827 - DNA, 3931 bp, Homo sapiens
agggcagtcaagggcttctggctgacccgagcggagatctcgcgagactgtcagacgtatggcgagaggtgtgggaggaagattgtgttgtcgcgagaactctgcctttgggccgtaggttagtgtggggccgtgtctcagtccacccaaggtctcctcggatcgcctggagaggcactcggacctggagcagtgaggagaatgaataccttccaagaccagagtggcagctccagtaatagagaaccccttttgaggtgtagtgatgcacggagggacttggagcttgctattggtggagttctccgggctgaacagcaaattaaagataacttgcgagaggtcaaagctcagattcacagttgcataagccgtcacctggaatgtcttagaagccgtgaggtatggctgtatgaacaggtggaccttatttatcagcttaaagaggagacacttcaacagcaggctcagcagctctactcgttattgggccagttcaattgtcttactcatcaactggagtgtacccaaaacaaagatctagccaatcaagtctctgtgtgcctggagagactgggcagtttgacccttaagcctgaagattcaactgtcctgctctttgaagctgacacaattactctgcgccagaccatcaccacatttgggtctctcaaaaccattcaaattcctgagcacttgatggctcatgctagttcagcaaatattgggcccttcctggagaagagaggctgtatctccatgccagagcagaagtcagcatccggtattgtagctgtccctttcagcgaatggctccttggaagcaaacctgccagtggttatcaagctccttacatacccagcaccgacccccaggactggcttacccaaaagcagaccttggagaacagtcagacttcttccagagcctgcaatttcttcaataatgtcgggggaaacctaaagggcttagaaaactggctcctcaagagtgaaaaatcaagttatcaaaagtgtaacagccattccactactagttctttctccattgaaatggaaaaggttggagatcaagagcttcctgatcaagatgagatggacctatcagattggctagtgactccccaggaatcccataagctgcggaagcctgagaatggcagtcgtgaaaccagtgagaagtttaagctcttattccagtcctataatgtgaatgattggcttgtcaagactgactcctgtaccaactgtcagggaaaccagcccaaaggtgtggagattgaaaacctgggcaatctgaagtgcctgaatgaccacttggaggccaagaaaccattgtccacccccagcatggttacagaggattggcttgtccagaaccatcaggacccatgtaaggtagaggaggtgtgcagagccaatgagccctgcacaagctttgcagagtgtgtgtgtgatgagaattgtgagaaggaggctctgtataagtggcttctgaagaaagaaggaaaggataaaaatgggatgcctgtggaacccaaacctgagcctgagaagcataaagattccctgaatatgtggctctgtcctagaaaagaagtaatagaacaaactaaagcaccaaaggcaatgactccttctagaattgctgattccttccaagtcataaagaacagccccttgtcggagtggcttatcaggcccccatacaaagaaggaagtcccaaggaagtgcctggtactgaagacagagctggcaaacagaagtttaaaagccccatgaatacttcctggtgttcctttaacacagctgactgggtcctgccaggaaagaagatgggcaacctcagccagttatcttctggagaagacaagtggctgcttcgaaagaaggcccaggaagtattacttaattcacctctacaggaggaacataacttccccccagaccattatggcctccctgcagtttgtgatctctttgcctgtatgcagcttaaagttgataaagagaagtggttatatcgaactcctctacagatgtgaaggaatggacaagagttgagcagcctttctgctgattatcacacatcatgagctgagtgactgcagcttgccaaatctttgtgtttctgggtctgaccaattagcttagttcttctcctgcctaattttgaactagtaaagcaaagtgagtcatcagattatgagttactgtttaaaagaaaaatgctgtttattcatgctgaggtgattcagttccctccttcttacagaagtattttaattcaccccacactagaaatgcagcatctttgtggacgtctttttcacaagcctccaaggctccttagattgggtcgttactaaaagtacattaaaacactcttgtttatcgaagtatattgatgtattctaaagctagtaaacttccctaacgtttaattgccctacagatgcttctcttgctgtgggttttcttttgttagtggtctgaaataattattttcctgttctattaatacatagtgtattttgcacaaaaaaattaacctggtcaatagtgattaccaaaatatatattaataatcttggcaatttttgacattaattatgaaacattttagcccacgttagttctacattattcttcacttaaactcagctactgcaaattttgtctttctgtaaatgttattaaaatatccagtgagctctttagaaggactcagtattatttcaagactatttttgaggtaattctagccttttaaaatattctacagacctacggggcttaaaagaaccccagtaccgactaagcaaataggcaaaagacatgttggaaatgtagtatagtacttgaaacagtcactatcatagggataattggtgcatcctgtgtaaatggaagctgagcttgacacctggtgcttttaagtagggataaagtcatcctctcactgcaagcacagcatacctgtacctccaaaagtgacgttttagtgaacaggccgttttcaacacttgtgccttggggtgttcattgaagctttgtgaaaactactgatgttttctcagtctccttaaagttacgtccatgctttaaaatgtctgtgtaggagagaagtggggtttataatgttttctctaagatatctttgctgctttccagactttgaaactattaagcttcttaactgcctcttaccggaaatacttctggggaaacttcatggtcccaaaatgtcattgccatacagcttcactagagttctttgaaccacagctgaaaagagctttgtattattttttaattccctccccagatatcatttaggagtattatataaaggtggtgggcaaaaacaatgtaaggagcctttccagttatcttgagttgcagctctgtagtttcttgaggccaaacacactgtattttacaagtcaaaatataatttacattaatcactatgttaatgagtatgtaaaacattcttttgcattgatgaattttgtatctgcttccattaaaagcataacagccatagttgttgcgtgttatttttaaaactatttgtcacaaagtgtggtgtggtaccacataacgtggtaacttttggttagtaatccagctgagaaacagcttgaacataaaaataacatcagtgtattttatgaaaaattagcaaacaataggtatattaacctccattttcagtcttttataaaaactattcacatctattaaaaaaaaacctatgggacttcagccaagattcagtgcctttctactggattcctcttactagatgcatccgaagaggccctagtttactttctccaatcatatagccaccaggtatttaatacagtaatatttatgtgtataacctgtagtgcaattatacatgattaacttcatatggtg

SEQ ID NO: 325828 - DNA, 3363 bp, Homo sapiens
agggcagtcaagggcttctggctgacccgagcggagatctcgcgagactgtcagacgtatggcgagaggtgtgggaggaagattgtgttgtcgcgagaactctgcctttgggccgtaggttagtgtggggccgtgtctcagtccacccaaggtctcctcggatcgcctggagaggcactcggacctggagcagtgaggagaatgaataccttccaagaccagagtggcagctccagtaatagagaaccccttttgaggtgtagtgatgcacggagggacttggagcttgctattggtggagttctccgggctgaacagcaaattaaagataacttgcgagaggtcaaagctcagattcacagttgcataagccgtcacctggaatgtcttagaagccgtgaggtatggctgtatgaacaggtggaccttatttatcagcttaaagaggagacacttcaacagcaggctcagcagctctactcgttattgggccagttcaattgtcttactcatcaactggagtgtacccaaaacaaagatctagccaatcaagtctctgtgtgcctggagagactgggcagtttgacccttaagcctgaagattcaactgtcctgctctttgaagctgacacaattactctgcgccagaccatcaccacatttgggtctctcaaaaccattcaaattcctgagcacttgatggctcatgctagttcagcaaatattgggcccttcctggagaagagaggctgtatctccatgccagagcagaagtcagcatccggtattgtagctgtccctttcagcgaatggctccttggaagcaaacctgccagtggttatcaagctccttacatacccagcaccgacccccaggactggcttacccaaaagcagaccttggagaacagtcagacttcttccagagcctgcaatttcttcaataatgtcgggggaaacctaaagggcttagaaaactggctcctcaagagtgaaaaatcaagttatcaaaagtgtaacagccattccactactagttctttctccattgaaatggaaaaggttggagatcaagagcttcctgatcaagatgagatggacctatcagattggctagtgactccccaggaatcccataagctgcggaagcctgagaatggcagtcgtgaaaccagtgagaagtttaagctcttattccagtcctataatgtgaatgattggcttgtcaagactgactcctgtaccaactgtcagggaaaccagcccaaaggtgtggagattgaaaacctgggcaatctgaagtgcctgaatgaccacttggaggccaagaaaccattgtccacccccagcatggttacagaggattggcttgtccagaaccatcaggacccatgtaaggtagaggaggtgtgcagagccaatgagccctgcacaagctttgcagagtgtgtgtgtgatgagaattgtgagaaggaggctctgtataagtggcttctgaagaaagaaggaaaggataaaaatgggatgcctgtggaacccaaacctgagcctgagaagcataaagattccctgaatatgtggctctgtcctagaaaagaagtaatagaacaaactaaagcaccaaaggcaatgactccttctagaattgctgattccttccaagtcataaagaacagccccttgtcggagtggcttatcaggcccccatacaaagaaggaagtcccaaggaagtgcctggtactgaagacagagctggcaaacagaaggaagtattacttaattcacctctacaggaggaacataacttccccccagaccattatggcctccctgcagtttgtgatctctttgcctgtatgcagcttaaagttgataaagagaagtggttatatcgaactcctctacagatgtgaaggaatggacaagagttgagcagcctttctgctgattatcacacatcatgagctgagtgactgcagcttgccaaatctttgtgtttctgggtctgaccaattagcttagttcttctcctgcctaattttgaactagtaaagcaaagtgagtcatcagattatgagttactgtttaaaagaaaaatgctgtttattcatgctgaggtgattcagttccctccttcttacagaagtattttaattcaccccacactagaaatgcagcatctttgtggacgtctttttcacaagcctccaaggctccttagattgggtcgttactaaaagtacattccctaacgtttaattgccctacagatgcttctcttgctgtgggttttcttttgttagtggtctgaaataattattttcctgttctattaatacatagtgtattttgcacaaaaaaattaacctggtcaatagtgattaccaaaatatatattaataatcttggcaatttttgacattaattatgaaacattttagcccacgttagttctacattattcttcacttaaactcagctactgcaaattttgtctttctgtaaatgttattaaaatatccagtgagctctttagaaggactcagtattatttcaagactatttttgaggtaattctagccttttaaaatattctacagacctacggggcttaaaagaaccccagtaccgactaagcaaataggcaaaagacatgttggaaatgtagtatagtacttgaaacagtcactatcatagggataattggtgcatcctgtgtaaatggaagctgagcttgacacctggtgcttttaagtagggataaagtcatcctctcactgcaagcacagcatacctgtacctccaaaagtgacgttttagtgaacaggccgttttcaacacttgtgccttggggtgttcattgaagctttgtgaaaactactgatgttttctcagtctccttaaagttacgtccatgctttaaaatgtctgtgtaggagagaagtggggtttataatgttttctctaagatatctttgctgctttccagactttgaaactattaagcttcttaactgcctcttaccggaaatacttctggggaaacttcatggtcccaaaatgtcattgccatacagcttcactagagttctttgaaccacagctgaaaagagctttgtattattttttaattccctccccagatatcatttaggagtattatataaaggtggtgggcaaaaacaatgtaaggagcctttccagttatcttgagttgcagctctgtagtttcttgaggccaaacacactgtattttacaagtcaaaatataatttacattaatcactatgttaatgagtatgtaaaacattcttttgcattgatgaattttgtatctgcttccattaaaagcataacagcca

SEQ ID NO: 325829 - DNA, 3871 bp, Homo sapiens
agggcagtcaagggcttctggctgacccgagcggagatctcgcgagactgtcagacgtatggcgagaggtgtgggaggaagattgtgttgtcgcgagaactctgcctttgggccgtaggttagtgtggggccgtgtctcagtccacccaaggtctcctcggatcgcctggagaggcactcggacctggagcagtgaggagaatgaataccttccaagaccagagtggcagctccagtaatagagaaccccttttgaggtgtagtgatgcacggagggacttggagcttgctattggtggagttctccgggctgaacagcaaattaaagataacttgcgagaggtcaaagctcagattcacagttgcataagccgtcacctggaatgtcttagaagccgtgaggtatggctgtatgaacaggtggaccttatttatcagcttaaagaggagacacttcaacagcaggctcagcagctctactcgttattgggccagttcaattgtcttactcatcaactggagtgtacccaaaacaaagatctagccaatcaagtctctgtgtgcctggagagactgggcagtttgacccttaagcctgaagattcaactgtcctgctctttgaagctgacacaattactctgcgccagaccatcaccacatttgggtctctcaaaaccattcaaattcctgagcacttgatggctcatgctagttcagcaaatattgggcccttcctggagaagagaggctgtatctccatgccagagcagaagtcagcatccggtattgtagctgtccctttcagcgaatggctccttggaagcaaacctgccagtggttatcaagctccttacatacccagcaccgacccccaggactggcttacccaaaagcagaccttggagaacagtcagacttcttccagagcctgcaatttcttcaataatgtcgggggaaacctaaagggcttagaaaactggctcctcaagagtgaaaaatcaagttatcaaaagtgtaacagccattccactactagttctttctccattgaaatggaaaaggttggagatcaagagcttcctgatcaagatgagatggacctatcagattggctagtgactccccaggaatcccataagctgcggaagcctgagaatggcagtcgtgaaaccagtgagaagtttaagctcttattccagtcctataatgtgaatgattggcttgtcaagactgactcctgtaccaactgtcagggaaaccagcccaaaggtgtggagattgaaaacctgggcaatctgaagtgcctgaatgaccacttggaggccaagaaaccattgtccacccccagcatggttacagaggattggcttgtccagaaccatcaggacccatgtaaggtagaggaggtgtgcagagccaatgagccctgcacaagctttgcagagtgtgtgtgtgatgagaattgtgagaaggaggctctgtataagtggcttctgaagaaagaaggaaaggataaaaatgggatgcctgtggaacccaaacctgagcctgagaagcataaagattccctgaatatgtggctctgtcctagaaaagaagtaatagaacaaactaaagcaccaaaggcaatgactccttctagaattgctgattccttccaagtcataaagaacagccccttgtcggagtggcttatcaggcccccatacaaagaaggaagtcccaaggaagtgcctggtactgaagacagagctggcaaacagaagtttaaaagccccatgaatacttcctggtgttcctttaacacagctgactgggtcctgccaggaaagaagatgggcaacctcagccagttatcttctggagaagacaagtggctgcttcgaaagaaggcccaggaagtattacttaattcacctctacaggaggaacataacttccccccagaccattatggcctccctgcagtttgtgatctctttgcctgtatgcagcttaaagttgataaagagaagtggttatatcgaactcctctacagatgtgaaggaatggacaagagttgagcagcctttctgctgattatcacacatcatgagctgagtgactgcagcttgccaaatctttgtgtttctgggtctgaccaattagcttagttcttctcctgcctaattttgaactagtaaagcaaagtgagtcatcagattatgagttactgtttaaaagaaaaatgctgtttattcatgctgaggtgattcagttccctccttcttacagaagtattttaattcaccccacactagaaatgcagcatctttgtggacgtctttttcacaagcctccaaggctccttagattgggtcgttactaaaagtacattaaaacactcttgtttatcgaagtatattgatgtattctaaagctagtaaacttccctaacgtttaattgccctacagatgcttctcttgctgtgggttttcttttgttagtggtctgaaataattattttcctgttctattaatacatagtgtattttgcacaaaaaaattaacctggtcaatagtgattaccaaaatatatattaataatcttggcaatttttgacattaattatgaaacattttagcccacgttagttctacattattcttcacttaaactcagctactgcaaattttgtctttctgtaaatgttattaaaatatccagtgagctctttagaaggactcagtattatttcaagactatttttgaggtaattctagccttttaaaatattctacagacctacggggcttaaaagaaccccagtaccgactaagcaaataggcaaaagacatgttggaaatgtagtatagtacttgaaacagtcactatcatagggataattggtgcatcctgtgtaaatggaagctgagcttgacacctggtgcttttaagtagggataaagtcatcctctcactgcaagcacagcatacctgtacctccaaaagtgacgttttagtgaacaggccgttttcaacacttgtgccttggggtgttcattgaagctttgtgaaaactactgatgttttctcagtctccttaaagttacgtccatgctttaaaatgtctgtgtaggagagaagtggggtttataatgttttctctaagatatctttgctgctttccagactttgaaactattaagcttcttaactgcctcttaccggaaatacttctggggaaacttcatggtcccaaaatgtcattgccatacagcttcactagagttctttgaaccacagctgaaaagagctttgtattattttttaattccctccccagatatcatttaggagtattatataaaggtggtgggcaaaaacaatgtaaggagcctttccagttatcttgagttgcagctctgtagtttcttgaggccaaacacactgtattttacaagtcaaaatataatttacattaatcactatgttaatgagtatgtaaaacattcttttgcattgatgaattttgtatctgcttccattaaaagcataacagccaaaaaaaaaaaaaaaaaaaaaaaaaaaaaaaaaaaaaaaaaaaaaaaaaaaaaaaaaaaaaagggggggggcagaaaaaaaaatatctccccgggggggccgcaaaaaaagcaccccccgatttttggacacaaaaggggcgcaccaaaaggagggaggcagtaattaaaccaagaacacgaaggcggagggacagagagatcaaaaaagagaactagcggggggaaacacagcggcaactgcgggggcacaaggaggaagaagacacaccaccacaacagaggaggaggagagaacaacacagggggaaaaacacccccgaca

SEQ ID NO: 325830 - DNA, 3595 bp, Homo sapiens
agggcagtcaagggcttctggctgacccgagcggagatctcgcgagactgtcagacgtatggcgagaggtgtgggaggaagattgtgttgtcgcgagaactctgcctttgggccgtaggttagtgtggggccgtgtctcagtccacccaaggtctcctcggatcgcctggagaggcactcggacctggagcagtgaggagaatgaataccttccaagaccagagtggcagctccagtaatagagaaccccttttgaggtgtagtgatgcacggagggacttggagcttgctattggtggagttctccgggctgaacagcaaattaaagataacttgcgagaggtcaaagctcagattcacagttgcataagccgtcacctggaatgtcttagaagccgtgaggtatggctgtatgaacaggtggaccttatttatcagcttaaagaggagacacttcaacagcaggctcagcagctctactcgttattgggccagttcaattgtcttactcatcaactggagtgtacccaaaacaaagatctagccaatcaagtctctgtgtgcctggagagactgggcagtttgacccttaagcctgaagattcaactgtcctgctctttgaagctgacacaattactctgcgccagaccatcaccacatttgggtctctcaaaaccattcaaattcctgagcacttgatggctcatgctagttcagcaaatattgggcccttcctggagaagagaggctgtatctccatgccagagcagaagtcagcatccggtattgtagctgtccctttcagcgaatggctccttggaagcaaacctgccagtggttatcaagctccttacatacccagcaccgacccccaggactggcttacccaaaagcagaccttggagaacagtcagacttcttccagagcctgcaatttcttcaataatgtcgggggaaacctaaagggcttagaaaactggctcctcaagagtgaaaaatcaagttatcaaaagtgtaacagccattccactactagttctttctccattgaaatggaaaaggttggagatcaagagcttcctgatcaagatgagatggacctatcagattggctagtgactccccaggaatcccataagctgcggaagcctgagaatggcagtcgtgaaaccagtgagaagtttaagctcttattccagtcctataatgtgaatgattggcttgtcaagactgactcctgtaccaactgtcagggaaaccagcccaaaggtgtggagattgaaaacctgggcaatctgaagtgcctgaatgaccacttggaggccaagaaaccattgtccacccccagcatggttacagaggattggcttgtccagaaccatcaggacccatgtaaggtagaggaggtgtgcagagccaatgagccctgcacaagctttgcagagtgtgtgtgtgatgagaattgtgagaaggaggctctgtataagtggcttctgaagaaagaaggaaaggataaaaatgggatgcctgtggaacccaaacctgagcctgagaagcataaagattccctgaatatgtggctctgtcctagaaaagaagtaatagaacaaactaaagcaccaaaggcaatgactccttctagaattgctgattccttccaagtcataaagaacagccccttgtcggagtggcttatcaggcccccatacaaagaaggaagtcccaaggaagtgcctggtactgaagacagagctggcaaacagaagtttaaaagccccatgaatacttcctggtgttcctttaacacagctgactgggtcctgccaggaaagaagatgggcaacctcagccagttatcttctggagaagacaagtggctgcttcgaaagaaggcccaggaagtattacttaattcacctctacaggaggaacataacttccccccagaccattatggcctccctgcagtttgtgatctctttgcctgtatgcagcttaaagttgataaagagaagtggttatatcgaactcctctacagatgtgaaggaatggacaagagttgagcagcctttctgctgattatcacacatcatgagctgagtgactgcagcttgccaaatctttgtgtttctgggtctgaccaattagcttagttcttctcctgcctaattttgaactagtaaagcaaagtgagtcatcagattatgagttactgtttaaaagaaaaatgctgtttattcatgctgaggtgattcagttccctccttcttacagaagtattttaattcaccccacactagaaatgcagcatctttgtggacgtctttttcacaagcctccaaggctccttagattgggtcgttactaaaagtacattaaaacactcttgtttatcgaagtatattgatgtattctaaagctagtaaacttccctaacgtttaattgccctacagatgcttctcttgctgtgggttttcttttgttagtggtctgaaataattattttcctgttctattaatacatagtgtattttgcacaaaaaaattaacctggtcaatagtgattaccaaaatatatattaataatcttggcaatttttgacattaattatgaaacattttagcccacgttagttctacattattcttcacttaaactcagctactgcaaattttgtctttctgtaaatgttattaaaatatccagtgagctctttagaaggactcagtattatttcaagactatttttgaggtaattctagccttttaaaatattctacagacctacggggcttaaaagaaccccagtaccgactaagcaaataggcaaaagacatgttggaaatgtagtatagtacttgaaacagtcactatcatagggataattggtgcatcctgtgtaaatggaagctgagcttgacacctggtgcttttaagtagggataaagtcatcctctcactgcaagcacagcatacctgtacctccaaaagtgacgttttagtgaacaggccgttttcaacacttgtgccttggggtgttcattgaagctttgtgaaaactactgatgttttctcagtctccttaaagttacgtccatgctttaaaatgtctgtgtaggagagaagtggggtttataatgttttctctaagatatctttgctgctttccagactttgaaactattaagcttcttaactgcctcttaccggaaatacttctggggaaacttcatggtcccaaaatgtcattgccatacagcttcactagagttctttgaaccacagctgaaaagagctttgtattattttttaattccctccccagatatcatttaggagtattatataaaggtggtgggcaaaaacaatgtaaggagcctttccagttatcttgagttgcagctctgtagtttcttgaggccaaacacactgtattttacaagtcaaaatataatttacattaatcactatgttaatgagtatgtaaaacattctttttttttatggctgttatgcttttaatggaagcagatacaaaattcatcaatgtaaaagaatgtcgacgcggccgcgaatttagtagtagtagta

SEQ ID NO: 325831 - DNA, 1934 bp, Homo sapiens
gcctgcccagctttcagcctctcgtggccttcaacatgactttctcgctaagtttaatcatttctggcttttgatttaaagaagagtgagagatggggactattccttttagttgaacacttagatgcaattgtagggttaataattggcctaatttcaatcttgttttgtctcagggaacagggaggcctgaggagagagaagagaaatagggaaaggctgtttggtgggcattcaggacatttattgatgaaaagtttaccatctttaatgggcatagttcatgacacaaatgcttaatttgtaaaaaatacaatgtaacaagggtatacctgtattgggaaatgagtcggagctttaaggcagggaaaatttgcttttattcttcattgaagtaacttatcatctgtgggtgtctctttacagatgtgaaggaatggacaagagttgagcagcctttctgctgattatcacacatcatgagctgagtgactgcagcttgccaaatctttgtgtttctgggtctgaccaattagcttagttcttctcctgcctaattttgaactagtaaagcaaagtgagtcatcagattatgagttactgtttaaaagaaaaatgctgtttattcatgctgaggtgattcagttccctccttcttacagaagtattttaattcaccccacactagaaatgcagcatctttgtggacgtctttttcacaagcctccaaggctccttagattgggtcgttactaaaagtacattaaaacactcttgtttatcgaagtatattgatgtattctaaagctagtaaacttccctaacgtttaattgccctacagatgcttctcttgctgtgggttttcttttgttagtggtctgaaataattattttcctgttctattaatacatagtgtattttgcacaaaaaaattaacctggtcaatagtgattaccaaaatatatattaataatcttggcaatttttgacattaattatgaaacattttagcccacgttagttctacattattcttcacttaaactcagctactgcaaattttgtctttctgtaaatgttattaaaatatccagtgagctctttagaaggactcagtattatttcaagactatttttgaggtaattctagccttttaaaatattctacagacctacggggcttaaaagaaccccagtaccgactaagcaaataggcaaaagacatgttggaaatgtagtatagtacttgaaacagtcactatcatagggataattggtgcatcctgtgtaaatggaagctgagcttgacacctggtgcttttaagtagggataaagtcatcctctcactgcaagcacagcatacctgtacctccaaaagtgacgttttagtgaacaggccgttttcaacacttgtgccttggggtgttcattgaagctttgtgaaaactactgatgttttctcagtctccttaaagttacgtccatgctttaaaatgtctgtgtaggagagaagtggggtttataatgttttctctaagatatctttgctgctttccagactttgaaactattaagcttcttaactgcctcttaccggaaatacttctggggaaacttcatggtcccaaaatgtcattgccatacagcttcactagagttctttgaaccacagctgaaaagagctttgtattattttttaattccctccccagatatcatttaggagtattatataaaggtggtgggcaaaaacaatgtaaggagcctttccagttatcttgagttgcagctctgtagtttcttgaggccaaacacactgtattttacaagtcaaaatataatttacattaatcactatgttaatgagtatgtaaaacattcttttgcattgatgaattttgtatctgcttccattaaaagcataacagcca

SEQ ID NO: 325832 - DNA, 2214 bp, Homo sapiens
agggcagtcaagggcttctggctgacccgagcggagatctcgcgagactgtcagacgtatggcgagaggtgtgggaggaagattgtgttgtcgcgagaactctgcctttgggccgtaggttagtgtggggccgtgtctcagtccacccaaggtctcctcggatcgcctggagaggcactcggacctggagcagtgaggagaatgaataccttccaagaccagagtggcagctccagtaatagagaaccccttttgaggtgtagtgatgcacggagggacttggagcttgctattggtggagttctccgggctgaacagcaaattaaagataacttgcgagaggtcaaagctcagattcacagttgcataagccgtcacctggaatgtcttagaagccgtgaggtatggctgtatgaacaggtggaccttatttatcagcttaaagaggagacacttcaacagcaggctcagcagctctactcgttattgggccagttcaattgtcttactcatcaactggagtgtacccaaaacaaagatctagccaatcaagtctctgtgtgcctggagagactgggcagtttgacccttaagcctgaagattcaactgtcctgctctttgaagctgacacaattactctgcgccagaccatcaccacatttgggtctctcaaaaccattcaaattcctgagcacttgatggctcatgctagttcagcaaatattgggcccttcctggagaagagaggctgtatctccatgccagagcagaagtcagcatccggtattgtagctgtccctttcagcgaatggctccttggaagcaaacctgccagtggttatcaagctccttacatacccagcaccgacccccaggactggcttacccaaaagcagaccttggagaacagtcagacttcttccagagcctgcaatttcttcaataatgtcgggggaaacctaaagggcttagaaaactggctcctcaagagtgaaaaatcaagttatcaaaagtgtaacagccattccactactagttctttctccattgaaatggaaaaggttggagatcaagagcttcctgatcaagatgagatggacctatcagattggctagtgactccccaggaatcccataagctgcggaagcctgagaatggcagtcgtgaaaccagtgagaagtttaagctcttattccagtcctataatgtgaatgattggcttgtcaagactgactcctgtaccaactgtcagggaaaccagcccaaaggtgtggagattgaaaacctgggcaatctgaagtgcctgaatgaccacttggaggccaagaaaccattgtccacccccagcatggttacagaggattggcttgtccagaaccatcaggacccatgtaaggtagaggaggtgtgcagagccaatgagccctgcacaagctttgcagagtgtgtgtgtgatgagaattgtgagaaggaggctctgtataagtggcttctgaagaaagaaggaaaggataaaaatgggatgcctgtggaacccaaacctgagcctgagaagcataaagattccctgaatatgtggctctgtcctagaaaagaagtaatagaacaaactaaagtcatcctctcactgcaagcacagcatacctgtacctccaaaagtgacgttttagtgaacaggccgttttcaacacttgtgccttggggtgttcattgaagctttgtgaaaactactgatgttttctcagtctccttaaagttacgtccatgctttaaaatgtctgtgtaggagagaagtggggtttataatgttttctctaagatatctttgctgctttccagactttgaaactattaagcttcttaactgcctcttaccggaaatacttctggggaaacttcatggtcccaaaatgtcattgccatacagcttcactagagttctttgaaccacagctgaaaagagctttgtattattttttaattccctccccagatatcatttaggagtattatataaaggtggtgggcaaaaacaatgtaaggagcctttccagttatcttgagttgcagctctgtagtttcttgaggccaaacacactgtattttacaagtcaaaatataatttacattaatcactatgttaatgagtatgtaaaacattcttttgcattgatgaattttgtatctgcttccattaaaagcataacagcca

SEQ ID NO: 325833 - DNA, 1981 bp, Homo sapiens
agggcagtcaagggcttctggctgacccgagcggagatctcgcgagactgtcagacgtatggcgagaggtgtgggaggaagattgtgttgtcgcgagaactctgcctttgggccgtaggttagtgtggggccgtgtctcagtccacccaaggtctcctcggatcgcctggagaggcactcggacctggagcagtgaggagaatgaataccttccaagaccagagtggcagctccagtaatagagaaccccttttgaggtgtagtgatgcacggagggacttggagcttgctattggtggagttctccgggctgaacagcaaattaaagataacttgcgagaggtcaaagctcagattcacagttgcataagccgtcacctggaatgtcttagaagccgtgaggtatggctgtatgaacaggtggaccttatttatcagcttaaagaggagacacttcaacagcaggctcagcagctctactcgttattgggccagttcaattgtcttactcatcaactggagtgtacccaaaacaaagatctagccaatcaagtctctgtgtgcctggagagactgggcagtttgacccttaagcctgaagattcaactgtcctgctctttgaagctgacacaattactctgcgccagaccatcaccacatttgggtctctcaaaaccattcaaattcctgagcacttgatggctcatgctagttcagcaaatattgggcccttcctggagaagagaggctgtatctccatgccagagcagaagtcagcatccggtattgtagctgtccctttcagcgaatggctccttggaagcaaacctgccagtggttatcaagctccttacatacccagcaccgacccccaggactggcttacccaaaagcagaccttggagaacagtcagacttcttccagagcctgcaatttcttcaataatgtcgggggaaacctaaagggcttagaaaactggctcctcaagagtgaaaaatcaagttatcaaaagtgtaacagccattccactactagttctttctccattgaaatggaaaaggttggagatcaagagcttcctgatcaagatgagatggacctatcagattggctagtgactccccaggaatcccataagctgcggaagcctgagaatggcagtcgtgaaaccagtgagaagtttaagctcttattccagtcctataatgtgaatgattggcttgtcaagactgactcctgtaccaactgtcagggaaaccagcccaaaggtgtggagattgaaaacctgggcaatctgaagtgcctgaatgaccacttggaggccaagaaaccattgtccacccccagcatggttacagaggattggcttgtccagaaccatcaggacccatgtaaggtagaggaggtgtgcagagccaatgagccctgcacaagctttgcagagtgtgtgtgtgatgagaattgtgagaaggaggctctgtataagtggcttctgaagaaagaaggaaaggataaaaatgggatgcctgtggaacccaaacctgagcctgagaagcataaagattccctgaatatgtggctctgtcctagaaaagaagtaatagaacaaactaaagcaccaaaggcaatgactccttctagaattgctgattccttccaagtcataaagaacagccccttgtcggagtggcttatcaggcccccatacaaagaaggaagtcccaaggaagtgcctggtactgaagacagagctggcaaacagaaggaagtattacttaattcacctctacaggaggaacataacttccccccagaccattatggcctccctgcagtttgtgatctctttgcctgtatgcagcttaaagttgataaagagaagtggttatatcgaactcctctacaggtgggtacatgccaccagcatgaaaattagattatagctatttataaaataaatgttttgtcttacatatgaa

SEQ ID NO: 325834 - DNA, 1034 bp, Homo sapiens
agggcagtcaagggcttctggctgacccgagcggagatctcgcgagactgtcagacgtatggcgagaggtgtgggaggaagattgtgttgtcgcgagaactctgcctttgggccgtaggttagtgtggggccgtgtctcagtccacccaaggtctcctcggatcgcctggagaggcactcggacctggagcagtgaggagaatgaataccttccaagaccagagtggcagctccagtaatagagaaccccttttgaggtgtagtgatgcacggagggacttggagcttgctattggtggagttctccgggctgaacagcaaattaaagataacttgcgagaggtcaaagctcagattcacagttgcataagccgtcacctggaatgtcttagaagccgtgaggtatggctgtatgaacaggtggaccttatttatcagcttaaagaggagacacttcaacagcaggctcagcagctctactcgttattgggccagttcaattgtcttactcatcaactggagtgtacccaaaacaaagatctagccaatcaagtctctgtgtgcctggagagactgggcagtttgacccttaagcctgaagattcaactgtcctgctctttgaagctgacacaattactctgcgccagaccatcaccacatttgggtctctcaaaaccattcaaattcctgagcacttgatggctcatgctagttcagcaaatattgggcccttcctggagaagagaggctgtatctccatgccagagcagaagtcagcatccggtattgtagctgtccctttcagcgaatggctccttggaagcaaacctgccagtggttatcaagctccttacatacccagcaccgacccccaggactggcttacccaaaagcagaccttggagaacagtcagaggatccaaagtgggaattccctcggaagaacttggttcttggaaaaactctaggagaaggcgaatttggaaaagtggtcaaggcaacggccttccatctgaaaggcagagcagggtac

SEQ ID NO: 325835 - DNA, 1509 bp, Homo sapiens
agggcagtcaagggcttctggctgacccgagcggagatctcgcgagactgtcagacgtatggcgagaggtgtgggaggaagattgtgttgtcgcgagaactctgcctttgggccgtaggttagtgtggggccgtgtctcagtccacccaaggtctcctcggatcgcctggagaggcactcggacctggagcagtgaggagaatgaataccttccaagaccagagtggcagctccagtaatagagaaccccttttgaggtgtagtgatgcacggagggacttggagcttgctattggtggagttctccgggctgaacagcaaattaaagataacttgcgagaggtcaaagctcagattcacagttgcataagccgtcacctggaatgtcttagaagccgtgaggtatggctgtatgaacaggtggaccttatttatcagcttaaagaggagacacttcaacagcaggctcagcagctctactcgttattgggccagttcaattgtcttactcatcaactggagtgtacccaaaacaaagatctagccaatcaagtctctgtgtgcctggagagactgggcagtttgacccttaagcctgaagattcaactgtcctgctctttgaagctgacacaattactctgcgccagaccatcaccacatttgggtctctcaaaaccattcaaattcctgagcacttgatggctcatgctagttcagcaaatattgggcccttcctggagaagagaggctgtatctccatgccagagcagaagtcagcatccggtattgtagctgtccctttcagcgaatggctccttggaagcaaacctgccagtggttatcaagctccttacatacccagcaccgacccccaggactggcttacccaaaagcagaccttggagaacagtcagacttcttccagagcctgcaatttcttcaataatgtcgggggaaacctaaagggttatcttgagttgcagctctgtagtttcttgaggccaaacacactgtattttacaagtcaaaatataatttacattaatcactatgttaatgagtatgtaaaacattcttttgcattgatgaattttgtatctgcttccattaaaagcataacagccatagttgttgcgtgttatttttaaaactatttgtcacaaagtgtggtgtggtaccacataacgtggtaacttttggttagtaatccagctgagaaacagcttgaacataaaaataacatcagtgtattttatgaaaaattagcaaacaataggtatattaacctccattttcagtcttttataaaaactattcacatctattaaaaaaaaacctatgggacttcagccaagattcagtgcctttctactggattcctcttactagatgcatccgaagaggccctagtttactttctccaatcatatagccaccaggtatttaatacagtaatatttatgtgtataacctgtagtgcaattatacatgattaacttcatatggtg

SEQ ID NO: 325836 - DNA, 275 bp, Homo sapiens
gagcagtgaggagaatgaataccttccaagaccagagtggcagctccagtaatagagaaccccttttgaggtgtagtgatgcacggagggacttggagcttgctattggtggagttctccgggctgaacagcaaattaaagataacttgcgagaggtgtgacatgtgcttttctcttctgttgtctggactcttgacacagggctgatttgagcatggccaaggacttggtctctccgtgccagcaaaaaatttcaccccatgccttgcgtggtc

SEQ ID NO: 325837 - DNA, 436 bp, Homo sapiens
taacgccagtaagggatttggacacatctggcttgacagcgtttcttgccagggacatgaacctgctgtctggcaatgtaaacaccatgaatggggaaagcattattgcaatcacaatgaagatgctggcgtgacatgttctgatggatcagatctggagctaagacttagaggtggaggcagccgctgtgctgggacagttgaggtggagattcagatatcatttaggagtattatataaaggtggtgggcaaaaacaatgtaaggagcctttccagttatcttgagttgcagctctgtagtttcttgaggccaaacacactgtattttacaagtcaaaatataatttacattaatcactatgttaatgagtatgtaaaacattcttttgcattgatgaattttgtatctgcttccattaaaagcataacagcca

SEQ ID NO: 325838 - DNA, 3494 bp, Homo sapiens
agggcagtcaagggcttctggctgacccgagcggagatctcgcgagactgtcagacgtatggcgagaggtgtgggaggaagattgtgttgtcgcgagaactctgcctttgggccgtaggttagtgtggggccgtgtctcagtccacccaaggtctcctcggatcgcctggagaggcactcggacctggagcagtgaggagaatgaataccttccaagaccagagtggcagctccagtaatagagaaccccttttgaggtgtagtgatgcacggagggacttggagcttgctattggtggagttctccgggctgaacagcaaattaaagataacttgcgagaggtcaaagctcagattcacagttgcataagccgtcacctggaatgtcttagaagccgtgaggtatggctgtatgaacaggtggaccttatttatcagcttaaagaggagacacttcaacagcaggctcagcagctctactcgttattgggccagttcaattgtcttactcatcaactggagtgtacccaaaacaaagatctagccaatcaagtctctgtgtgcctggagagactgggcagtttgacccttaagcctgaagattcaactgtcctgctctttgaagctgacacaattactctgcgccagaccatcaccacatttgggtctctcaaaaccattcaaattcctgagcacttgatggctcatgctagttcagcaaatattgggcccttcctggagaagagaggctgtatctccatgccagagcagaagtcagcatccggtattgtagctgtccctttcagcgaatggctccttggaagcaaacctgccagtggttatcaagctccttacatacccagcaccgacccccaggactggcttacccaaaagcagaccttggagaacagtcagacttcttccagagcctgcaatttcttcaataatgtcgggggaaacctaaagggcttagaaaactggctcctcaagagtgaaaaatcaagttatcaaaagtgtaacagccattccactactagttctttctccattgaaatggaaaaggttggagatcaagagcttcctgatcaagatgagatggacctatcagattggctagtgactccccaggaatcccataagctgcggaagcctgagaatggcagtcgtgaaaccagtgagaagtttaagctcttattccagtcctataatgtgaatgattggcttgtcaagactgactcctgtaccaactgtcagggaaaccagcccaaaggtgtggagattgaaaacctgggcaatctgaagtgcctgaatgaccacttggaggccaagaaaccattgtccacccccagcatggttacagaggattggcttgtccagaaccatcaggacccatgtaaggtagaggaggtgtgcagagccaatgagccctgcacaagctttgcagagtgtgtgtgtgatgagaattgtgagaaggaggctctgtataagtggcttctgaagaaagaaggaaaggataaaaatgggatgcctgtggaacccaaacctgagcctgagaagcataaagattccctgaatatgtggctctgtcctagtgctgattccttccaagtcataaagaacagccccttgtcggagtggcttatcaggcccccatacaaagaaggaagtcccaaggaagtgcctggtactgaagacagagctggcaaacagaagtttaaaagccccatgaatacttcctggtgttcctttaacacagctgactgggtcctgccaggaaagaagatgggcaacctcagccagttatcttctggagaagacaagtggctgcttcgaaagaaggcccaggaagtattacttaattcacctctacaggaggaacataacttccccccagaccattatggcctccctgcagtttgtgatctctttgcctgtatgcagcttaaagttgataaagagaagtggttatatcgaactcctctacagatgtgaaggaatggacaagagttgagcagcctttctgctgattatcacacatcatgagctgagtgactgcagcttgccaaatctttgtgtttctgggtctgaccaattagcttagttcttctcctgcctaattttgaactagtaaagcaaagtgagtcatcagattatgagttactgtttaaaagaaaaatgctgtttattcatgctgaggtgattcagttccctccttcttacagaagtattttaattcaccccacactagaaatgcagcatctttgtggacgtctttttcacaagcctccaaggctccttagattgggtcgttactaaaagtacattaaaacactcttgtttatcgaagtatattgatgtattctaaagctagtaaacttccctaacgtttaattgccctacagatgcttctcttgctgtgggttttcttttgttagtggtctgaaataattattttcctgttctattaatacatagtgtattttgcacaaaaaaattaacctggtcaatagtgattaccaaaatatatattaataatcttggcaatttttgacattaattatgaaacattttagcccacgttagttctacattattcttcacttaaactcagctactgcaaattttgtctttctgtaaatgttattaaaatatccagtgagctctttagaaggactcagtattatttcaagactatttttgaggtaattctagccttttaaaatattctacagacctacggggcttaaaagaaccccagtaccgactaagcaaataggcaaaagacatgttggaaatgtagtatagtacttgaaacagtcactatcatagggataattggtgcatcctgtgtaaatggaagctgagcttgacacctggtgcttttaagtagggataaagtcatcctctcactgcaagcacagcatacctgtacctccaaaagtgacgttttagtgaacaggccgttttcaacacttgtgccttggggtgttcattgaagctttgtgaaaactactgatgttttctcagtctccttaaagttacgtccatgctttaaaatgtctgtgtaggagagaagtggggtttataatgttttctctaagatatctttgctgctttccagactttgaaactattaagcttcttaactgcctcttaccggaaatacttctggggaaacttcatggtcccaaaatgtcattgccatacagcttcactagagttctttgaaccacagctgaaaagagctttgtattattttttaattccctccccagatatcatttaggagtattatataaaggtggtgggcaaaaacaatgtaaggagcctttccagttatcttgagttgcagctctgtagtttcttgaggccaaacacactgtattttacaagtcaaaatataatttacattaatcactatgttaatgagtatgtaaaacattcttttgcattgatgaattttgtatctgcttccattaaaagcataacagcca

SEQ ID NO: 325839 - DNA, 3461 bp, Homo sapiens
  misc_feature (74)..(74): n is a, c, g, or t
ccgaatatcagagtgcggcggtgaattcatactggctggtgtgttcatgttcaggccgtcggctgtcatctcgnatcgcctggagaggcactcggacctggagcagtgaggagaatgaataccttccaagaccagagtggcagctccagtaatagagaaccccttttgaggtgtagtgatgcacggagggacttggagcttgctattggtggagttctccgggctgaacagcaaattaaagataacttgcgagaggtcaaagctcagattcacagttgcataagccgtcacctggaatgtcttagaagccgtgaggtatggctgtatgaacaggtggaccttatttatcagcttaaagaggagacacttcaacagcaggctcagcagctctactcgttattgggccagttcaattgtcttactcatcaactggagtgtacccaaaacaaagatctagccaatcaagtctctgtgtgcctggagagactgggcagtttgacccttaagcctgaagattcaactgtcctgctctttgaagctgacacaattactctgcgccagaccatcaccacatttgggtctctcaaaaccattcaaattcctgagcacttgatggctcatgctagttcagcaaatattgggcccttcctggagaagagaggctgtatctccatgccagagcagaagtcagcatccggtattgtagctgtccctttcagcgaatggctccttggaagcaaacctgccagtggttatcaagctccttacatacccagcaccgacccccaggactggcttacccaaaagcagaccttggagaacagtcagacttcttccagagcctgcaatttcttcaataatgtcgggggaaacctaaagggcttagaaaactggctcctcaagagtgaaaaatcaagttatcaaaagtgtaacagccattccactactagttctttctccattgaaatggaaaaggttggagatcaagagcttcctgatcaagatgagatggacctatcagattggctagtgactccccaggaatcccataagctgcggaagcctgagaatggcagtcgtgaaaccagtgagaagtttaagctcttattccagtcctataatgtgaatgattggcttgtcaagactgactcctgtaccaactgtcagggaaaccagcccaaaggtgtggagattgaaaacctgggcaatctgaagtgcctgaatgaccacttggaggccaagaaaccattgtccacccccagcatggttacagaggattggcttgtccagaaccatcaggacccatgtaaggtagaggaggtgtgcagagccaatgagccctgcacaagctttgcagagtgtgtgtgtgatgagaattgtgagaaggaggctctgtataagtggcttctgaagaaagaaggaaaggataaaaatgggatgcctgtggaacccaaacctgagcctgagaagcataaagattccctgaatatgtggctctgtcctagaaaagaagtaatagaacaaactaaagcaccaaaggcaatgactccttctagaattgctgattccttccaagtcataaagaacagccccttgtcggagtggcttatcaggcccccatacaaagaaggaagtcccaaggaagtgcctggtactgaagacagagctggcaaacagaagtttaaaagccccatgaatacttcctggtgttcctttaacacagctgactgggtcctgccaggaaagaagatgggcaacctcagccagttatcttctggagaagacaagtggctgcttcgaaagaaggcccaggaagtattacttaattcacctctacaggaggaacataacttccccccagaccattatggcctccctgcagtttgtgatctctttgcctgtatgcagcttaaagttgataaagagaagtggttatatcgaactcctctacagatgtgaaggaatggacaagagttgagcagcctttctgctgattatcacacatcatgagctgagtgactgcagcttgccaaatctttgtgtttctgggtctgaccaattagcttagttcttctcctgcctaattttgaactagtaaagcaaagtgagtcatcagattatgagttactgtttaaaagaaaaatgctgtttattcatgctgaggtgattcagttccctccttcttacagaagtattttaattcaccccacactagaaatgcagcatctttgtggacgtctttttcacaagcctccaaggctccttagattgggtcgttactaaaagtacattaaaacactcttgtttatcgaagtatattgatgtattctaaagctagtaaacttccctaacgtttaattgccctacagatgcttctcttgctgtgggttttcttttgttagtggtctgaaataattattttcctgttctattaatacatagtgtattttgcacaaaaaaattaacctggtcaatagtgattaccaaaatatatattaataatcttggcaatttttgacattaattatgaaacattttagcccacgttagttctacattattcttcacttaaactcagctactgcaaattttgtctttctgtaaatgttattaaaatatccagtgagctctttagaaggactcagtattatttcaagactatttttgaggtaattctagccttttaaaatattctacagacctacggggcttaaaagaaccccagtaccgactaagcaaataggcaaaagacatgttggaaatgtagtatagtacttgaaacagtcactatcatagggataattggtgcatcctgtgtaaatggaagctgagcttgacacctggtgcttttaagtagggataaagtcatcctctcactgcaagcacagcatacctgtacctccaaaagtgacgttttagtgaacaggccgttttcaacacttgtgccttggggtgttcattgaagctttgtgaaaactactgatgttttctcagtctccttaaagttacgtccatgctttaaaatgtctgtgtaggagagaagtggggtttataatgttttctctaagatatctttgctgctttccagactttgaaactattaagcttcttaactgcctcttaccggaaatacttctggggaaacttcatggtcccaaaatgtcattgccatacagcttcactagagttctttgaaccacagctgaaaagagctttgtattattttttaattccctccccagatatcatttaggagtattatataaaggtggtgggcaaaaacaatgtaaggagcctttccagttatcttgagttgcagctctgtagtttcttgaggccaaacacactgtattttacaagtcaaaatataatttacattaatcactatgttaatgagtatgtaaaacattcttttgcattgatgaattttgtatctgcttccattaaaagcataacagcca

SEQ ID NO: 325840 - DNA, 3393 bp, Homo sapiens
agggcagtcaagggcttctggctgacccgagcggagatctcgcgagactgtcagacgtatggcgagaggtgtgggaggaagattgtgttgtcgcgagaactctgcctttgggccgtaggttagtgtggggccgtgtctcagtccacccaaggtctcctcggatcgcctggagaggcactcggacctggtcaaagctcagattcacagttgcataagccgtcacctggaatgtcttagaagccgtgaggtatggctgtatgaacaggtggaccttatttatcagcttaaagaggagacacttcaacagcaggctcagcagctctactcgttattgggccagttcaattgtcttactcatcaactggagtgtacccaaaacaaagatctagccaatcaagtctctgtgtgcctggagagactgggcagtttgacccttaagcctgaagattcaactgtcctgctctttgaagctgacacaattactctgcgccagaccatcaccacatttgggtctctcaaaaccattcaaattcctgagcacttgatggctcatgctagttcagcaaatattgggcccttcctggagaagagaggctgtatctccatgccagagcagaagtcagcatccggtattgtagctgtccctttcagcgaatggctccttggaagcaaacctgccagtggttatcaagctccttacatacccagcaccgacccccaggactggcttacccaaaagcagaccttggagaacagtcagacttcttccagagcctgcaatttcttcaataatgtcgggggaaacctaaagggcttagaaaactggctcctcaagagtgaaaaatcaagttatcaaaagtgtaacagccattccactactagttctttctccattgaaatggaaaaggttggagatcaagagcttcctgatcaagatgagatggacctatcagattggctagtgactccccaggaatcccataagctgcggaagcctgagaatggcagtcgtgaaaccagtgagaagtttaagctcttattccagtcctataatgtgaatgattggcttgtcaagactgactcctgtaccaactgtcagggaaaccagcccaaaggtgtggagattgaaaacctgggcaatctgaagtgcctgaatgaccacttggaggccaagaaaccattgtccacccccagcatggttacagaggattggcttgtccagaaccatcaggacccatgtaaggtagaggaggtgtgcagagccaatgagccctgcacaagctttgcagagtgtgtgtgtgatgagaattgtgagaaggaggctctgtataagtggcttctgaagaaagaaggaaaggataaaaatgggatgcctgtggaacccaaacctgagcctgagaagcataaagattccctgaatatgtggctctgtcctagaaaagaagtaatagaacaaactaaagcaccaaaggcaatgactccttctagaattgctgattccttccaagtcataaagaacagccccttgtcggagtggcttatcaggcccccatacaaagaaggaagtcccaaggaagtgcctggtactgaagacagagctggcaaacagaagtttaaaagccccatgaatacttcctggtgttcctttaacacagctgactgggtcctgccaggaaagaagatgggcaacctcagccagttatcttctggagaagacaagtggctgcttcgaaagaaggcccaggaagtattacttaattcacctctacaggaggaacataacttccccccagaccattatggcctccctgcagtttgtgatctctttgcctgtatgcagcttaaagttgataaagagaagtggttatatcgaactcctctacagatgtgaaggaatggacaagagttgagcagcctttctgctgattatcacacatcatgagctgagtgactgcagcttgccaaatctttgtgtttctgggtctgaccaattagcttagttcttctcctgcctaattttgaactagtaaagcaaagtgagtcatcagattatgagttactgtttaaaagaaaaatgctgtttattcatgctgaggtgattcagttccctccttcttacagaagtattttaattcaccccacactagaaatgcagcatctttgtggacgtctttttcacaagcctccaaggctccttagattgggtcgttactaaaagtacattaaaacactcttgtttatcgaagtatattgatgtattctaaagctagtaaacttccctaacgtttaattgccctacagatgcttctcttgctgtgggttttcttttgttagtggtctgaaataattattttcctgttctattaatacatagtgtattttgcacaaaaaaattaacctggtcaatagtgattaccaaaatatatattaataatcttggcaatttttgacattaattatgaaacattttagcccacgttagttctacattattcttcacttaaactcagctactgcaaattttgtctttctgtaaatgttattaaaatatccagtgagctctttagaaggactcagtattatttcaagactatttttgaggtaattctagccttttaaaatattctacagacctacggggcttaaaagaaccccagtaccgactaagcaaataggcaaaagacatgttggaaatgtagtatagtacttgaaacagtcactatcatagggataattggtgcatcctgtgtaaatggaagctgagcttgacacctggtgcttttaagtagggataaagtcatcctctcactgcaagcacagcatacctgtacctccaaaagtgacgttttagtgaacaggccgttttcaacacttgtgccttggggtgttcattgaagctttgtgaaaactactgatgttttctcagtctccttaaagttacgtccatgctttaaaatgtctgtgtaggagagaagtggggtttataatgttttctctaagatatctttgctgctttccagactttgaaactattaagcttcttaactgcctcttaccggaaatacttctggggaaacttcatggtcccaaaatgtcattgccatacagcttcactagagttctttgaaccacagctgaaaagagctttgtattattttttaattccctccccagatatcatttaggagtattatataaaggtggtgggcaaaaacaatgtaaggagcctttccagttatcttgagttgcagctctgtagtttcttgaggccaaacacactgtattttacaagtcaaaatataatttacattaatcactatgttaatgagtatgtaaaacattcttttgcattgatgaattttgtatctgcttccattaaaagcataacagcca

SEQ ID NO: 325841 - DNA, 3507 bp, Homo sapiens
agggcagtcaagggcttctggctgacccgagcggagatctcgcgagactgtcagacgtatggcgagaggtgtgggaggaagattgtgttgtcgcgagaactctgcctttgggccgtaggttagtgtggggccgtgtctcagtccacccaaggtctcctcggatcgcctggagaggcactcggacctggagcagtgaggagaatgaataccttccaagaccagagtggcagctccagtaatagagaaccccttttgaggtgtagtgatgcacggagggacttggagcttgctattggtggagttctccgggctgaacagcaaattaaagataacttgcgagaggtcaaagctcagattcacagttgcataagccgtcacctggaatgtcttagaagccgtgaggtatggctgtatgaacaggtggaccttatttatcagcttaaagaggagacacttcaacagcaggctcagcagctctactcgttattgggccagttcaattgtcttactcatcaactggagtgtacccaaactgggcagtttgacccttaagcctgaagattcaactgtcctgctctttgaagctgacacaattactctgcgccagaccatcaccacatttgggtctctcaaaaccattcaaattcctgagcacttgatggctcatgctagttcagcaaatattgggcccttcctggagaagagaggctgtatctccatgccagagcagaagtcagcatccggtattgtagctgtccctttcagcgaatggctccttggaagcaaacctgccagtggttatcaagctccttacatacccagcaccgacccccaggactggcttacccaaaagcagaccttggagaacagtcagacttcttccagagcctgcaatttcttcaataatgtcgggggaaacctaaagggcttagaaaactggctcctcaagagtgaaaaatcaagttatcaaaagtgtaacagccattccactactagttctttctccattgaaatggaaaaggttggagatcaagagcttcctgatcaagatgagatggacctatcagattggctagtgactccccaggaatcccataagctgcggaagcctgagaatggcagtcgtgaaaccagtgagaagtttaagctcttattccagtcctataatgtgaatgattggcttgtcaagactgactcctgtaccaactgtcagggaaaccagcccaaaggtgtggagattgaaaacctgggcaatctgaagtgcctgaatgaccacttggaggccaagaaaccattgtccacccccagcatggttacagaggattggcttgtccagaaccatcaggacccatgtaaggtagaggaggtgtgcagagccaatgagccctgcacaagctttgcagagtgtgtgtgtgatgagaattgtgagaaggaggctctgtataagtggcttctgaagaaagaaggaaaggataaaaatgggatgcctgtggaacccaaacctgagcctgagaagcataaagattccctgaatatgtggctctgtcctagaaaagaagtaatagaacaaactaaagcaccaaaggcaatgactccttctagaattgctgattccttccaagtcataaagaacagccccttgtcggagtggcttatcaggcccccatacaaagaaggaagtcccaaggaagtgcctggtactgaagacagagctggcaaacagaagtttaaaagccccatgaatacttcctggtgttcctttaacacagctgactgggtcctgccaggaaagaagatgggcaacctcagccagttatcttctggagaagacaagtggctgcttcgaaagaaggcccaggaagtattacttaattcacctctacaggaggaacataacttccccccagaccattatggcctccctgcagtttgtgatctctttgcctgtatgcagcttaaagttgataaagagaagtggttatatcgaactcctctacagatgtgaaggaatggacaagagttgagcagcctttctgctgattatcacacatcatgagctgagtgactgcagcttgccaaatctttgtgtttctgggtctgaccaattagcttagttcttctcctgcctaattttgaactagtaaagcaaagtgagtcatcagattatgagttactgtttaaaagaaaaatgctgtttattcatgctgaggtgattcagttccctccttcttacagaagtattttaattcaccccacactagaaatgcagcatctttgtggacgtctttttcacaagcctccaaggctccttagattgggtcgttactaaaagtacattaaaacactcttgtttatcgaagtatattgatgtattctaaagctagtaaacttccctaacgtttaattgccctacagatgcttctcttgctgtgggttttcttttgttagtggtctgaaataattattttcctgttctattaatacatagtgtattttgcacaaaaaaattaacctggtcaatagtgattaccaaaatatatattaataatcttggcaatttttgacattaattatgaaacattttagcccacgttagttctacattattcttcacttaaactcagctactgcaaattttgtctttctgtaaatgttattaaaatatccagtgagctctttagaaggactcagtattatttcaagactatttttgaggtaattctagccttttaaaatattctacagacctacggggcttaaaagaaccccagtaccgactaagcaaataggcaaaagacatgttggaaatgtagtatagtacttgaaacagtcactatcatagggataattggtgcatcctgtgtaaatggaagctgagcttgacacctggtgcttttaagtagggataaagtcatcctctcactgcaagcacagcatacctgtacctccaaaagtgacgttttagtgaacaggccgttttcaacacttgtgccttggggtgttcattgaagctttgtgaaaactactgatgttttctcagtctccttaaagttacgtccatgctttaaaatgtctgtgtaggagagaagtggggtttataatgttttctctaagatatctttgctgctttccagactttgaaactattaagcttcttaactgcctcttaccggaaatacttctggggaaacttcatggtcccaaaatgtcattgccatacagcttcactagagttctttgaaccacagctgaaaagagctttgtattattttttaattccctccccagatatcatttaggagtattatataaaggtggtgggcaaaaacaatgtaaggagcctttccagttatcttgagttgcagctctgtagtttcttgaggccaaacacactgtattttacaagtcaaaatataatttacattaatcactatgttaatgagtatgtaaaacattcttttgcattgatgaattttgtatctgcttccattaaaagcataacagcca

SEQ ID NO: 325842 - DNA, 3166 bp, Homo sapiens
ccttgagacctaatgccaaatagaaatttagatgtcttgtcggggctgattaacagaaaaagtaattatcaatcagttcacaggaaattatcattagctgtcttactgatactggttctctgtgagcgatcctctttataatttgtagagatgatttatttctaaaggaatggcaatgtgaataaaggtttctatatgttttagttgagaagagccctagagatcagctgtgtgtctcttgttttataattgtgaaaattgaggctcttggaaggcacatgatttgcccagggtcagtggccaagccaaggattagagagtgggctcttctctttttctgggtgaactttctactgcatttggacattccttgttttgtggattaacagaagtcagcatccggtattgtagctgtccctttcagcgaatggctccttggaagcaaacctgccagtggttatcaagctccttacatacccagcaccgacccccaggactggcttacccaaaagcagaccttggagaacagtcagacttcttccagagcctgcaatttcttcaataatgtcgggggaaacctaaagggcttagaaaactggctcctcaagagtgaaaaatcaagttatcaaaagtgtaacagccattccactactagttctttctccattgaaatggaaaaggttggagatcaagagcttcctgatcaagatgagatggacctatcagattggctagtgactccccaggaatcccataagctgcggaagcctgagaatggcagtcgtgaaaccagtgagaagtttaagctcttattccagtcctataatgtgaatgattggcttgtcaagactgactcctgtaccaactgtcagggaaaccagcccaaaggtgtggagattgaaaacctgggcaatctgaagtgcctgaatgaccacttggaggccaagaaaccattgtccacccccagcatggttacagaggattggcttgtccagaaccatcaggacccatgtaaggtagaggaggtgtgcagagccaatgagccctgcacaagctttgcagagtgtgtgtgtgatgagaattgtgagaaggaggctctgtataagtggcttctgaagaaagaaggaaaggataaaaatgggatgcctgtggaacccaaacctgagcctgagaagcataaagattccctgaatatgtggctctgtcctagaaaagaagtaatagaacaaactaaagcaccaaaggcaatgactccttctagaattgctgattccttccaagtcataaagaacagccccttgtcggagtggcttatcaggcccccatacaaagaaggaagtcccaaggaagtgcctggtactgaagacagagctggcaaacagaagtttaaaagccccatgaatacttcctggtgttcctttaacacagctgactgggtcctgccaggaaagaagatgggcaacctcagccagttatcttctggagaagacaagtggctgcttcgaaagaaggcccaggaagtattacttaattcacctctacaggaggaacataacttccccccagaccattatggcctccctgcagtttgtgatctctttgcctgtatgcagcttaaagttgataaagagaagtggttatatcgaactcctctacagatgtgaaggaatggacaagagttgagcagcctttctgctgattatcacacatcatgagctgagtgactgcagcttgccaaatctttgtgtttctgggtctgaccaattagcttagttcttctcctgcctaattttgaactagtaaagcaaagtgagtcatcagattatgagttactgtttaaaagaaaaatgctgtttattcatgctgaggtgattcagttccctccttcttacagaagtattttaattcaccccacactagaaatgcagcatctttgtggacgtctttttcacaagcctccaaggctccttagattgggtcgttactaaaagtacattaaaacactcttgtttatcgaagtatattgatgtattctaaagctagtaaacttccctaacgtttaattgccctacagatgcttctcttgctgtgggttttcttttgttagtggtctgaaataattattttcctgttctattaatacatagtgtattttgcacaaaaaaattaacctggtcaatagtgattaccaaaatatatattaataatcttggcaatttttgacattaattatgaaacattttagcccacgttagttctacattattcttcacttaaactcagctactgcaaattttgtctttctgtaaatgttattaaaatatccagtgagctctttagaaggactcagtattatttcaagactatttttgaggtaattctagccttttaaaatattctacagacctacggggcttaaaagaaccccagtaccgactaagcaaataggcaaaagacatgttggaaatgtagtatagtacttgaaacagtcactatcatagggataattggtgcatcctgtgtaaatggaagctgagcttgacacctggtgcttttaagtagggataaagtcatcctctcactgcaagcacagcatacctgtacctccaaaagtgacgttttagtgaacaggccgttttcaacacttgtgccttggggtgttcattgaagctttgtgaaaactactgatgttttctcagtctccttaaagttacgtccatgctttaaaatgtctgtgtaggagagaagtggggtttataatgttttctctaagatatctttgctgctttccagactttgaaactattaagcttcttaactgcctcttaccggaaatacttctggggaaacttcatggtcccaaaatgtcattgccatacagcttcactagagttctttgaaccacagctgaaaagagctttgtattattttttaattccctccccagatatcatttaggagtattatataaaggtggtgggcaaaaacaatgtaaggagcctttccagttatcttgagttgcagctctgtagtttcttgaggccaaacacactgtattttacaagtcaaaatataatttacattaatcactatgttaatgagtatgtaaaacattcttttgcattgatgaattttgtatctgcttccattaaaagcataacagcca

SEQ ID NO: 325843 - DNA, 2564 bp, Homo sapiens
agggcagtcaagggcttctggctgacccgagcggagatctcgcgagactgtcagacgtatggcgagaggtgtgggaggaagattgtgttgtcgcgagaactctgcctttgggccgtaggttagtgtggggccgtgtctcagtccacccaaggtctcctcggatcgcctggagaggcactcggacctggagcagtgaggagaatgaataccttccaagaccagagtggcagctccagtaatagagaaccccttttgaggtgtagtgatgcacggagggacttggagcttgctattggtggagttctccgggctgaacagcaaattaaagataacttgcgagaggtcaaagctcagattcacagttgcataagccgtcacctggaatgtcttagaagccgtgaggtatggctgtatgaacaggtggaccttatttatcagcttaaagaggagacacttcaacagcaggctcagcagctctactcgttattgggccagttcaattgtcttactcatcaactggagtgtacccaaaacaaagatctagccaatcaagtctctgtgtgcctggagagactgggcagtttgacccttaagcctgaagattcaactgtcctgctctttgaagctgacacaattactctgcgccagaccatcaccacatttgggtctctcaaaaccattcaaattcctgagcacttgatggctcatgctagttcagcaaatattgggcccttcctggagaagagaggctgtatctccatgccagagcagaagtcagcatccggtattgtagctgtccctttcagcgaatggctccttggaagcaaacctgccagtggttatcaagctccttacatacccagcaccgacccccaggactggcttacccaaaagcagaccttggagaacagtcaggaagtattacttaattcacctctacaggaggaacataacttccccccagaccattatggcctccctgcagtttgtgatctctttgcctgtatgcagcttaaagttgataaagagaagtggttatatcgaactcctctacagatgtgaaggaatggacaagagttgagcagcctttctgctgattatcacacatcatgagctgagtgactgcagcttgccaaatctttgtgtttctgggtctgaccaattagcttagttcttctcctgcctaattttgaactagtaaagcaaagtgagtcatcagattatgagttactgtttaaaagaaaaatgctgtttattcatgctgaggtgattcagttccctccttcttacagaagtattttaattcaccccacactagaaatgcagcatctttgtggacgtctttttcacaagcctccaaggctccttagattgggtcgttactaaaagtacattaaaacactcttgtttatcgaagtatattgatgtattctaaagctagtaaacttccctaacgtttaattgccctacagatgcttctcttgctgtgggttttcttttgttagtggtctgaaataattattttcctgttctattaatacatagtgtattttgcacaaaaaaattaacctggtcaatagtgattaccaaaatatatattaataatcttggcaatttttgacattaattatgaaacattttagcccacgttagttctacattattcttcacttaaactcagctactgcaaattttgtctttctgtaaatgttattaaaatatccagtgagctctttagaaggactcagtattatttcaagactatttttgaggtaattctagccttttaaaatattctacagacctacggggcttaaaagaaccccagtaccgactaagcaaataggcaaaagacatgttggaaatgtagtatagtacttgaaacagtcactatcatagggataattggtgcatcctgtgtaaatggaagctgagcttgacacctggtgcttttaagtagggataaagtcatcctctcactgcaagcacagcatacctgtacctccaaaagtgacgttttagtgaacaggccgttttcaacacttgtgccttggggtgttcattgaagctttgtgaaaactactgatgttttctcagtctccttaaagttacgtccatgctttaaaatgtctgtgtaggagagaagtggggtttataatgttttctctaagatatctttgctgctttccagactttgaaactattaagcttcttaactgcctcttaccggaaatacttctggggaaacttcatggtcccaaaatgtcattgccatacagcttcactagagttctttgaaccacagctgaaaagagctttgtattattttttaattccctccccagatatcatttaggagtattatataaaggtggtgggcaaaaacaatgtaaggagcctttccagttatcttgagttgcagctctgtagtttcttgaggccaaacacactgtattttacaagtcaaaatataatttacattaatcactatgttaatgagtatgtaaaacattcttttgcattgatgaattttgtatctgcttccattaaaagcataacagcca

SEQ ID NO: 325844 - DNA, 2142 bp, Homo sapiens
  misc_feature (28)..(28): n is a, c, g, or t
aactaaggctaggtacgaggctgggtgntgcctgaatgaccacttggaggccaagaaaccattgtccacccccagcatggttacagaggattggcttgtccagaaccatcaggacccatgtaaggtagaggaggtgtgcagagccaatgagccctgcacaagctttgcagagtgtgtgtgtgatgagaattgtgagaaggaggctctgtataagtggcttctgaagaaagaaggaaaggataaaaatgggatgcctgtggaacccaaacctgagcctgagaagcataaagattccctgaatatgtggctctgtcctagaaaagaagtaatagaacaaactaaagcaccaaaggcaatgactccttctagaattgctgattccttccaagtcataaagaacagccccttgtcggagtggcttatcaggcccccatacaaagaaggaagtcccaaggaagtgcctggtactgaagacagagctggcaaacagaaggaagtattacttaattcacctctacaggaggaacataacttccccccagaccattatggcctccctgcagtttgtgatctctttgcctgtatgcagcttaaagttgataaagagaagtggttatatcgaactcctctacagatgtgaaggaatggacaagagttgagcagcctttctgctgattatcacacatcatgagctgagtgactgcagcttgccaaatctttgtgtttctgggtctgaccaattagcttagttcttctcctgcctaattttgaactagtaaagcaaagtgagtcatcagattatgagttactgtttaaaagaaaaatgctgtttattcatgctgaggtgattcagttccctccttcttacagaagtattttaattcaccccacactagaaatgcagcatctttgtggacgtctttttcacaagcctccaaggctccttagattgggtcgttactaaaagtacattaaaacactcttgtttatcgaagtatattgatgtattctaaagctagtaaacttccctaacgtttaattgccctacagatgcttctcttgctgtgggttttcttttgttagtggtctgaaataattattttcctgttctattaatacatagtgtattttgcacaaaaaaattaacctggtcaatagtgattaccaaaatatatattaataatcttggcaatttttgacattaattatgaaacattttagcccacgttagttctacattattcttcacttaaactcagctactgcaaattttgtctttctgtaaatgttattaaaatatccagtgagctctttagaaggactcagtattatttcaagactatttttgaggtaattctagccttttaaaatattctacagacctacggggcttaaaagaaccccagtaccgactaagcaaataggcaaaagacatgttggaaatgtagtatagtacttgaaacagtcactatcatagggataattggtgcatcctgtgtaaatggaagctgagcttgacacctggtgcttttaagtagggataaagtcatcctctcactgcaagcacagcatacctgtacctccaaaagtgacgttttagtgaacaggccgttttcaacacttgtgccttggggtgttcattgaagctttgtgaaaactactgatgttttctcagtctccttaaagttacgtccatgctttaaaatgtctgtgtaggagagaagtggggtttataatgttttctctaagatatctttgctgctttccagactttgaaactattaagcttcttaactgcctcttaccggaaatacttctggggaaacttcatggtcccaaaatgtcattgccatacagcttcactagagttctttgaaccacagctgaaaagagctttgtattattttttaattccctccccagatatcatttaggagtattatataaaggtggtgggcaaaaacaatgtaaggagcctttccagttatcttgagttgcagctctgtagtttcttgaggccaaacacactgtattttacaagtcaaaatataatttacattaatcactatgttaatgagtatgtaaaacattcttttgcattgatgaattttgtatctgcttccattaaaagcataacagcca

SEQ ID NO: 325845 - DNA, 2113 bp, Homo sapiens
agggcagtcaagggcttctggctgacccgagcggagatctcgcgagactgtcagacgtatggcgagaggtgtgggaggaagattgtgttgtcgcgagaactctgcctttgggccgtaggttagtgtggggccgtgtctcagtccacccaaggtctcctcggatcgcctggagaggcactcggacctggagcagtgaggagaatgaataccttccaagaccagagtggcagctccagtaatagagaaccccttttgaggtgtagtgatgcacggagggacttggagcttgctattggtggagttctccgggctgaacagcaaattaaagataacttgcgagaggtcaaagctcagattcacagttgcataagccgtcacctggaatgtcttagaagccgtgaggtatggctgtatgaacaggtggaccttatttatcagcttaaagaggagacacttcaacagcaggctcagcagctctactcgttattgggccagttcaattgtcttactcatcaactggagtgtacccaaaacaaagatctagccaatcaagtctctgtgtgcctggagagactgggcagtttgacccttaagcctgaagattcaactgtcctgctctttgaagctgacacaattactctgcgccagaccatcaccacatttgggtctctcaaaaccattcaaattcctgagcacttgatggctcatgctagttcagcaaatattgggcccttcctggagaagagaggctgtatctccatgccagagcagaagtcagcatccggtattgtagctgtccctttcagcgaatggctccttggaagcaaacctgccagtggttatcaagctccttacatacccagcaccgacccccaggactggcttacccaaaagcagaccttggagaacagtcagacttcttccagagcctgcaatttcttcaataatgtcgggggaaacctaaagggcttagaaaactggctcctcaagagtgaaaaatcaagttatcaaaagtgtaacagccattccactactagttctttctccattgaaatggaaaaggttggagatcaagagcttcctgatcaagatgagatggacctatcagattggctagtgactccccaggaatcccataagctgcggaagcctgagaatggcagtcgtgaaaccagtgagaagtttaagctcttattccagtcctataatgtgaatgattggcttgtcaagactgactcctgtaccaactgtcagggaaaccagcccaaaggtgtggagattgaaaacctgggcaatctgaagtgcctgaatgaccacttggaggccaagaaaccattgtccacccccagcatggttacagaggattggcttgtccagaaccatcaggacccatgtaaggtagaggaggtgtgcagagccaatgagccctgcacaagctttgcagagtgtgtgtgtgatgagaattgtgagaaggaggctctgtataagtggcttctgaagaaagaaggaaaggataaaaatgggatgcctgtggaacccaaacctgagcctgagaagcataaagattccctgaatatgtggctctgtcctagaaaagaagtaatagaacaaactaaagcaccaaaggcaatgactccttctagaattgctgattccttccaagtcataaagaacagccccttgtcggagtggcttatcaggcccccatacaaagaaggaagtcccaaggaagtgcctggtactgaagacagagctggcaaacagaagtttaaaagccccatgaatacttcctggtgttcctttaacacagctgactgggtcctgccaggaaagaagatgggcaacctcagccagttatcttctggagaagacaagtggctgcttcgaaagaaggcccaggaagtattacttaattcacctctacaggaggaacataacttccccccagaccattatggcctccctgcagtttgtgatctctttgcctgtatgcagcttaaagttgataaagagaagtggttatatcgaactcctctacaggtgggtacatgccaccagcatgaaaattagattatagctatttataaaataaatgttttgtcttacatatgaa

SEQ ID NO: 325846 - DNA, 1220 bp, Homo sapiens
agggcagtcaagggcttctggctgacccgagcggagatctcgcgagactgtcagacgtatggcgagaggtgtgggaggaagattgtgttgtcgcgagaactctgcctttgggccgtaggttagtgtggggccgtgtctcagtccacccaaggtctcctcggatcgcctggagaggcactcggacctggagcagtgaggagaatgaataccttccaagaccagagtggcagctccagtaatagagaaccccttttgaggtgtagtgatgcacggagggacttggagcttgctattggtggagttctccgggctgaacagcaaattaaagataacttgcgagaggtcaaagctcagattcacagttgcataagccgtcacctggaatgtcttagaagccgtgaggtatggctgtatgaacaggtggaccttatttatcagcttaaagaggagacacttcaacagcaggctcagcagctctactcgttattgggccagttcaattgtcttactcatcaactggagtgtacccaaaacaaagatctagccaatcaagtctctgtgtgcctggagagactgggcagtttgacccttaagcctgaagattcaactgtcctgctctttgaagctgacacaattactctgcgccagaccatcaccacatttgggtctctcaaaaccattcaaattcctgagcacttgatggctcatgctagttcagcaaatattgggcccttcctggagaagagaggctgtatctccatgccagagcagaagtcagcatccggtattgtagctgtccctttcagcgaatggctccttggaagcaaacctgccagtggttatcaagctccttacatacccagcaccgacccccaggactggcttacccaaaagcagaccttggagaacagtcagacttcttccagagcctgcaatttcttcaataatgtcgggggaaacctaaagggcttagaaaactggctcctcaagagtgaaaaatcaagttatcaaaagtgtaacagccattccactactagttctttctccattgaaatggaaaagttatcttgagttgcagctctgtagtttcttgaggccaaacacactgtattttacaagtcaaaatataatttacattaatcactatgttaatgagtatgtaaaacattcttttgcattgatgaattttgtatctgcttccattaaaagcataacagcca

SEQ ID NO: 325847 - DNA, 1645 bp, Homo sapiens
agggcagtcaagggcttctggctgacccgagcggagatctcgcgagactgtcagacgtatggcgagaggtgtgggaggaagattgtgttgtcgcgagaactctgcctttgggccgtaggttagtgtggggccgtgtctcagtccacccaaggtctcctcggatcgcctggagaggcactcggacctggagcagtgaggagaatgaataccttccaagaccagagtggcagctccagtaatagagaaccccttttgaggtgtagtgatgcacggagggacttggagcttgctattggtggagttctccgggctgaacagcaaattaaagataacttgcgagaggtcaaagctcagattcacagttgcataagccgtcacctggaatgtcttagaagccgtgaggtatggctgtatgaacaggtggaccttatttatcagcttaaagaggagacacttcaacagcaggctcagcagctctactcgttattgggccagttcaattgtcttactcatcaactggagtgtacccaaaacaaagatctagccaatcaagtctctgtgtgcctggagagactgggcagtttgacccttaagcctgaagattcaactgtcctgctctttgaagctgacacaattactctgcgccagaccatcaccacatttgggtctctcaaaaccattcaaattcctgagcacttgatggctcatgctagttcagcaaatattgggcccttcctggagaagagaggctgtatctccatgccagagcagaagtcagcatccggtattgtagctgtccctttcagcgaatggctccttggaagcaaacctgccagtggttatcaagctccttacatacccagcaccgacccccaggactggcttacccaaaagcagaccttggagaacagtcaggtctgttgctgcttttattgtttcctacagtagacacagcagtaggtggagttagttactaatcagtagtactatgtgtcattgttaactttttggttgcagtctggaaacatatttattaatagtctcttcatcatagaaagtttagaaaataaggaactctttatcatagaaaattttaaaaataaagaattttatattaaaaaagcccacaaacccataatctcaacacaaagagaaaaacactgtaacaataaaagtgaagtatttatatacttcagttttctatacatacatattttaaaagaaccattctgtaagtcctgtttcggtaggtagattttttttttcaccaggataacattaacatatttctctgtcatttaatttcttctgtaaagtatttagtagtatataattgattggctgtaatttaaattcaagtttttctggatataaaaaaggattccctaaacatccaggagccaattatttgtgtgcattcttgattagttccttaggagtacatttatagaaattgcattcctagattataattctgcttacgctttaagactttggatacatattgccaatttggcttcccaggaagttgccaacagtttatagtctcaccagcagaatattcagggtacctgcttccctgaaacctaagagtaatagtcatttaggttttttgctctgaatttgacacaaaatagcaattttg

SEQ ID NO: 325848 - DNA, 6278 bp, Homo sapiens
cggcagggggagcggcggatcaggcgcggcctggaaggcgggcggccggcagccagaacggcttctgggacgccgactttcgcgcaggcggcggcggcggcggcggcgggtccctgagctggaagccggagagcaagccctggaggttcactctttcaagaagtcgtgtgctgaggtgtaatgctacacaagtcagaggaaggaagggtcctgaaacacatggcctgattgttggcaaaggcatcataagaagctggcatttatttctgttctaacctattactgtataactgtgaatagacactatgcatatttgttggtcagcaaaaccaagaaacaagagctatggcatttgaaaaagtctgtctgattccagggtgtttttcctgggtttcatcatcaggtacctcctccctttcatctcagcaagaatgtggcaccttttatcgtttgataaagattaaggacatgttctttggtcaacagccagaacttaaaatctgctggaatagggtcagagaccatttcagctgcagctgaggaaaatgaaatgttcattttatttggtgccttgtctggggagcacactaactcttctggaaacgtgtcagtgaaacagagatcgttttgtggaatagcaacccatggttatggcgagtgacccgacgtgatctggggggcaggctgcagaggactcatgacaggctataccatgctgcggaatgggggcgcggggaacggaggtcagacctgcatgctgcgctggtccaaccgcatccgcctcacgtggctcagcttcacgctctttgtcatcctggtcttcttcccgctcatcgcccactattacctcaccactctggatgaggctgatgaggcaggcaagcggatttttggtccccgggtggggaacgagctgtgcgaggtgaagcacgtgctggatctgtgccgcatccgggagtcggtgagtgaagagctcctgcagctggaggccaagcgccaagagctgaacagcgagatcgccaagctgaatctgaagatcgaagcctgtaagaagagcattgagaacgccaagcaggacctgctccagctcaagaatgtcatcagccagaccgagcattcctacaaggagctcatggcccagaaccagcccaagctgtccctgcccatccgactgctcccagagaaggacgatgccggcctccctcccccgaaggccactcggggctgccggctacacaactgctttgattattctcgttgccctctcacctctggcttcccggtctacgtctatgacagtgaccagtttgtctttggcagctacctggatcccttggtcaagcaggcttttcaggcgacagcacgagctaacgtttatgttacagaaaatgcagacatcgcctgcctttacgtgatactagtgggagagatgcaggagccggtggtgctgcggcctgctgagctggagaagcagttgtattccctgccacactggcggacggatggacacaaccatgtcatcatcaatctgtcacgtaagtcagatacacagaaccttctctataacgtcagtactggccgtgccatggtggcccagtccaccttctacactgtccagtacagacctggctttgacttggtcgtatcaccgctggtccatgccatgtctgagcccaacttcatggaaatcccaccacaggtgccggtgaagcggaaatatctcttcaccttccagggcgagaagattgagtctctgaggtctagccttcaggaggcccgctccttcgaagaggaaatggagggcgaccctcccgccgactacgatgaccggatcattgccaccctgaaggcggtgcaggacagcaagctggatcaggtcctggtggaattcacctgcaaaaaccagcccaaacccagcctgccaactgagtgggcactgtgtggagagcgggaggaccgcttggaattgctgaagctctccaccttcgccctcatcattacccccggggaccctcgcttggttatttcctctgggtgtgcaacacggctcttcgaagccctggaagtcggtgccgtcccggtggtgctgggggagcaggtccagcttccctaccaggacatgctgcagtggaacgaggcggccctggtggtgccaaagcctcgtgttaccgaggttcatttcctgctcagaagcctctccgatagtgacctcctggctatgaggcggcaaggccgctttctctgggagacttacttctccactgctgacagtatttttaataccgtgctggctatgattaggactcgcatccagatcccagccgctcccatccgggaagaggcggcagctgagatcccccaccgttcaggcaaggcggctggaactgaccccaacatggctgacaacggggacctggacctggggccagtggagacggagccgccctacgcctcacccagatacctccgcaatttcactctgactgtcactgacttttaccgcagctggaactgtgctccagggcctttccatcttttcccccacactccctttgaccctgtgttgccctcagaggccaaattcttgggctcagggactggctttcggcctattggtggtggagctgggggttctggcaaggaatttcaggcagcgcttggaggcaatgttccccgagagcagttcacggtggtgatgttgacttatgagcgggaggaagtgcttatgaactctttagagaggctgaatggcctcccttacctgaacaaggtcgtggtggtgtggaattctcccaagctgccatcagaggaccttctgtggcctgacattggcgtccccatcatggtggtccgtactgagaagaacagtttgaacaaccgattcttaccctggaatgaaattgagacagaggccatcctgtccattgatgacgatgctcacctccgccatgacgaaatcatgtttgggttccgggtgtggagagaagctcgggaccgcatcgtgggcttccctggccgttaccacgcatgggacatcccccatcagtcctggctctacaactccaactactcctgtgagctgtccatggtgctgacaggtgctgccttctttcacaagtattatgcctacctgtattcttatgtgatgccccaggccatccgggacatggtggatgaatacatcaactgtgaggacattgccatgaacttccttgtctcccacatcactcggaagccccccatcaaggtgacctcacggtggacattccgatgcccaggatgccctcaggccctgtctcatgatgactcccacttccacgagcggcacaagtgcatcaacttcttcgtgaaggtgtacggctacatgcccctcctgtacacgcagttcagggtggattctgtgctcttcaagacacgcctgccccatgacaagaccaagtgcttcaagttcatctaggggcagcgcacggtctggggaagaggatgagcagagggaggaagatggctcccaaggttcctaggcattgcaggaccttgggcacatctgctggtgggtggcccagagcctctgctggaaggggcagcaggaggagtggaaggaaaccgctgcctttatcttgaagtcagccacactgggcctggagccctgggcggagtccccggggttccccacacagggcactgactgatagcttacactgaggactgtggcgactctgcagagtcactcacaccgttcgtacgcccaggacagctggttcgtggtttttacattcaataacaactattatgattatttaaaaagagaaagtttcagatttgccattcaaggcttatttatatatatgtgtgtgtatataaatacatgcacacacttgcatacatatatatttttggctgggggagtgtgagttttgcctttctaagggagggaccgcgcaggctcctttgttctgtattctggcggagatgggtcctggccttgtgtcactggcttatccttaaagatcatctcccatcctccccagcgccatctgtgtgcagcaaccagaaagggatgaacttggccctcttgcgggcctggacaaggtctcttccttaccctttctgttgccagtcagcaacctgtaactcacattctcttcccagtgaatccctgggagcgcctgaccctggtgggctgttcagcttcctgctgctggggccagcgatttttgaggatttatctttaggccaggcttgcctccgtacttatccctgctctcccatttctctcttgtttgagagagaatgaggaagcaaagagtgagaaagaataggggctgaagacgccactcccagatggctctttctatcctgctcttctgttgaaacacacgtgctgtgggcctcaggcgtttctgaagtgctctttcttggattggacaggagatcagcagcgtgcacatctgctgtggtctgaagtggtttgcaggtcagcctcctctccctagtgtagagcaagccagtgtccttcgaggaacccacccggctggccgggaagttttacagcaaggcgcctgccttgggataattccttggtgaaattcaccttccccccgcctctgtctggagccccatcctgtgttatctgtggtttttggacccctaatgtcagcttggctgtaggactccccgaggtttggtatgtgctagaacaatgggaggctgtgatttgctgtgtaagctcacatccagccttggaatctaacgggcattcacaacccgagttaccactttccactccctgcttaggattctgttccctgggctgaaactgaaataagctaattttttgggtcacggtggcagtaggggaacctaggagggtgtgagtggcatttgtcagggatttagcccatgacgtgtttcttgaaccctactttctggaagtggagttgactctggaagttttctagcaactgaacaaaagctcaggtttgtcctggtcatgcacatgccttaagccagttccgtcttccctagaccttggcatcctgtgcttctatttcttggaatacgttctcctctgacctgcctgtaccacgtgggtcctcttcaagtactgttttgaagctgggctcttttgtgtagctcccacccacctgtagggctagctcggcttaagggaactctccccattggcaaaccggacccggccgccgccaggactgtgtttccaaaggttccccgcccccaaccccagcatcagcctgtagctcccctgctgaggcagtgtggttatgttcccagcagtgggggtcagacgcccttcctcagaactttctagttgccctctacctgactcctgacttgtattccttttagcagtagccttcttccctcggggagccaaagagtgtggtgtgtggcgctatattgtggctgctatttcatctggtttcttttaatgtgaggaactcacatactgacttcagtgggactcggtgagccggggccgtctgtgtggtgggaccccctttagcgggactcagtgagctggggccgtctgtgtggtggagccagggcctctccctttagtggagccaggttgtcgggccccgaatgtcactggtggatctaagaagggctgagtggtctgacaccaaaacatgccgcagggagggctgtggtgccggtgcttccaacaaggacagccctccttgaccctgaaaggaacactggcttgaaggactgcagacaggctctgaggggcacgccctcctcagcgagaggcagcaaggtggccacagtgtcactggtcaggtgcttctcaccacgggaaagccgccgacctgtgactcgcttgagatgggaaagcggcgccacagaccccgggtctccttggctgtctgtgggccgcccctggccaccttgtcctggctcgcagggtgcaggagcgcctcgttctctgggtggccggcttgctgctccggtttgggctgtcttaccataacaccgtcccagggctctgcaggccactgtgagcgctggctccctgggcagtgctcctccgtgtggactgtgcctcaggccagggctcaccagctggggtcctgtccggaaggatgggatctttctgggagctgcgccggacagagtggggagctcctagtttgtggggggaagctttgatatccatgccacgtccatccaccccaccccttttcgtcacgagcacaatggtcttacattggatttttgtaaaaaaataaaaataaatggagactttaactcaa

SEQ ID NO: 325849 - DNA, 6040 bp, Homo sapiens
cggcagggggagcggcggatcaggcgcggcctggaaggcgggcggccggcagccagaacggcttctgggacgccgactttcgcgcaggcggcggcggcggcggcggcgggtccctgagctggaagccggagagcaagccctggaggttcactctttcaagaagtcgtgtgctgaggtgtaatgctacacaagtcagaggaaggaagggtcctgaaacacatggcctgattgttggcaaaggcatcataagaagctggcatttatttctgttctaacctattactgtataactgtgaatagacactatgcatatttgttggtcagcaaaaccaagaaacaagagctatggcatttgaaaaagtctgtctgattccagggtgtttttcctgggtttcatcatcaggtacctcctccctttcatctcagcaagaatgtggcaccttttatcgtttgataaagattaaggacatgttctttggtcaacagccagaacttaaaatctgctggaatagggtcagagaccatttcagctgcagctgaggaaaatgaaatgttcattttatttggtgccttgtctggggagcacactaactcttctggaaacgtgtcagtgaaacagagatcgttttgtggaatagcaacccatggttatggcgagtgacccgacgtgatctggggggcaggctgcagaggactcatgacaggctataccatgctgcggaatgggggcgcggggaacggaggtcagacctgcatgctgcgctggtccaaccgcatccgcctcacgtggctcagcttcacgctctttgtcatcctggtcttcttcccgctcatcgcccactattacctcaccactctggatgaggctgatgaggcaggcaagcggatttttggtccccgggtggggaacgagctgtgcgaggtgaagcacgtgctggatctgtgccgcatccgggagtcggtgagtgaagagctcctgcagctggaggccaagcgccaagagctgaacagcgagatcgccaagctgaatctgaagatcgaagcctgtaagaagagcattgagaacgccaagcaggacctgctccagctcaagaatgtcatcagccagaccgagcattcctacaaggagctcatggcccagaaccagcccaagctgtccctgcccatccgactgctcccagagaaggacgatgccggcctccctcccccgaaggccactcggggctgccggctacacaactgctttgattattctcgttgccctctcacctctggcttcccggtctacgtctatgacagtgaccagtttgtctttggcagctacctggatcccttggtcaagcaggcttttcaggcgacagcacgagctaacgtttatgttacagaaaatgcagacatcgcctgcctttacgtgatactagtgggagagatgcaggagccggtggtgctgcggcctgctgagctggagaagcagttgtattccctgccacactggcggacggatggacacaaccatgtcatcatcaatctgtcacgtaagtcagatacacagaaccttctctataacgtcagtactggccgtgccatggtggcccagtccaccttctacactgtccagtacagacctggctttgacttggtcgtatcaccgctggtccatgccatgtctgagcccaacttcatggaaatcccaccacaggtgccggtgaagcggaaatatctcttcaccttccagggcgagaagattgagtctctgaggtctagccttcaggaggcccgctccttcgaagaggaaatggagggcgaccctcccgccgactacgatgaccggatcattgccaccctgaaggcggtgcaggacagcaagctggatcaggtcctggtggaattcacctgcaaaaaccagcccaaacccagcctgccaactgagtgggcactgtgtggagagcgggaggaccgcttggaattgctgaagctctccaccttcgccctcatcattacccccggggaccctcgcttggttatttcctctgggtgtgcaacacggctcttcgaagccctggaagtcggtgccgtcccggtggtgctgggggagcaggtccagcttccctaccaggacatgctgcagtggaacgaggcggccctggtggtgccaaagcctcgtgttaccgaggttcatttcctgctcagaagcctctccgatagtgacctcctggctatgaggcggcaaggccgctttctctgggagacttacttctccactgctgacagtatttttaataccgtgctggctatgattaggactcgcatccagatcccagccgctcccatccgggaagaggcggcagctgagatcccccaccgttcaggcaaggcggctggaactgaccccaacatggctgacaacggggacctggacctggggccagtggagacggagccgccctacgcctcacccagatacctccgcaatttcactctgactgtcactgacttttaccgcagctggaactgtgctccagggcctttccatcttttcccccacactccctttgaccctgtgttgccctcagaggccaaattcttgggctcagggactggctttcggcctattggtggtggagctgggggttctggcaaggaatttcaggcagcgcttggaggcaatgttccccgagagcagttcacggtggtgatgttgacttatgagcgggaggaagtgcttatgaactctttagagaggctgaatggcctcccttacctgaacaaggtcgtggtggtgtggaattctcccaagctgccatcagaggaccttctgtggcctgacattggcgtccccatcatggtggtccgtactgagaagaacagtttgaacaaccgattcttaccctggaatgaaattgagacagaggccatcctgtccattgatgacgatgctcacctccgccatgacgaaatcatgtttgggttccgggtgtggagagaagctcgggaccgcatcgtgggcttccctggccgttaccacgcatgggacatcccccatcagtcctggctctacaactccaactactcctgtgagctgtccatggtgctgacaggtgctgccttctttcacaagtattatgcctacctgtattcttatgtgatgccccaggccatccgggacatggtggatgaatacatcaactgtgaggacattgccatgaacttccttgtctcccacatcactcggaagccccccatcaaggtgacctcacggtggacattccgatgcccaggatgccctcaggccctgtctcatgatgactcccacttccacgagcggcacaagtgcatcaacttcttcgtgaaggtgtacggctacatgcccctcctgtacacgcagttcagggtggattctgtgctcttcaagacacgcctgccccatgacaagaccaagtgcttcaagttcatctaggggcagcgcacggtctggggaagaggatgagcagagggaggaagatggctcccaaggttcctaggcattgcaggaccttgggcacatctgctggtgggtggcccagagcctctgctggaaggggcagcaggaggagtggaaggaaaccgctgcctttatcttgaagtcagccacactgggcctggagccctgggcggagtccccggggttccccacacagggcactgactgatagcttacactgaggactgtggcgactctgcagagtcactcacaccgttcgtacgcccaggacagctggttcgtggtttttacattcaataacaactattatgattatttaaaaagagaaagtttcagatttgccattcaaggcttatttatatatatgtgtgtgtatataaatacatgcacacacttgcatacatatatatttttggctgggggagtgtgagttttgcctttctaagggagggaccgcgcaggctcctttgttctgtattctggcggagatgggtcctggccttgtgtcactggcttatccttaaagatcatctcccatcctccccagcgccatctgtgtgcagcaaccagaaagggatgaacttggccctcttgcgggcctggacaaggtctcttccttaccctttctgttgccagtcagcaacctgtaactcacattctcttcccagtgaatccctgggagcgcctgaccctggtgggctgttcagcttcctgctgctggggccagcgatttttgaggatttatctttaggccaggcttgcctccgtacttattgtagagcaagccagtgtccttcgaggaacccacccggctggccgggaagttttacagcaaggcgcctgccttgggataattccttggtgaaattcaccttccccccgcctctgtctggagccccatcctgtgttatctgtggtttttggacccctaatgtcagcttggctgtaggactccccgaggtttggtatgtgctagaacaatgggaggctgtgatttgctgtgtaagctcacatccagccttggaatctaacgggcattcacaacccgagttaccactttccactccctgcttaggattctgttccctgggctgaaactgaaataagctaattttttgggtcacggtggcagtaggggaacctaggagggtgtgagtggcatttgtcagggatttagcccatgacgtgtttcttgaaccctactttctggaagtggagttgactctggaagttttctagcaactgaacaaaagctcaggtttgtcctggtcatgcacatgccttaagccagttccgtcttccctagaccttggcatcctgtgcttctatttcttggaatacgttctcctctgacctgcctgtaccacgtgggtcctcttcaagtactgttttgaagctgggctcttttgtgtagctcccacccacctgtagggctagctcggcttaagggaactctccccattggcaaaccggacccggccgccgccaggactgtgtttccaaaggttccccgcccccaaccccagcatcagcctgtagctcccctgctgaggcagtgtggttatgttcccagcagtgggggtcagacgcccttcctcagaactttctagttgccctctacctgactcctgacttgtattccttttagcagtagccttcttccctcggggagccaaagagtgtggtgtgtggcgctatattgtggctgctatttcatctggtttcttttaatgtgaggaactcacatactgacttcagtgggactcggtgagccggggccgtctgtgtggtgggaccccctttagcgggactcagtgagctggggccgtctgtgtggtggagccagggcctctccctttagtggagccaggttgtcgggccccgaatgtcactggtggatctaagaagggctgagtggtctgacaccaaaacatgccgcagggagggctgtggtgccggtgcttccaacaaggacagccctccttgaccctgaaaggaacactggcttgaaggactgcagacaggctctgaggggcacgccctcctcagcgagaggcagcaaggtggccacagtgtcactggtcaggtgcttctcaccacgggaaagccgccgacctgtgactcgcttgagatgggaaagcggcgccacagaccccgggtctccttggctgtctgtgggccgcccctggccaccttgtcctggctcgcagggtgcaggagcgcctcgttctctgggtggccggcttgctgctccggtttgggctgtcttaccataacaccgtcccagggctctgcaggccactgtgagcgctggctccctgggcagtgctcctccgtgtggactgtgcctcaggccagggctcaccagctggggtcctgtccggaaggatgggatctttctgggagctgcgccggacagagtggggagctcctagtttgtggggggaagctttgatatccatgccacgtccatccaccccaccccttttcgtcacgagcacaatggtcttacattggatttttgtaaaaaaataaaaataaatggagactttaactcaa

SEQ ID NO: 325850 - DNA, 6149 bp, Homo sapiens
cggcagggggagcggcggatcaggcgcggcctggaaggcgggcggccggcagccagaacggcttctgggacgccgactttcgcgcaggcggcggcggcggcggcggcgggtccctgagctggaagccggagagcaagccctggaggttcactctttcaagaagtcgtgtgctgaggtgtaatgctacacaagtcagaggaaggaagggtcctgaaacacatggcctgattgttggcaaaggcatcataagaagctggcatttatttctgttctaacctattactgtataactgtgaatagacactatgcatatttgttggtcagcaaaaccaagaaacaagagctatggcatttgaaaaagtctgtctgattccagggtgtttttcctgggtttcatcatcaggtacctcctccctttcatctcagcaagaatgtggcaccttttatcgtttgataaagattaaggacatgttctttggtcaacagccagaacttaaaatctgctggaatagggtcagagaccatttcagctgcagctgaggaaaatgaaatgttcattttatttggtgccttgtctggggagcacactaactcttctggaaacgtgtcagtgaaacagagatcgttttgtggaatagcaacccatggttatggcgagtgacccgacgtgatctggggggcaggctgcagaggactcatgacaggctataccatgctgcggaatgggggcgcggggaacggaggtcagacctgcatgctgcgctggtccaaccgcatccgcctcacgtggctcagcttcacgctctttgtcatcctggtcttcttcccgctcatcgcccactattacctcaccactctggatgaggctgatgaggcaggcaagcggatttttggtccccgggtggggaacgagctgtgcgaggtgaagcacgtgctggatctgtgccgcatccgggagtcggtgagtgaagagctcctgcagctggaggccaagcgccaagagctgaacagcgagatcgccaagctgaatctgaagatcgaagcctgtaagaagagcattgagaacgccaagcaggacctgctccagctcaagaatgtcatcagccagaccgagcattcctacaaggagctcatggcccagaaccagcccaagctgtccctgcccatccgactgctcccagagaaggacgatgccggcctccctcccccgaaggccactcggggctgccggctacacaactgctttgattattctcgttgccctctcacctctggcttcccggtctacgtctatgacagtgaccagtttgtctttggcagctacctggatcccttggtcaagcaggcttttcaggcgacagcacgagctaacgtttatgttacagaaaatgcagacatcgcctgcctttacgtgatactagtgggagagatgcaggagccggtggtgctgcggcctgctgagctggagaagcagttgtattccctgccacactggcggacggatggacacaaccatgtcatcatcaatctgtcacgtaagtcagatacacagaaccttctctataacgtcagtactggccgtgccatggtggcccagtccaccttctacactgtccagtacagacctggctttgacttggtcgtatcaccgctggtccatgccatgtctgagcccaacttcatggaaatcccaccacaggtgccggtgaagcggaaatatctcttcaccttccagggcgagaagattgagtctctgaggtctagccttcaggaggcccgctccttcgaagaggaaatggagggcgaccctcccgccgactacgatgaccggatcattgccaccctgaaggcggtgcaggacagcaagctggatcaggtcctggtggaattcacctgcaaaaaccagcccaaacccagcctgccaactgagtgggcactgtgtggagagcgggaggaccgcttggaattgctgaagctctccaccttcgccctcatcattacccccggggaccctcgcttggttatttcctctgggtgtgcaacacggctcttcgaagccctggaagtcggtgccgtcccggtggtgctgggggagcaggtccagcttccctaccaggacatgctgcagtggaacgaggcggccctggtggtgccaaagcctcgtgttaccgaggttcatttcctgctcagaagcctctccgatagtgacctcctggctatgaggcggcaaggccgctttctctgggagacttacttctccactgctgacagtatttttaataccgtgctggctatgattaggactcgcatccagatcccagccgctcccatccgggaagaggcggcagctgagatcccccaccgttcaggcaaggcggctggaactgaccccaacatggctgacaacggggacctggacctggggccagtggagacggagccgccctacgcctcacccagatacctccgcaatttcactctgactgtcactgacttttaccgcagctggaactgtgctccagggcctttccatcttttcccccacactccctttgaccctgtgttgccctcagaggccaaattcttgggctcagggactggctttcggcctattggtggtggagctgggggttctggcaaggaatttcaggcagcgcttggaggcaatgttccccgagagcagttcacggtggtgatgttgacttatgagcgggaggaagtgcttatgaactctttagagaggctgaatggcctcccttacctgaacaaggtcgtggtggtgtggaattctcccaagctgccatcagaggaccttctgtggcctgacattggcgtccccatcatggtggtccgtactgagaagaacagtttgaacaaccgattcttaccctggaatgaaattgagacagaggccatcctgtccattgatgacgatgctcacctccgccatgacgaaatcatgtttgggttccgggtgtggagagaagctcgggaccgcatcgtgggcttccctggccgttaccacgcatgggacatcccccatcagtcctggctctacaactccaactactcctgtgagctgtccatggtgctgacaggtgctgccttctttcacaaggtgacctcacggtggacattccgatgcccaggatgccctcaggccctgtctcatgatgactcccacttccacgagcggcacaagtgcatcaacttcttcgtgaaggtgtacggctacatgcccctcctgtacacgcagttcagggtggattctgtgctcttcaagacacgcctgccccatgacaagaccaagtgcttcaagttcatctaggggcagcgcacggtctggggaagaggatgagcagagggaggaagatggctcccaaggttcctaggcattgcaggaccttgggcacatctgctggtgggtggcccagagcctctgctggaaggggcagcaggaggagtggaaggaaaccgctgcctttatcttgaagtcagccacactgggcctggagccctgggcggagtccccggggttccccacacagggcactgactgatagcttacactgaggactgtggcgactctgcagagtcactcacaccgttcgtacgcccaggacagctggttcgtggtttttacattcaataacaactattatgattatttaaaaagagaaagtttcagatttgccattcaaggcttatttatatatatgtgtgtgtatataaatacatgcacacacttgcatacatatatatttttggctgggggagtgtgagttttgcctttctaagggagggaccgcgcaggctcctttgttctgtattctggcggagatgggtcctggccttgtgtcactggcttatccttaaagatcatctcccatcctccccagcgccatctgtgtgcagcaaccagaaagggatgaacttggccctcttgcgggcctggacaaggtctcttccttaccctttctgttgccagtcagcaacctgtaactcacattctcttcccagtgaatccctgggagcgcctgaccctggtgggctgttcagcttcctgctgctggggccagcgatttttgaggatttatctttaggccaggcttgcctccgtacttatccctgctctcccatttctctcttgtttgagagagaatgaggaagcaaagagtgagaaagaataggggctgaagacgccactcccagatggctctttctatcctgctcttctgttgaaacacacgtgctgtgggcctcaggcgtttctgaagtgctctttcttggattggacaggagatcagcagcgtgcacatctgctgtggtctgaagtggtttgcaggtcagcctcctctccctagtgtagagcaagccagtgtccttcgaggaacccacccggctggccgggaagttttacagcaaggcgcctgccttgggataattccttggtgaaattcaccttccccccgcctctgtctggagccccatcctgtgttatctgtggtttttggacccctaatgtcagcttggctgtaggactccccgaggtttggtatgtgctagaacaatgggaggctgtgatttgctgtgtaagctcacatccagccttggaatctaacgggcattcacaacccgagttaccactttccactccctgcttaggattctgttccctgggctgaaactgaaataagctaattttttgggtcacggtggcagtaggggaacctaggagggtgtgagtggcatttgtcagggatttagcccatgacgtgtttcttgaaccctactttctggaagtggagttgactctggaagttttctagcaactgaacaaaagctcaggtttgtcctggtcatgcacatgccttaagccagttccgtcttccctagaccttggcatcctgtgcttctatttcttggaatacgttctcctctgacctgcctgtaccacgtgggtcctcttcaagtactgttttgaagctgggctcttttgtgtagctcccacccacctgtagggctagctcggcttaagggaactctccccattggcaaaccggacccggccgccgccaggactgtgtttccaaaggttccccgcccccaaccccagcatcagcctgtagctcccctgctgaggcagtgtggttatgttcccagcagtgggggtcagacgcccttcctcagaactttctagttgccctctacctgactcctgacttgtattccttttagcagtagccttcttccctcggggagccaaagagtgtggtgtgtggcgctatattgtggctgctatttcatctggtttcttttaatgtgaggaactcacatactgacttcagtgggactcggtgagccggggccgtctgtgtggtgggaccccctttagcgggactcagtgagctggggccgtctgtgtggtggagccagggcctctccctttagtggagccaggttgtcgggccccgaatgtcactggtggatctaagaagggctgagtggtctgacaccaaaacatgccgcagggagggctgtggtgccggtgcttccaacaaggacagccctccttgaccctgaaaggaacactggcttgaaggactgcagacaggctctgaggggcacgccctcctcagcgagaggcagcaaggtggccacagtgtcactggtcaggtgcttctcaccacgggaaagccgccgacctgtgactcgcttgagatgggaaagcggcgccacagaccccgggtctccttggctgtctgtgggccgcccctggccaccttgtcctggctcgcagggtgcaggagcgcctcgttctctgggtggccggcttgctgctccggtttgggctgtcttaccataacaccgtcccagggctctgcaggccactgtgagcgctggctccctgggcagtgctcctccgtgtggactgtgcctcaggccagggctcaccagctggggtcctgtccggaaggatgggatctttctgggagctgcgccggacagagtggggagctcctagtttgtggggggaagctttgatatccatgccacgtccatccaccccaccccttttcgtcacgagcacaatggtcttacattggatttttgtaaaaaaataaaaataaatggagactttaactcaa

SEQ ID NO: 325851 - DNA, 4804 bp, Homo sapiens
cggcagggggagcggcggatcaggcgcggcctggaaggcgggcggccggcagccagaacggcttctgggacgccgactttcgcgcaggcggcggcggcggcggcggcgggtccctgagctggaagccggagagcaagccctggaggttcactctttcaagaagtcgtgtgctgaggtgtaatgctacacaagtcagaggaaggaagggtcctgaaacacatggcctgattgttggcaaaggcatcataagaagctggcatttatttctgttctaacctattactgtataactgtgaatagacactatgcatatttgttggtcagcaaaaccaagaaacaagagctatggcatttgaaaaagtctgtctgattccagggtgtttttcctgggtttcatcatcaggtacctcctccctttcatctcagcaagaatgtggcaccttttatcgtttgataaagattaaggacatgttctttggtcaacagccagaacttaaaatctgctggaatagggtcagagaccatttcagctgcagctgaggaaaatgaaatgttcattttatttggtgccttgtctggggagcacactaactcttctggaaacgtgtcagtgaaacagagatcgttttgtggaatagcaacccatggttatggcgagtgacccgacgtgatctggggggcaggctgcagaggactcatgacaggctataccatgctgcggaatgggggcgcggggaacggaggtcagacctgcatgctgcgctggtccaaccgcatccgcctcacgtggctcagcttcacgctctttgtcatcctggtcttcttcccgctcatcgcccactattacctcaccactctggatgaggctgatgaggcaggcaagcggatttttggtccccgggtggggaacgagctgtgcgaggtgaagcacgtgctggatctgtgccgcatccgggagtcggtgagtgaagagctcctgcagctggaggccaagcgccaagagctgaacagcgagatcgccaagctgaatctgaagatcgaagcctgtaagaagagcattgagaacgccaagcaggacctgctccagctcaagaatgtcatcagccagaccgagcattcctacaaggagctcatggcccagaaccagcccaagctgtccctgcccatccgactgctcccagagaaggacgatgccggcctccctcccccgaaggccactcggggctgccggctacacaactgctttgattattctcgttgccctctcacctctggcttcccggtctacgtctatgacagtgaccagtttgtctttggcagctacctggatcccttggtcaagcaggcttttcaggcgacagcacgagctaacgtttatgttacagaaaatgcagacatcgcctgcctttacgtgatactagtgggagagatgcaggagccggtggtgctgcggcctgctgagctggagaagcagttgtattccctgccacactggcggacggatggacacaaccatgtcatcatcaatctgtcacgtaagtcagatacacagaaccttctctataacgtcagtactggccgtgccatggtggcccagtccaccttctacactgtccagtacagacctggctttgacttggtcgtatcaccgctggtccatgccatgtctgagcccaacttcatggaaatcccaccacaggtgccggtgaagcggaaatatctcttcaccttccagggcgagaagattgagtctctgaggtctagccttcaggaggcccgctccttcgaagaggaaatggagggcgaccctcccgccgactacgatgaccggatcattgccaccctgaaggcggtgcaggacagcaagctggatcaggtcctggtggaattcacctgcaaaaaccagcccaaacccagcctgccaactgagtgggcactgtgtggagagcgggaggaccgcttggaattgctgaagctctccaccttcgccctcatcattacccccggggaccctcgcttggttatttcctctgggtgtgcaacacggctcttcgaagccctggaagtcggtgccgtcccggtggtgctgggggagcaggtccagcttccctaccaggacatgctgcagtggaacgaggcggccctggtggtgccaaagcctcgtgttaccgaggttcatttcctgctcagaagcctctccgatagtgacctcctggctatgaggcggcaaggccgctttctctgggagacttacttctccactgctgacagtatttttaataccgtgctggctatgattaggactcgcatccagatcccagccgctcccatccgggaagaggcggcagctgagatcccccaccgttcaggcaaggcggctggaactgaccccaacatggctgacaacggggacctggacctggggccagtggagacggagccgccctacgcctcacccagatacctccgcaatttcactctgactgtcactgacttttaccgcagctggaactgtgctccagggcctttccatcttttcccccacactccctttgaccctgtgttgccctcagaggccaaattcttgggctcagggactggctttcggcctattggtggtggagctgggggttctggcaaggaatttcaggcagcgcttggaggcaatgttccccgagagcagttcacggtggtgatgttgacttatgagcgggaggaagtgcttatgaactctttagagaggctgaatggcctcccttacctgaacaaggtcgtggtggtgtggaattctcccaagctgccatcagaggaccttctgtggcctgacattggcgtccccatcatggtggtccgtactgagaagaacagtttgaacaaccgattcttaccctggaatgaaattgagacagaggccatcctgtccattgatgacgatgctcacctccgccatgacgaaatcatgtttgggttccgggtgtggagagaagctcgggaccgcatcgtgggcttccctggccgttaccacgcatgggacatcccccatcagtcctggctctacaactccaactactcctgtgagctgtccatggtgctgacaggtgctgccttctttcacaagtattatgcctacctgtattcttatgtgatgccccaggccatccgggacatggtggatgaatacatcaactgtgaggacattgccatgaacttccttgtctcccacatcactcggaagccccccatcaaggtgacctcacggtggacattccgatgcccaggatgccctcaggccctgtctcatgatgactcccacttccacgagcggcacaagtgcatcaacttcttcgtgaaggtgtacggctacatgcccctcctgtacacgcagttcagggtggattctgtgctcttcaagacacgcctgccccatgacaagaccaagtgcttcaagttcatctaggggcagcgcacggtctggggaagaggatgagcagagggaggaagatggctcccaaggttcctaggcattgcaggaccttgggcacatctgctggtgggtggcccagagcctctgctggaaggggcagcaggaggagtggaaggaaaccgctgcctttatcttgaagtcagccacactgggcctggagccctgggcggagtccccggggttccccacacagggcactgactgatagcttacactgaggactgtggcgactctgcagagtcactcacaccgttcgtacgcccaggacagctggttcgtggtttttacattcaataacaactattatgattatttaaaaagagaaagtttcagatttgccattcaaggcttatttatatatatgtgtgtgtatataaatacatgcacacacttgcatacatatatatttttggctgggggagtgtgagttttgcctttctaagggagggaccgcgcaggctcctttgttctgtattctggcggagatgggtcctggccttgtgtcactggcttatccttaaagatcatctcccatcctccccagcgccatctgtgtgcagcaaccagaaagggatgaacttggccctcttgcgggcctggacaaggtctcttccttaccctttctgttgccagtcagcaacctgtaactcacattctcttcccagtgaatccctgggagcgcctgaccctggtgggctgttcagcttcctgctgctggggccagcgatttttgaggatttatctttaggccaggcttgcctccgtacttatccctgctctcccatttctctcttgtttgagagagaatgaggaagcaaagagtgagaaagaataggggctgaagacgccactcccagatggctctttctatcctgctcttctgttgaaacacacgtgctgtgggcctcaggcgtttctgaagtgctctttcttggattggacaggagatcagcagcgtgcacatctgctgtggtctgaagtggtttgcaggtcagcctcctctccctagtgtagagcaagccagtgtccttcgaggaacccacccggctggccgggaagttttacagcaaggcgcctgccttgggataattccttggtgaaattcaccttccccccgcctctgtctggagccccatcctgtccggaaggatgggatctttctgggagctgcgccggacagagtggggagctcctagtttgtggggggaagctttgatatccatgccacgtccatccaccccaccccttttcgtcacgagcacaatggtcttacattggatttttgtaaaaaaataaaaataaatggagactttaactcaa

SEQ ID NO: 325852 - DNA, 1731 bp, Homo sapiens
cggcagggggagcggcggatcaggcgcggcctggaaggcgggcggccggcagccagaacggcttctgggacgccgactttcgcgcaggcggcggcggcggcggcggcgggtccctgagctggaagccggagagcaagccctggaggttcactctttcaagaagtcgtgtgctgaggtgtaatgctacacaagtcagaggaaggaagggtcctgaaacacatggcctgattgttggcaaaggcatcataagaagctggcatttatttctgttctaacctattactgtataactgtgaatagacactatgcatatttgttggtcagcaaaaccaagaaacaagagctatggcatttgaaaaagtctgtctgattccagggtgtttttcctgggtttcatcatcaggtacctcctccctttcatctcagcaagaatgtggcaccttttatcgtttgataaagattaaggacatgttctttggtcaacagccagaacttaaaatctgctggaatagggtcagagaccatttcagctgcagctgaggaaaatgaaatgttcattttatttggtgccttgtctggggagcacactaactcttctggaaacgtgtcagtgaaacagagatcgttttgtggaatagcaacccatggttatggcgagtgacccgacgtgatctggggggcaggctgcagaggactcatgacagcctgtagctcccctgctgaggcagtgtggttatgttcccagcagtgggggtcagacgcccttcctcagaactttctagttgccctctacctgactcctgacttgtattccttttagcagtagccttcttccctcggggagccaaagagtgtggtgtgtggcgctatattgtggctgctatttcatctggtttcttttaatgtgaggaactcacatactgacttcagtgggactcggtgagccggggccgtctgtgtggtgggaccccctttagcgggactcagtgagctggggccgtctgtgtggtggagccagggcctctccctttagtggagccaggttgtcgggccccgaatgtcactggtggatctaagaagggctgagtggtctgacaccaaaacatgccgcagggagggctgtggtgccggtgcttccaacaaggacagccctccttgaccctgaaaggaacactggcttgaaggactgcagacaggctctgaggggcacgccctcctcagcgagaggcagcaaggtggccacagtgtcactggtcaggtgcttctcaccacgggaaagccgccgacctgtgactcgcttgagatgggaaagcggcgccacagaccccgggtctccttggctgtctgtgggccgcccctggccaccttgtcctggctcgcagggtgcaggagcgcctcgttctctgggtggccggcttgctgctccggtttgggctgtcttaccataacaccgtcccagggctctgcaggccactgtgagcgctggctccctgggcagtgctcctccgtgtggactgtgcctcaggccagggctcaccagctggggtcctgtccggaaggatgggatctttctgggagctgcgccggacagagtggggagctcctagtttgtggggggaagctttgatatccatgccacgtccatccaccccaccccttttcgtcacgagcacaatggtcttacattggatttttgtaaaaaaataaaaataaatggagactttaactcaa

SEQ ID NO: 325853 - DNA, 350 bp, Homo sapiens
gatccacacgacaggatgtctcgaatcccctgccccagtccctaagtgccagtaatacctcctagttactgccacacccaaacagcccctccatccatgcatattttggctgaaagccaacaacctgtgtcttgtaacacagcatgtggttctttttcttcccctgacagtattatgcctacctgtattcttatgtgatgccccaggccatccgggacatggtggatgaatacatcaactgtgaggacattgccatgaacttccttgtctcccacatcactcggaagccccccatcaaggtgaggtcccaccactggtggggctgtggatgcgtgcatgtttacttcact

SEQ ID NO: 325854 - DNA, 6309 bp, Homo sapiens
gggagaccgcgggacctggcgctgcagcgagattttcaaacaccgcattccccttaaacctcccaggctcccatcactcccagcaaagagccagcccgctactttatggagacaggagagactgtcagacagttcctgctgctgcccaggtgcatctgagagagcaagccctggaggttcactctttcaagaagtcgtgtgctgaggtgtaatgctacacaagtcagaggaaggaagggtcctgaaacacatggcctgattgttggcaaaggcatcataagaagctggcatttatttctgttctaacctattactgtataactgtgaatagacactatgcatatttgttggtcagcaaaaccaagaaacaagagctatggcatttgaaaaagtctgtctgattccagggtgtttttcctgggtttcatcatcaggtacctcctccctttcatctcagcaagaatgtggcaccttttatcgtttgataaagattaaggacatgttctttggtcaacagccagaacttaaaatctgctggaatagggtcagagaccatttcagctgcagctgaggaaaatgaaatgttcattttatttggtgccttgtctggggagcacactaactcttctggaaacgtgtcagtgaaacagagatcgttttgtggaatagcaacccatggttatggcgagtgacccgacgtgatctggggggcaggctgcagaggactcatgacaggctataccatgctgcggaatgggggcgcggggaacggaggtcagacctgcatgctgcgctggtccaaccgcatccgcctcacgtggctcagcttcacgctctttgtcatcctggtcttcttcccgctcatcgcccactattacctcaccactctggatgaggctgatgaggcaggcaagcggatttttggtccccgggtggggaacgagctgtgcgaggtgaagcacgtgctggatctgtgccgcatccgggagtcggtgagtgaagagctcctgcagctggaggccaagcgccaagagctgaacagcgagatcgccaagctgaatctgaagatcgaagcctgtaagaagagcattgagaacgccaagcaggacctgctccagctcaagaatgtcatcagccagaccgagcattcctacaaggagctcatggcccagaaccagcccaagctgtccctgcccatccgactgctcccagagaaggacgatgccggcctccctcccccgaaggccactcggggctgccggctacacaactgctttgattattctcgttgccctctcacctctggcttcccggtctacgtctatgacagtgaccagtttgtctttggcagctacctggatcccttggtcaagcaggcttttcaggcgacagcacgagctaacgtttatgttacagaaaatgcagacatcgcctgcctttacgtgatactagtgggagagatgcaggagccggtggtgctgcggcctgctgagctggagaagcagttgtattccctgccacactggcggacggatggacacaaccatgtcatcatcaatctgtcacgtaagtcagatacacagaaccttctctataacgtcagtactggccgtgccatggtggcccagtccaccttctacactgtccagtacagacctggctttgacttggtcgtatcaccgctggtccatgccatgtctgagcccaacttcatggaaatcccaccacaggtgccggtgaagcggaaatatctcttcaccttccagggcgagaagattgagtctctgaggtctagccttcaggaggcccgctccttcgaagaggaaatggagggcgaccctcccgccgactacgatgaccggatcattgccaccctgaaggcggtgcaggacagcaagctggatcaggtcctggtggaattcacctgcaaaaaccagcccaaacccagcctgccaactgagtgggcactgtgtggagagcgggaggaccgcttggaattgctgaagctctccaccttcgccctcatcattacccccggggaccctcgcttggttatttcctctgggtgtgcaacacggctcttcgaagccctggaagtcggtgccgtcccggtggtgctgggggagcaggtccagcttccctaccaggacatgctgcagtggaacgaggcggccctggtggtgccaaagcctcgtgttaccgaggttcatttcctgctcagaagcctctccgatagtgacctcctggctatgaggcggcaaggccgctttctctgggagacttacttctccactgctgacagtatttttaataccgtgctggctatgattaggactcgcatccagatcccagccgctcccatccgggaagaggcggcagctgagatcccccaccgttcaggcaaggcggctggaactgaccccaacatggctgacaacggggacctggacctggggccagtggagacggagccgccctacgcctcacccagatacctccgcaatttcactctgactgtcactgacttttaccgcagctggaactgtgctccagggcctttccatcttttcccccacactccctttgaccctgtgttgccctcagaggccaaattcttgggctcagggactggctttcggcctattggtggtggagctgggggttctggcaaggaatttcaggcagcgcttggaggcaatgttccccgagagcagttcacggtggtgatgttgacttatgagcgggaggaagtgcttatgaactctttagagaggctgaatggcctcccttacctgaacaaggtcgtggtggtgtggaattctcccaagctgccatcagaggaccttctgtggcctgacattggcgtccccatcatggtggtccgtactgagaagaacagtttgaacaaccgattcttaccctggaatgaaattgagacagaggccatcctgtccattgatgacgatgctcacctccgccatgacgaaatcatgtttgggttccgggtgtggagagaagctcgggaccgcatcgtgggcttccctggccgttaccacgcatgggacatcccccatcagtcctggctctacaactccaactactcctgtgagctgtccatggtgctgacaggtgctgccttctttcacaagtattatgcctacctgtattcttatgtgatgccccaggccatccgggacatggtggatgaatacatcaactgtgaggacattgccatgaacttccttgtctcccacatcactcggaagccccccatcaaggtgacctcacggtggacattccgatgcccaggatgccctcaggccctgtctcatgatgactcccacttccacgagcggcacaagtgcatcaacttcttcgtgaaggtgtacggctacatgcccctcctgtacacgcagttcagggtggattctgtgctcttcaagacacgcctgccccatgacaagaccaagtgcttcaagttcatctaggggcagcgcacggtctggggaagaggatgagcagagggaggaagatggctcccaaggttcctaggcattgcaggaccttgggcacatctgctggtgggtggcccagagcctctgctggaaggggcagcaggaggagtggaaggaaaccgctgcctttatcttgaagtcagccacactgggcctggagccctgggcggagtccccggggttccccacacagggcactgactgatagcttacactgaggactgtggcgactctgcagagtcactcacaccgttcgtacgcccaggacagctggttcgtggtttttacattcaataacaactattatgattatttaaaaagagaaagtttcagatttgccattcaaggcttatttatatatatgtgtgtgtatataaatacatgcacacacttgcatacatatatatttttggctgggggagtgtgagttttgcctttctaagggagggaccgcgcaggctcctttgttctgtattctggcggagatgggtcctggccttgtgtcactggcttatccttaaagatcatctcccatcctccccagcgccatctgtgtgcagcaaccagaaagggatgaacttggccctcttgcgggcctggacaaggtctcttccttaccctttctgttgccagtcagcaacctgtaactcacattctcttcccagtgaatccctgggagcgcctgaccctggtgggctgttcagcttcctgctgctggggccagcgatttttgaggatttatctttaggccaggcttgcctccgtacttatccctgctctcccatttctctcttgtttgagagagaatgaggaagcaaagagtgagaaagaataggggctgaagacgccactcccagatggctctttctatcctgctcttctgttgaaacacacgtgctgtgggcctcaggcgtttctgaagtgctctttcttggattggacaggagatcagcagcgtgcacatctgctgtggtctgaagtggtttgcaggtcagcctcctctccctagtgtagagcaagccagtgtccttcgaggaacccacccggctggccgggaagttttacagcaaggcgcctgccttgggataattccttggtgaaattcaccttccccccgcctctgtctggagccccatcctgtgttatctgtggtttttggacccctaatgtcagcttggctgtaggactccccgaggtttggtatgtgctagaacaatgggaggctgtgatttgctgtgtaagctcacatccagccttggaatctaacgggcattcacaacccgagttaccactttccactccctgcttaggattctgttccctgggctgaaactgaaataagctaattttttgggtcacggtggcagtaggggaacctaggagggtgtgagtggcatttgtcagggatttagcccatgacgtgtttcttgaaccctactttctggaagtggagttgactctggaagttttctagcaactgaacaaaagctcaggtttgtcctggtcatgcacatgccttaagccagttccgtcttccctagaccttggcatcctgtgcttctatttcttggaatacgttctcctctgacctgcctgtaccacgtgggtcctcttcaagtactgttttgaagctgggctcttttgtgtagctcccacccacctgtagggctagctcggcttaagggaactctccccattggcaaaccggacccggccgccgccaggactgtgtttccaaaggttccccgcccccaaccccagcatcagcctgtagctcccctgctgaggcagtgtggttatgttcccagcagtgggggtcagacgcccttcctcagaactttctagttgccctctacctgactcctgacttgtattccttttagcagtagccttcttccctcggggagccaaagagtgtggtgtgtggcgctatattgtggctgctatttcatctggtttcttttaatgtgaggaactcacatactgacttcagtgggactcggtgagccggggccgtctgtgtggtgggaccccctttagcgggactcagtgagctggggccgtctgtgtggtggagccagggcctctccctttagtggagccaggttgtcgggccccgaatgtcactggtggatctaagaagggctgagtggtctgacaccaaaacatgccgcagggagggctgtggtgccggtgcttccaacaaggacagccctccttgaccctgaaaggaacactggcttgaaggactgcagacaggctctgaggggcacgccctcctcagcgagaggcagcaaggtggccacagtgtcactggtcaggtgcttctcaccacgggaaagccgccgacctgtgactcgcttgagatgggaaagcggcgccacagaccccgggtctccttggctgtctgtgggccgcccctggccaccttgtcctggctcgcagggtgcaggagcgcctcgttctctgggtggccggcttgctgctccggtttgggctgtcttaccataacaccgtcccagggctctgcaggccactgtgagcgctggctccctgggcagtgctcctccgtgtggactgtgcctcaggccagggctcaccagctggggtcctgtccggaaggatgggatctttctgggagctgcgccggacagagtggggagctcctagtttgtggggggaagctttgatatccatgccacgtccatccaccccaccccttttcgtcacgagcacaatggtcttacattggatttttgtaaaaaaataaaaataaatggagactttaactcaa

SEQ ID NO: 325855 - DNA, 6122 bp, Homo sapiens
cggcagggggagcggcggatcaggcgcggcctggaaggcgggcggccggcagccagaacggcttctgggacgccgactttcgcgcaggcggcggcggcggcggcggcgggtccctgagctggaagccggagagcaagccctggaggttcactctttcaagaagtcgtgtgctgaggtgtaatgctacacaagtcagaggaaggaagggtcctgaaacacatggcctgattgttggcaaaggcatcataagaagctggcatttatttctgttctaacctattactgtataactgtgaatagacactatgcatatttgttggtcagcaaaaccaagaaacaagagctatggcatttgaaaaagtctgtctgattccagggtgtttttcctgggtttcatcatcaggtacctcctccctttcatctcagcaagaatgtggcaccttttatcgtttgataaagattaaggacatgttctttggtcaacagccagaacttaaaatctgctggaatagggtcagagaccatttcagctgcagctgaggaaaatgaaatgttcattttatttggtgccttgtctggggagcacactaactcttctggaaacgtgtcagtgaaacagagatcgttttgtggaatagcaacccatggttatggcgagtgacccgacgtgatctggggggcaggctgcagaggactcatgacaggctataccatgctgcggaatgggggcgcggggaacggaggtcagacctgcatgctgcgctggtccaaccgcatccgcctcacgtggctcagcttcacgctctttgtcatcctggtcttcttcccgctcatcgcccactattacctcaccactctggatgaggctgatgaggcaggcaagcggatttttggtccccgggtggggaacgagctgtgcgaggtgaagcacgtgctggatctgtgccgcatccgggagtcggtgagtgaagagctcctgcagctggaggccaagcgccaagagctgaacagcgagatcgccaagctgaatctgaagatcgaagcctgtaagaagagcattgagaacgccaagcaggacctgctccagctcaagaatgtcatcagccagaccgagcattcctacaaggagctcatggcccagaaccagcccaagctgtccctgcccatccgactgctcccagagaaggacgatgccggcctccctcccccgaaggccactcggggctgccggctacacaactgctttgattattctcgttgccctctcacctctggcttcccggtctacgtctatgacagtgaccagtttgtctttggcagctacctggatcccttggtcaagcaggcttttcaggcgacagcacgagctaacgtttatgttacagaaaatgcagacatcgcctgcctttacgtgatactagtgggagagatgcaggagccggtggtgctgcggcctgctgagctggagaagcagttgtattccctgccacactggcggacggatggacacaaccatgtcatcatcaatctgtcacgtaagtcagatacacagaaccttctctataacgtcagtactggccgtgccatggtggcccagtccaccttctacactgtccagtacagacctggctttgacttggtcgtatcaccgctggtccatgccatgtctgagcccaacttcatggaaatcccaccacaggtgccggtgaagcggaaatatctcttcaccttccagggcgagaagattgagtctctgaggtctagccttcaggaggcccgctccttcgaagaggaaatggagggcgaccctcccgccgactacgatgaccggatcattgccaccctgaaggcggtgcaggacagcaagctggatcaggtcctggtggaattcacctgcaaaaaccagcccaaacccagcctgccaactgagtgggcactgtgtggagagcgggaggaccgcttggaattgctgaagctctccaccttcgccctcatcattacccccggggaccctcgcttggttatttcctctgggtgtgcaacacggctcttcgaagccctggaagtcggtgccgtcccggtggtgctgggggagcaggtccagcttccctaccaggacatgctgcagtggaacgaggcggccctggtggtgccaaagcctcgtgttaccgaggttcatttcctgctcagaagcctctccgatagtgacctcctggctatgaggcggcaaggccgctttctctgggagacttacttctccactgctgacagtatttttaataccgtgctggctatgattaggactcgcatccagatcccagccgctcccatccgggaagaggcggcagctgagatcccccaccgttcaggcaaggcggctggaactgaccccaacatggctgacaacggggacctggacctggggccagtggagacggagccgccctacgcctcacccagatacctccgcaatttcactctgactgtcactgacttttaccgcagctggaactgtgctccagggcctttccatcttttcccccacactccctttgaccctgtgttgccctcagaggccaaattcttgggctcagggactggctttcggcctattggtggtggagctgggggttctggcaaggaatttcaggcagcgcttggaggcaatgttccccgagagcagttcacggtggtgatgttgacttatgagcgggaggaagtgcttatgaactctttagagaggctgaatggcctcccttacctgaacaaggtcgtggtggtgtggaattctcccaagctgccatcagaggaccttctgtggcctgacattggcgtccccatcatggtggtccgtactgagaagaacagtttgaacaaccgattcttaccctggaatgaaattgagacagaggccatcctgtccattgatgacgatgctcacctccgccatgacgaaatcatgtttgggttccgggtgtggagagaagctcgggaccgcatcgtgggcttccctggccgttaccacgcatgggacatcccccatcagtcctggctctacaactccaactactcctgtgagctgtccatggtgctgacaggtgctgccttctttcacaagtattatgcctacctgtattcttatgtgatgccccaggccatccgggacatggtggatgaatacatcaactgtgaggacattgccatgaacttccttgtctcccacatcactcggaagccccccatcaaggtgacctcacggtggacattccgatgcccaggatgccctcaggccctgtctcatgatgactcccacttccacgagcggcacaagtgcatcaacttcttcgtgaaggtgtacggctacatgcccctcctgtacacgcagttcagggtggattctgtgctcttcaagacacgcctgccccatgacaagaccaagtgcttcaagttcatctaggggcagcgcacggtctggggaagaggatgagcagagggaggaagatggctcccaaggttcctaggcattgcaggaccttgggcacatctgctggtgggtggcccagagcctctgctggaaggggcagcaggaggagtggaaggaaaccgctgcctttatcttgaagtcagccacactgggcctggagccctgggcggagtccccggggttccccacacagggcactgactgatagcttacactgaggactgtggcgactctgcagagtcactcacaccgttcgtacgcccaggacagctggttcgtggtttttacattcaataacaactattatgattatttaaaaagagaaagtttcagatttgccattcaaggcttatttatatatatgtgtgtgtatataaatacatgcacacacttgcatacatatatatttttggctgggggagtgtgagttttgcctttctaagggagggaccgcgcaggctcctttgttctgtattctggcggagatgggtcctggccttgtgtcactggcttatccttaaagatcatctcccatcctccccagcgccatctgtgtgcagcaaccagaaagggatgaacttggccctcttgcgggcctggacaaggtctcttccttaccctttctgttgccagtcagcaacctgtaactcacattctcttcccagtgaatccctgggagcgcctgaccctggtgggctgttcagcttcctgctgctggggccagcgatttttgaggatttatctttaggccaggcttgcctccgtacttatccctgctctcccatttctctcttgtttgagagagaatgaggaagcaaagagtgagaaagaataggggctgaagacgccactcccagatggctctttctatcctgctcttctgttgaaacacacgtgctgtgggcctcaggcgtttctgaagtgctctttcttggattggacaggagatcagcagcgtgcacatctgctgtggtctgaagtggtttgcaggtcagcctcctctccctagtgtagagcaagccagtgtccttcgaggaacccacccggctggccgggaagttttacagcaaggcgcctgccttgggataattccttggtgaaattcaccttccccccgcctctgtctggagccccatcctgtgttatctgtggtttttggacccctaatgtcagcttggctgtaggactccccgaggtttggtatgtgctagaacaatgggaggctgtgatttgctgtgtaagctcacatccagccttggaatctaacgggcattcacaacccgagttaccactttccactccctgcttaggattctgttccctgggctgaaactgaaataagctaattttttgggtcacggtggcagtaggggaacctaggagggtgtgagtggcatttgtcagggatttagcccatgacgttctcctctgacctgcctgtaccacgtgggtcctcttcaagtactgttttgaagctgggctcttttgtgtagctcccacccacctgtagggctagctcggcttaagggaactctccccattggcaaaccggacccggccgccgccaggactgtgtttccaaaggttccccgcccccaaccccagcatcagcctgtagctcccctgctgaggcagtgtggttatgttcccagcagtgggggtcagacgcccttcctcagaactttctagttgccctctacctgactcctgacttgtattccttttagcagtagccttcttccctcggggagccaaagagtgtggtgtgtggcgctatattgtggctgctatttcatctggtttcttttaatgtgaggaactcacatactgacttcagtgggactcggtgagccggggccgtctgtgtggtgggaccccctttagcgggactcagtgagctggggccgtctgtgtggtggagccagggcctctccctttagtggagccaggttgtcgggccccgaatgtcactggtggatctaagaagggctgagtggtctgacaccaaaacatgccgcagggagggctgtggtgccggtgcttccaacaaggacagccctccttgaccctgaaaggaacactggcttgaaggactgcagacaggctctgaggggcacgccctcctcagcgagaggcagcaaggtggccacagtgtcactggtcaggtgcttctcaccacgggaaagccgccgacctgtgactcgcttgagatgggaaagcggcgccacagaccccgggtctccttggctgtctgtgggccgcccctggccaccttgtcctggctcgcagggtgcaggagcgcctcgttctctgggtggccggcttgctgctccggtttgggctgtcttaccataacaccgtcccagggctctgcaggccactgtgagcgctggctccctgggcagtgctcctccgtgtggactgtgcctcaggccagggctcaccagctggggtcctgtccggaaggatgggatctttctgggagctgcgccggacagagtggggagctcctagtttgtggggggaagctttgatatccatgccacgtccatccaccccaccccttttcgtcacgagcacaatggtcttacattggatttttgtaaaaaaataaaaataaatggagactttaactcaa

SEQ ID NO: 325856 - DNA, 2832 bp, Homo sapiens
cggcagggggagcggcggatcaggcgcggcctggaaggcgggcggccggcagccagaacggcttctgggacgccgactttcgcgcaggcggcggcggcggcggcggcgggtccctgagctggaagccggagagcaagccctggaggttcactctttcaagaagtcgtgtgctgaggtgtaatgctacacaagtcagaggaaggaagggtcctgaaacacatggcctgattgttggcaaaggcatcataagaagctggcatttatttctgttctaacctattactgtataactgtgaatagacactatgcatatttgttggtcagcaaaaccaagaaacaagagctatggcatttgaaaaagtctgtctgattccagggtgtttttcctgggtttcatcatcaggtacctcctccctttcatctcagcaagaatgtggcaccttttatcgtttgataaagattaaggacatgttctttggtcaacagccagaacttaaaatctgctggaatagggtcagagaccatttcagctgcagctgaggaaaatgaaatgttcattttatttggtgccttgtctggggagcacactaactcttctggaaacgtgtcagtgaaacagagatcgttttgtggaatagcaacccatggttatggcgagtgacccgacgtgatctggggggcaggctgcagaggactcatgacaggctataccatgctgcggaatgggggcgcggggaacggaggtcagacctgcatgctgcgctggtccaaccgcatccgcctcacgtggctcagcttcacgctctttgtcatcctggtcttcttcccgctcatcgcccactattacctcaccactctggatgaggctgatgaggcaggcaagcggatttttggtccccgggtggggaacgagctgtgcgaggtgaagcacgtgctggatctgtgccgcatccgggagtcggtgagtgaagagctcctgcagctggaggccaagcgccaagagctgaacagcgagatcgccaagctgaatctgaagatcgaagcctgtaagaagagcattgagaacgccaagcaggacctgctccagctcaagaatgtcatcagccagaccgagcattcctacaaggagctcatggcccagaaccagcccaagctgtccctgcccatccgactgctcccagagaaggacgatgccggcctccctcccccgaaggccactcggggctgccggctacacaactgctttgattattctcgttgccctctcacctctggcttcccggtctacgtctatgacagtgaccagtttgtctttggcagctacctggatcccttggtcaagcaggcttttcaggcgacagcacgagctaacgtttatgttacagaaaatgcagacatcgcctgcctttacgtgatactagtgggagagatgcaggagccggtggtgctgcggcctgctgagctggagaagcagttgtattccctgccacactggcggacggatggacacaaccatgtcatcatcaatctgtcacgtaagtcagatacacagaaccttctctataacgtcagtactggccgtgccatggtggcccagtccaccttctacactgtccagtacagacctggctttgacttggtcgtatcaccgctggtccatgccatgtctgagcccaacttcatggaaatcccacccacctgtagggctagctcggcttaagggaactctccccattggcaaaccggacccggccgccgccaggactgtgtttccaaaggttccccgcccccaaccccagcatcagcctgtagctcccctgctgaggcagtgtggttatgttcccagcagtgggggtcagacgcccttcctcagaactttctagttgccctctacctgactcctgacttgtattccttttagcagtagccttcttccctcggggagccaaagagtgtggtgtgtggcgctatattgtggctgctatttcatctggtttcttttaatgtgaggaactcacatactgacttcagtgggactcggtgagccggggccgtctgtgtggtgggaccccctttagcgggactcagtgagctggggccgtctgtgtggtggagccagggcctctccctttagtggagccaggttgtcgggccccgaatgtcactggtggatctaagaagggctgagtggtctgacaccaaaacatgccgcagggagggctgtggtgccggtgcttccaacaaggacagccctccttgaccctgaaaggaacactggcttgaaggactgcagacaggctctgaggggcacgccctcctcagcgagaggcagcaaggtggccacagtgtcactggtcaggtgcttctcaccacgggaaagccgccgacctgtgactcgcttgagatgggaaagcggcgccacagaccccgggtctccttggctgtctgtgggccgcccctggccaccttgtcctggctcgcagggtgcaggagcgcctcgttctctgggtggccggcttgctgctccggtttgggctgtcttaccataacaccgtcccagggctctgcaggccactgtgagcgctggctccctgggcagtgctcctccgtgtggactgtgcctcaggccagggctcaccagctggggtcctgtccggaaggatgggatctttctgggagctgcgccggacagagtggggagctcctagtttgtggggggaagctttgatatccatgccacgtccatccaccccaccccttttcgtcacgagcacaatggtcttacattggatttttgtaaaaaaataaaaataaatggagactttaactcaa

SEQ ID NO: 325857 - DNA, 454 bp, Homo sapiens
atctgcgcctggcacagctcctggctctcaaggccagctctgtaataactagatattgcatctgctctctaccctttgtgtggagtaatgattcttggctcccacagctgttccggagacttcaaggcactagctcgatggtctgaaaaacagagatgagctccttgaacttggatcattggttgagggggctagagggagaatgggaaccaccccctcagtcccctgcactgactcactccccgacatatccggacctccccaagtccagaaggaaggaatggagctgagcaactgacgtcaaatccccaagtcgactcaagaggctgccaggaagcagagatgcagaccccaaggagactgggctggggctggtatcacaccctcactctatatttatgggaggaaaagtgaagattaaattcccaagttgtgcgtgtgactaaaaaaaaaa

SEQ ID NO: 325858 - DNA, 886 bp, Homo sapiens
gcacctgcgtggtgtgcgggggtggagcgggggctggagggagagttaatgatttgccacaggctcatttcgcaacttaaccaagggtcagcttcccgtgaccatgtaccagctgcgtcctctgggccacgctccacttgcccgcttccacccggaaagccccccaggctgagtgcggcatgatctccatcaccgaatggcagaagattggtgtggggatcaccggtttcggcatcttcttcatcctctttggaacactcctgtactttgattccgtgctcctggcctttggaaacctgctgttcctgacgggcctgtccctcatcattggcctgaggaagaccttttggttcttcttccaacggcacaaactcaagggaaccagcttcctcctggggggtgtggttatcgtgctcctacgctggcccctcctcggcatgttcctggaaacctacggattcttcagcctctttaagggctttttccctgtcgccttcggcttcctgggcaatgtctgcaacatccccttcctgggtgcgctgttccggagacttcaaggcactagctcgatggtctgaaaaacagagatgagctccttgaacttggatcattggttgagggggctagagggagaatgggaaccaccccctcagtcccctgcactgactcactccccgacatatccggacctccccaagtccagaaggaaggaatggagctgagcaactgacgtcaaatccccaagtcgactcaagaggctgccaggaagcagagatgcagaccccaaggagactgggctggggctggtatcacaccctcactctatatttatgggaggaaaagtgaagattaaattcccaagttgtgcgtgtgactaaaaaaaaaa

SEQ ID NO: 325859 - DNA, 218 bp, Homo sapiens
gcatttctacccaaatttcatgacccaacagtttggaaaaaatgaacattattcctggcagaaaaaaattatctgtttttgtcacatcacatgcagagccatctgagaacaaatgtctaagcaaaaaaagaaacaatactggaatttgataaagactcctcaggaatatggcatttagctgtttcttttcttttcttttttgagatagagtcttgctc

SEQ ID NO: 325860 - DNA, 747 bp, Homo sapiens
ttaccagatcagccctacaagatatggtaaaaggagttctaaatcttcaaacaaaaagttgatatgcaccagaatagaacctcttgaaagcatgcaacttacaggactgccaggcacggtggctcacacctgtaatcccagcactttgggaggctgtggtgggcggataatgaggtcaggagttcaagaccagtctgaccaacatggtgaaaccccatctctactaaaaatacaaaaattagccagacatggtggtgggcacctgtaatcccagctactcaggaggctgaggcaggagaattgcttaaacccaggaggtggaggttgcagttagccaagattgcaccactgtactccagcctgggcaacagagcgagactctgcctgccatccccccaccccccctccaaaaaaaaactcacaggacctataaagcaatagcgcagtaaagaaaacaaagtactaggtaacaatcaacatgatgactggaatagtaccttatatctcaatattaatgttgaatgtaaatggtctaagtgctcacttgaaagaagaagattggcagaatggataaaaattcacaaaccaaatatctgctgtcttcaagagattcatctaacacataaggattcctatagactcaacgtaaaagagtggaaaaagatatttcacacaaatggaaactcaaagtgagcaggagtagctattgttatgtcagagaaaacagattttaaagcaacaacagtt

SEQ ID NO: 325861 - DNA, 1909 bp, Homo sapiens
agcggggtcgttctgggcctaggggaggcgggccgagggcgtctgagctgaggcccgcgtcgatcctgggttggaggaggtggcggccgctgaggctgcggcgtgaagacggcgggcatggtggggcgggagaaagagctctctatacactttgttcccgggagctgtcggctggtggaggaggaagttaacatccctaataggagggttctggttactggtgccactgggcttcttggcagagctgtacacaaagaatttcagcagaataattggcatgcagttggctgtggtttcagaagagcaagaccaaaatttgaacaggttaatctgttggattctaatgcagttcatcacatcattcatgattttcagccccatgttatagtacattgtgcagcagagagaagaccagatgttgtagaaaatcagccagatgctgcctctcaacttaatgtggatgcttctgggaatttagcaaaggaagcagctgctgttggagcatttctcatctacattagctcagattatgtatttgatggaacaaatccaccttacagagaggaagacataccagctcccctaaatttgtatggcaaaacaaaattagatggagaaaaggctgtcctggagaacaatctaggagctgctgttttgaggattcctattctgtatggggaagttgaaaagctcgaagaaagtgctgtgactgttatgtttgataaagtgcagttcagcaacaagtcagcaaacatggatcactggcagcagaggttccccacacatgtcaaagatgtggccactgtgtgccggcagctagcagagaagagaatgctggatccatcaattaagggaacctttcactggtctggcaatgaacagatgactaagtatgaaatggcatgtgcaattgcagatgccttcaacctccccagcagtcacttaagacctattactgacagccctgtcctaggagcacaacgtccgagaaatgctcagcttgactgctccaaattggagaccttgggcattggccaacgaacaccatttcgaattggaatcaaagaatcactttggcctttcctcattgacaagagatggagacaaacggtctttcattagtttatttgtgttgggttcttttttttttttaaatgaaaagtatagtatgtggcactttttaaagaacaaaggaaatagttttgtatgagtactttaattgtgactcttaggatctttcaggtaaatgatgctcttgcactagtgaaattgtctaaagaaactaaagggcagtcatgccctgtttgcagtaatttttctttttatcattttgtttgtcctggctaaacttggagtttgagtatagtaaattatgatccttaaatatttgagagtcaggatgaagcagatctgctgtagacttttcagatgaaattgttcattctcgtaacctccatattttcaggatttttgaagctgttgaccttttcatgttgattattttaaattgtgtgaaatagtataaaaatcattggtgttcattatttgctttgcctgagctcagatcaaaatgtttgaagaaaggaactttatttttgcaagttacgtacagtttttatgcttgagatatttcaacatgttatgtatattggaacttctacagcttgatgcctcctgcttttatagcagtttatggggagcacttgaaagagcgtgtgtacatgtattttttttctaggcaaacattgaatgcaaacgtgtatttttttaatataaatatataactgtccttttcatcccatgttgccgctaagtgatatttcatatgtgtggttatactcataataatgggccttgtaagtcttttcaccattcatgaataataataaatatgtactgctggcatgta

SEQ ID NO: 325862 - DNA, 2088 bp, Homo sapiens
agcggggtcgttctgggcctaggggaggcgggccgagggcgtctgagctgaggcccgcgtcgatcctgggttggaggaggtggcggccgctgaggctgcggcgtgaagacggcgggcatggtggggcgggagaaagagctctctatacactttgttcccgggagctgtcggctggtggaggaggaagttaacatccctaataggagggttctggttactggtgccactgggcttcttggcagagctgtacacaaagaatttcagcagaataattggcatgcagttggctgtggtttcagaagagcaagaccaaaatttgaacaggttaatctgttggattctaatgcagttcatcacatcattcatgattttcagccccatgttatagtacattgtgcagcagagagaagaccagatgttgtagaaaatcagccagatgctgcctctcaacttaatgtggatgcttctgggaatttagcaaaggaagcagctgctgttggagcatttctcatctacattagctcagattatgtatttgatggaacaaatccaccttacagagaggaagacataccagctcccctaaatttgtatggcaaaacaaaattagatggagaaaaggctgtcctggagaacaatctaggagctgctgttttgaggattcctattctgtatggggaagttgaaaagctcgaagaaagtgctgtgactgttatgtttgataaagtgcagttcagcaacaagtcagcaaacatggatcactggcagcagaggttccccacacatgtcaaagatgtggccactgtgtgccggcagctagcagagaagagaatgctggatccatcaattaagggaacctttcactggtctggcaatgaacagatgactaagtatgaaatggcatgtgcaattgcagatgccttcaacctccccagcagtcacttaagacctattactgacagccctgtcctaggagcacaacgtccgagaaatgctcagcttgactgctccaaattggagaccttgggcattggccaacgaacaccatttcgaattggaatcaaagaatcactttggcctttcctcattgacaagagatggagacaaacggtctttcattagtttatttgtgttgggttcttttttttttttaaatgaaaagtatagtatgtggcactttttaaagaacaaaggaaatagttttgtatgagtactttaattgtgactcttaggatctttcaggtaaatgatgctcttgcactagtgaaattgtctaaagaaactaaagggcagtcatgccctgtttgcagtaatttttctttttatcattttgtttgtcctggctaaacttggagtttgagtatagtaaattatgatccttaaatatttgagagtcaggatgaagcagatctgctgtagacttttcagatgaaattgttcattctcgtaacctccatattttcaggatttttgaagctgttgaccttttcatgttgattattttaaattgtgtgaaatagtataaaaatcattggtgttcattatttgctttgcctgagctcagatcaaaatgtttgaagaaaggaactttatttttgcaagttacgtacagtttttatgcttgagatatttcaacatgttatgtatattggaacttctacagcttgatgcctcctgcttttatagcagtttatggggagcacttgaaagagcgtgtgtacatgtattttttttctaggcaaacattgaatgcaaacgtgtatttttttaatataaatatataactgtccttttcatcccatgttgccgctaagtgatatttcatatgtgtggttatactcataataatgggccttgtaagtcttttcaccattcatgaataataataaatatgtactgctggcatgtaatgcttagttttcttgtatttacttctttttttaaatgtaaggaccaaacttctaaactaattgttcttttgttgctttaatttttaaaaattacattcttctgatgtaacatgtgatacatacaaaagaatatagtttaatatgtattgaaataaaacacaataaaattaacacttga

SEQ ID NO: 325863 - DNA, 786 bp, Homo sapiens
  misc_feature (668)..(668): n is a, c, g, or t
  misc_feature (670)..(670): n is a, c, g, or t
agcggggtcgttctgggcctaggggaggcgggccgagggcgtctgagctgaggcccgcgtcgatcctgggttggaggaggtggcggccgctgaggctgcggcgtgaagacggcgggcatggtggggcgggagaaagagctctctatacactttgttcccgggagctgtcggctggtggaggaggaagttaacatccctaataggagggttctggttactggtgccactgggcttcttggcagagctgtacacaaagaatttcagcagaataattggcatgcagttggctgtggtttcagaagagcaagaccaaaatttgaacaggttaatctgttggattctaatgcagttcatcacatcattcatgattttcagccccatgttatagtacattgtgcagcagagagaagaccagatgttgtagaaaatcagccagatgctgcctctcaacttaatgtggatgcttctgggaatttagcaaaggaagcagctgctgttggagcatttctcatctacattagctcagattatgtatttgatggaacaaatccaccttacagagaggaagacataccagctcccctaaatttgtatggcaaaacaaaattagatggagaaaaggctgtcctggagaacaatctaggagctgctgttttgaggattcctantntgtatgggcaattggtcacaaacattgttcactgcagaataggttcccacacaggaaagattggccactggttccgcgagttcgcactaagacatgttgctgccctaattagggac

SEQ ID NO: 325864 - DNA, 1050 bp, Homo sapiens
cgagattccgggattggaatcaaaatgctaatttaaaaggtcaagtgaagctgctcctcacgttttggcgtgcctgcgctctctgcaggcagaagcgaacaaagacccagcaagagaaggcagaggctaagacccatcccgtatctgctctcctgaaataattctggagtcatgcctgaaatgccagaggacatggagcaggaggaagttaacatccctaataggagggttctggttactggtgccactgggcttcttggcagagctgtacacaaagaatttcagcagaataattggcatgcagttggctgtggtttcagaagagcaagaccaaaatttgaacaggttaatctgttggattctaatgcagttcatcacatcattcatgattttcagccccatgttatagtacattgtgcagcagagagaagaccagatgttgtagaaaatcagccagatgctgcctctcaacttaatgtggatgcttctgggaatttagcaaaggaagcagctgctgttggagcatttctcatctacattagctcagattatgtatttgatggaacaaatccaccttacagagaggaagacataccagctcccctaaatttgtatggcaaaacaaaattagatggagaaaaggctgtcctggagaacaatctaggagctgctgttttgaggattcctattctgtatggggaagttgaaaagctcgaagaaagtgctgtgactgttatgtttgataaagtgcagttcagcaacaagtcagcaaacatggatcactggcagcagaggttccccacacatgtcaaagatgtggccactgtgtgccggcagctagcagagaagagaatgctggtaagaaggattcctgagtcctgtcttagcgaaggtccgctttgtcttttccatgcttgaactttcacagctgtacttggagtgttactgagtgaaagccaaaagtgcttttttaaaactaggagaccaaacaaaagtagtttacatatacactgtattcatgaagaataaaaatattatgctcttctgttt

SEQ ID NO: 325865 - DNA, 1008 bp, Homo sapiens
agcggggtcgttctgggcctaggggaggcgggccgagggcgtctgagctgaggcccgcgtcgatcctgggttggaggaggtggcggccgctgaggctgcggcgtgaagacggcgggcatggtggggcgggagaaagagctctctatacactttgttcccgggagctgtcggctggtggaggaggaagttaacatccctaataggagggttctggttactggtgccactgggcttcttggcagagctgtacacaaagaatttcagcagaataattggcatgcagttggctgtggtttcagaagagcaagaccaaaatttgaacaggttaatctgttggattctaatgcagttcatcacatcattcatgattttcaggtatgatttaggttattttaagatatacatgaacaatattaagagttgtctggatgatacagaaactatccttgctctcaaggacaattactatgtttgaaagctctaaagtcgtattatgcagtagcattttttctcatttagcatgacatggtatatgtaaaccttaacagtgaaattttgacacgctgacaaagacaaatatgagacattttataaaatgcttatgtttatagagtgccttctaagtaatactttctctgcaaatggttttcaaatgttactgtaaacctcacaacactgcaaaatagttattttcattttagggctgagggagcaggctcagagaggttttcggtatcattgatactattctccctttgacatggatttattagatatttaaatcatgttaattgcataaatgatagctctttccttttgtccaaattgggggataaaacttgttttgatttagaaagacttctgttttgttcttgtttttgtgacgtaatcttggtttgttgcccaggctggagtgcagtggtgcagttgagctcactgcagcctccgcctcccagggttcaagcaattctcctgcctaagcttcctgagtacctgagactacaggca

SEQ ID NO: 325866 - DNA, 2032 bp, Homo sapiens
cgagaagaaatttcacccagagagatatcgtcgaaccacgctgtccgggctaagacccatcccgtatctgctctcctgaaataattctggagtcatgcctgaaatgccagaggacatggagcaggaggaagttaacatccctaataggagggttctggttactggtgccactgggcttcttggcagagctgtacacaaagaatttcagcagaataattggcatgcagttggctgtggtttcagaagagcaagaccaaaatttgaacaggttaatctgttggattctaatgcagttcatcacatcattcatgattttcagccccatgttatagtacattgtgcagcagagagaagaccagatgttgtagaaaatcagccagatgctgcctctcaacttaatgtggatgcttctgggaatttagcaaaggaagcagctgctgttggagcatttctcatctacattagctcagattatgtatttgatggaacaaatccaccttacagagaggaagacataccagctcccctaaatttgtatggcaaaacaaaattagatggagaaaaggctgtcctggagaacaatctaggagctgctgttttgaggattcctattctgtatggggaagttgaaaagctcgaagaaagtgctgtgactgttatgtttgataaagtgcagttcagcaacaagtcagcaaacatggatcactggcagcagaggttccccacacatgtcaaagatgtggccactgtgtgccggcagctagcagagaagagaatgctggatccatcaattaagggaacctttcactggtctggcaatgaacagatgactaagtatgaaatggcatgtgcaattgcagatgccttcaacctccccagcagtcacttaagacctattactgacagccctgtcctaggagcacaacgtccgagaaatgctcagcttgactgctccaaattggagaccttgggcattggccaacgaacaccatttcgaattggaatcaaagaatcactttggcctttcctcattgacaagagatggagacaaacggtctttcattagtttatttgtgttgggttcttttttttttttaaatgaaaagtatagtatgtggcactttttaaagaacaaaggaaatagttttgtatgagtactttaattgtgactcttaggatctttcaggtaaatgatgctcttgcactagtgaaattgtctaaagaaactaaagggcagtcatgccctgtttgcagtaatttttctttttatcattttgtttgtcctggctaaacttggagtttgagtatagtaaattatgatccttaaatatttgagagtcaggatgaagcagatctgctgtagacttttcagatgaaattgttcattctcgtaacctccatattttcaggatttttgaagctgttgaccttttcatgttgattattttaaattgtgtgaaatagtataaaaatcattggtgttcattatttgctttgcctgagctcagatcaaaatgtttgaagaaaggaactttatttttgcaagttacgtacagtttttatgcttgagatatttcaacatgttatgtatattggaacttctacagcttgatgcctcctgcttttatagcagtttatggggagcacttgaaagagcgtgtgtacatgtattttttttctaggcaaacattgaatgcaaacgtgtatttttttaatataaatatataactgtccttttcatcccatgttgccgctaagtgatatttcatatgtgtggttatactcataataatgggccttgtaagtcttttcaccattcatgaataataataaatatgtactgctggcatgtaatgcttagttttcttgtatttacttctttttttaaatgtaaggaccaaacttctaaactaattgttcttttgttgctttaatttttaaaaattacattcttctgatgtaacatgtgatacatacaaaagaatatagtttaatatgtattgaaataaaacacaataaaattaacacttga

SEQ ID NO: 325867 - DNA, 2192 bp, Homo sapiens
tccccgtttattcatctttggttcgtatttctcgatcttacaagttcgtaggtttgagaaagaacaggaaaaggtgacttctcacaaataacagtgctggagatgacaacttattgaactcttaagttctcagcactatgttatgcacttgacgggcattactttaatcctccactgtgagatacttgttattgcctcattttgtagacgagaaaacgggcatagagggtgagacattggcccaggttcattccgtaaggttggagcctggaattcagatacaggaggaagttaacatccctaataggagggttctggttactggtgccactgggcttcttggcagagctgtacacaaagaatttcagcagaataattggcatgcagttggctgtggtttcagaagagcaagaccaaaatttgaacaggttaatctgttggattctaatgcagttcatcacatcattcatgattttcagccccatgttatagtacattgtgcagcagagagaagaccagatgttgtagaaaatcagccagatgctgcctctcaacttaatgtggatgcttctgggaatttagcaaaggaagcagctgctgttggagcatttctcatctacattagctcagattatgtatttgatggaacaaatccaccttacagagaggaagacataccagctcccctaaatttgtatggcaaaacaaaattagatggagaaaaggctgtcctggagaacaatctaggagctgctgttttgaggattcctattctgtatggggaagttgaaaagctcgaagaaagtgctgtgactgttatgtttgataaagtgcagttcagcaacaagtcagcaaacatggatcactggcagcagaggttccccacacatgtcaaagatgtggccactgtgtgccggcagctagcagagaagagaatgctggatccatcaattaagggaacctttcactggtctggcaatgaacagatgactaagtatgaaatggcatgtgcaattgcagatgccttcaacctccccagcagtcacttaagacctattactgacagccctgtcctaggagcacaacgtccgagaaatgctcagcttgactgctccaaattggagaccttgggcattggccaacgaacaccatttcgaattggaatcaaagaatcactttggcctttcctcattgacaagagatggagacaaacggtctttcattagtttatttgtgttgggttcttttttttttttaaatgaaaagtatagtatgtggcactttttaaagaacaaaggaaatagttttgtatgagtactttaattgtgactcttaggatctttcaggtaaatgatgctcttgcactagtgaaattgtctaaagaaactaaagggcagtcatgccctgtttgcagtaatttttctttttatcattttgtttgtcctggctaaacttggagtttgagtatagtaaattatgatccttaaatatttgagagtcaggatgaagcagatctgctgtagacttttcagatgaaattgttcattctcgtaacctccatattttcaggatttttgaagctgttgaccttttcatgttgattattttaaattgtgtgaaatagtataaaaatcattggtgttcattatttgctttgcctgagctcagatcaaaatgtttgaagaaaggaactttatttttgcaagttacgtacagtttttatgcttgagatatttcaacatgttatgtatattggaacttctacagcttgatgcctcctgcttttatagcagtttatggggagcacttgaaagagcgtgtgtacatgtattttttttctaggcaaacattgaatgcaaacgtgtatttttttaatataaatatataactgtccttttcatcccatgttgccgctaagtgatatttcatatgtgtggttatactcataataatgggccttgtaagtcttttcaccattcatgaataataataaatatgtactgctggcatgtaatgcttagttttcttgtatttacttctttttttaaatgtaaggaccaaacttctaaactaattgttcttttgttgctttaatttttaaaaattacattcttctgatgtaacatgtgatacatacaaaagaatatagtttaatatgtattgaaataaaacacaataaaattaacacttga

SEQ ID NO: 325868 - DNA, 1029 bp, Homo sapiens
agcggggtcgttctgggcctaggggaggcgggccgagggcgtctgagctgaggcccgcgtcgatcctgggttggaggaggtggcggccgctgaggctgcggcgtgaagacggcgggcatggtggggcgggagaaagagctctctatacactttgttcccgggagctgtcggctggtggaggaggaagttaacatccctaataggagggttctggttactggtgccactgggcttcttggcagagctgtacacaaagaatttcagcagaataattggcatgcagttggctgtggtttcagaagagcaagaccaaaatttgaacaggttaatctgttggattctaatgcagttcatcacatcattcatgattttcagccccatgttatagtacattgtgcagcagagagaagaccagatgttgtagaaaatcagccagatgctgcctctcaacttaatgtggatgcttctgggaatttagcaaaggaagcagctgctgttggagcatttctcatctacattagctcagattatgtatttgatggaacaaatccaccttacagagaggaagacataccagctcccctaaatttgtatggcaaaacaaaattagatggagaaaaggctgtcctggagaacaatctaggagctgctgttttgaggattcctattctgtatggggaagttgaaaagctcgaagaaagtgctgtgactgttatgtttgataaagtgcagttcagcaacaagtcagcaaacatggatcactggcagcagaggttccccacacatgtcaaagatgtggccactgtgtgccggcagctagcagagaagagaatgctggtaagaaggattcctgagtcctgtcttagcgaaggtccgctttgtcttttccatgcttgaactttcacagctgtacttggagtgttactgagtgaaagccaaaagtgcttttttaaaactaggagaccaaacaaaagtagtttacatatacactgtattcatgaagaataaaaatattatgctcttctgttt

SEQ ID NO: 325869 - DNA, 1472 bp, Homo sapiens
aaacccgaaggtctcgccccacacccgtcgctattatgaggataattttccggaatcccagggtcttaatgggtggttatgtctttaaagaggccccctacgtgggattggaagggtttctttggaggaaaacccggaacactggatagatctttaatataccgaccccgataacttggccccaaatagagattctaccttgggaactagaaaataccctttttttttttttttgaaacaaggttttgctctgtcacctgggctggagtggagttcagtgcagtggcatgattatggctcagtgctgcatcaaactcctgggctcaagtgattcctcccgcttcagctcctgagtagctggtattacagatgcccagctgatttttaaattttttgtgttggggataacatgtatgttatcccgaacaccatttcgaattggaatcaaagaatcactttggcctttcctcattgacaagagatggagacaaacggtctttcattagtttatttgtgttgggttcttttttttttttaaatgaaaagtatagtatgtggcactttttaaagaacaaaggaaatagttttgtatgagtactttaattgtgactcttaggatctttcaggtaaatgatgctcttgcactagtgaaattgtctaaagaaactaaagggcagtcatgccctgtttgcagtaatttttctttttatcattttgtttgtcctggctaaacttggagtttgagtatagtaaattatgatccttaaatatttgagagtcaggatgaagcagatctgctgtagacttttcagatgaaattgttcattctcgtaacctccatattttcaggatttttgaagctgttgaccttttcatgttgattattttaaattgtgtgaaatagtataaaaatcattggtgttcattatttgctttgcctgagctcagatcaaaatgtttgaagaaaggaactttatttttgcaagttacgtacagtttttatgcttgagatatttcaacatgttatgtatattggaacttctacagcttgatgcctcctgcttttatagcagtttatggggagcacttgaaagagcgtgtgtacatgtattttttttctaggcaaacattgaatgcaaacgtgtatttttttaatataaatatataactgtccttttcatcccatgttgccgctaagtgatatttcatatgtgtggttatactcataataatgggccttgtaagtcttttcaccattcatgaataataataaatatgtactgctggcatgtaatgcttagttttcttgtatttacttctttttttaaatgtaaggaccaaacttctaaactaattgttcttttgttgctttaatttttaaaaattacattcttctgatgtaacatgtgatacatacaaaagaatatagtttaatatgtattgaaataaaacacaataaaattaacacttga

SEQ ID NO: 325870 - DNA, 731 bp, Homo sapiens
tatctatactgacgctatctatactacgtatctatactgacttatctatactgacctatctatactaccagatgaaattgttcattctcgtaacctccatattttcaggatttttgaagctgttgaccttttcatgttgattattttaaattgtgtgaaatagtataaaaatcattggtgttcattatttgctttgcctgagctcagatcaaaatgtttgaagaaaggaactttatttttgcaagttacgtacagtttttatgcttgagatatttcaacatgttatgtatattggaacttctacagcttgatgcctcctgcttttatagcagtttatggggagcacttgaaagagcgtgtgtacatgtattttttttctaggcaaacattgaatgcaaacgtgtatttttttaatataaatatataactgtccttttcatcccatgttgccgctaagtgatatttcatatgtgtggttatactcataataatgggccttgtaagtcttttcaccattcatgaataataataaatatgtactgctggcatgtaatgcttagttttcttgtatttacttctttttttaaatgtaaggaccaaacttctaaactaattgttcttttgttgctttaatttttaaaaattacattcttctgatgtaacatgtgatacatacaaaagaatatagtttaatatgtattgaaataaaacacaataaaattaacacttga

SEQ ID NO: 325871 - DNA, 1930 bp, Homo sapiens
cgagattccgggattggaatcaaaatgctaatttaaaaggtcaagtgaagctgctcctcacgttttggcgtgcctgcgctctctgcaggcagaagcgaacaaagacccagcaagagaaggcagaggctaagacccatcccgtatctgctctcctgaaataattctggagtcatgcctgaaatgccagaggacatggagcaggaggaagttaacatccctaataggagggttctggttactggtgccactgggcttcttggcagagctgtacacaaagaatttcagcagaataattggcatgcagttggctgtggtttcagaagagcaagaccaaaatttgaacaggttaatctgttggattctaatgcagttcatcacatcattcatgattttcagccccatgttatagtacattgtgcagcagagagaagaccagatgttgtagaaaatcagccagatgctgcctctcaacttaatgtggatgcttctgggaatttagcaaaggaagcagctgctgttggagcatttctcatctacattagctcagattatgtatttgatggaacaaatccaccttacagagaggaagacataccagctcccctaaatttgtatggcaaaacaaaattagatggagaaaaggctgtcctggagaacaatctaggagctgctgttttgaggattcctattctgtatggggaagttgaaaagctcgaagaaagtgctgtgactgttatgtttgataaagtgcagttcagcaacaagtcagcaaacatggatcactggcagcagaggttccccacacatgtcaaagatgtggccactgtgtgccggcagctagcagagaagagaatgctggatccatcaattaagggaacctttcactggtctggcaatgaacagatgactaagtatgaaatggcatgtgcaattgcagatgccttcaacctccccagcagtcacttaagacctattactgacagccctgtcctaggagcacaacgtccgagaaatgctcagcttgactgctccaaattggagaccttgggcattggccaacgaacaccatttcgaattggaatcaaagaatcactttggcctttcctcattgacaagagatggagacaaacggtctttcattagtttatttgtgttgggttcttttttttttttaaatgaaaagtatagtatgtggcactttttaaagaacaaaggaaatagttttgtatgagtactttaattgtgactcttaggatctttcaggtaaatgatgctcttgcactagtgaaattgtctaaagaaactaaagggcagtcatgccctgtttgcagtaatttttctttttatcattttgtttgtcctggctaaacttggagtttgagtatagtaaattatgatccttaaatatttgagagtcaggatgaagcagatctgctgtagacttttcagatgaaattgttcattctcgtaacctccatattttcaggatttttgaagctgttgaccttttcatgttgattattttaaattgtgtgaaatagtataaaaatcattggtgttcattatttgctttgcctgagctcagatcaaaatgtttgaagaaaggaactttatttttgcaagttacgtacagtttttatgcttgagatatttcaacatgttatgtatattggaacttctacagcttgatgcctcctgcttttatagcagtttatggggagcacttgaaagagcgtgtgtacatgtattttttttctaggcaaacattgaatgcaaacgtgtatttttttaatataaatatataactgtccttttcatcccatgttgccgctaagtgatatttcatatgtgtggttatactcataataatgggccttgtaagtcttttcaccattcatgaataataataaatatgtactgctggcatgta

SEQ ID NO: 325872 - DNA, 884 bp, Homo sapiens
gagtttttcgccgggactgatcagcgtggttgccctccagctccccgcgttgttgtttctcgtcggcccttcaattcttcgggtgttggttgtgccgccgattgctcgccgcccgcgggatgtgggttttttcttccaggcgatgtgccgtgctgagcgctggttttctccgctgcgcgcgccgttgtttttaatcgggcgccggcctgttctgtcgtcgttattattattcgctgcccttccttatgggggccccctcttgttgaccagaggaggggggtgggtggctatatattggtggtccccccccgtattttccccccccccccttttttttttttttttttttttttttttttttttttttttttttttttttttttttttatttttgcaagttacgtacagtttttatgcttgagatatttcaacatgttatgtatattggaacttctacagcttgatgcctcctgcttttatagcagtttatggggagcacttgaaagagcgtgtgtacatgtattttttttctaggcaaacattgaatgcaaacgtgtatttttttaatataaatatataactgtccttttcatcccatgttgccgctaagtgatatttcatatgtgtggttatactcataataatgggccttgtaagtcttttcaccattcatgaataataataaatatgtactgctggcatgtaatgcttagttttcttgtatttacttctttttttaaatgtaaggaccaaacttctaaactaattgttcttttgttgctttaatttttaaaaattacattcttctgatgtaacatgtgatacatacaaaagaatatagtttaatatgtattgaaataaaacacaataaaattaacacttga

SEQ ID NO: 325873 - DNA, 2361 bp, Homo sapiens
agcggggtcgttctgggcctaggggaggcgggccgagggcgtctgagctgaggcccgcgtcgatcctgggttggaggaggtggcggccgctgaggctgcggcgtgaagacggcgggcatggtggggcgggagaaagagctctctatacactttgttcccgggagctgtcggctggtggaggaggaagttaacatccctaataggagggttctggttactggtgccactgggcttcttggcagagctgtacacaaagaatttcagcagaataattggcatgcagttggctgtggtttcagaagagcaagaccaaaatttgaacaggttaatctgttggattctaatgcagttcatcacatcattcatgattttcagccccatgttatagtacattgtgcagcagagagaagaccagatgttgtagaaaatcagccagatgctgcctctcaacttaatgtggatgcttctgggaatttagcaaaggaagcagctgctgttggagcatttctcatctacattagctcagattatgtatttgatggaacaaatccaccttacagagaggaagacataccagctcccctaaatttgtatggcaaaacaaaattagatggagaaaaggctgtcctggagaacaatctaggagctgctgttttgaggattcctattctgtatggggaagttgaaaagctcgaagaaagtgctgtgactgttatgtttgataaagtgcagttcagcaacaagtcagcaaacatggatcactggcagcagaggttccccacacatgtcaaagatgtggccactgtgtgccggcagctagcagagaagagaatgctggatccatcaattaagggaacctttcactggtctggcaatgaacagatgactaagtatgaaatggcatgtgcaattgcagatgccttcaacctccccagcagtcacttaagacctattactgacagccctgtcctaggagcacaacgtccgagaaatgctcagcttgactgctccaaattggagaccttgggcattggccaacgaacaccatttcgaattggaatcaaagaatcactttggcctttcctcattgacaagagatggagacaaacggtctttcattagtttatttgtgttgggttcttttttttttttaaatgaaaagtatagtatgtggcactttttaaagaacaaaggaaatagttttgtatgagtactttaattgtgactcttaggatctttcaggtaaatgatgctcttgcactagtgaaattgtctaaagaaactaaagggcagtcatgccctgtttgcagtaatttttctttttatcattttgtttgtcctggctaaacttggagtttgagtatagtaaattatgatccttaaatatttgagagtcaggatgaagcagatctgctgtagacttttcagatgaaattgttcattctcgtaacctccatattttcaggatttttgaagctgttgaccttttcatgttgattattttaaattgtgtgaaatagtataaaaatcattggtgttcattatttgctttgcctgagctcagatcaaaatgtttgaagaaaggaactttatttttgcaagttacgtacagtttttatgcttgagatatttcaacatgttatgtatattggaacttctacagcttgatgcctcctgcttttatagcagtttatggggagcacttgaaagagcgtgtgtacatgtattttttttctaggcaaacattgaatgcaaacgtgtatttttttaatataaatatataactgtccttttcatcccatgttgccgctaagtgatatttcatatgtgtggttatactcataataatgggccttgtaagtcttttcaccattcatgaataataataaatatgtactgctggcatgtaatgcttagttttcttgtatttacttctttttttaaatgtaaggaccaaacttctaaactaattgttcttttgttgctttaatttttaaaaattacattcttctgatgtaacatgtgatacatacaaaagaatatagtttaatatgtattgaaataaaacacaataaaattaacacttgaaaaaaaacaaaacaagataacgcccaaaaagcagagcaaaacaaaacggagggggaatagaactaaacacagagacgaccagcgacacatgagaagcggggacgcacaccaaaaggagcaggaaagcgaattatttagaagaagaaagcatatggaggagagtgacaaaaaggaggggggaaagataggaagattaaaagacacaacagagcacggcagacgaggaaaagtagcgcacaccaccgagggcgaaagggcagccagcacaccagt

SEQ ID NO: 325874 - DNA, 1335 bp, Homo sapiens
ggaccgcgtgggtcgacccacgcgtacgcacatgtcaaagatgtggccactgtgtgccggcagctagcagagaagagaatgctggatccatcaattaagggaacctttcactggtctggcaatgaacagatgactaagtatgaaatggcatgtgcaattgcagatgccttcaacctccccagcagtcacttaagacctattactgacagccctgtcctaggagcacaacgtccgagaaatgctcagcttgactgctccaaattggagaccttgggcattggccaacgaacaccatttcgaattggaatcaaagaatcactttggcctttcctcattgacaagagatggagacaaacggtctttcattagtttatttgtgttgggttcttttttttttttaaatgaaaagtatagtatgtggcactttttaaagaacaaaggaaatagttttgtatgagtactttaattgtgactcttaggatctttcaggtaaatgatgctcttgcactagtgaaattgtctaaagaaactaaagggcagtcatgccctgtttgcagtaatttttctttttatcattttgtttgtcctggctaaacttggagtttgagtatagtaaattatgatccttaaatatttgagagtcaggatgaagcagatctgctgtagacttttcagatgaaattgttcattctcgtaacctccatattttcaggatttttgaagctgttgaccttttcatgttgattattttaaattgtgtgaaatagtataaaaatcattggtgttcattatttgctttgcctgagctcagatcaaaatgtttgaagaaaggaactttatttttgcaagttacgtacagtttttatgcttgagatatttcaacatgttatgtatattggaacttctacagcttgatgcctcctgcttttatagcagtttatggggagcacttgaaagagcgtgtgtacatgtattttttttctaggcaaacattgaatgcaaacgtgtatttttttaatataaatatataactgtccttttcatcccatgttgccgctaagtgatatttcatatgtgtggttatactcataataatgggccttgtaagtcttttcaccattcatgaataataataaatatgtactgctggcatgtaatgcttagttttcttgtatttacttctttttttaaatgtaaggaccaaacttctaaactaattgttcttttgttgctttaatttttaaaaattacattcttctgatgtaacatgtgatacatacaaaagaatatagtttaatatgtattgaaataaaacacaataaaattaacacttga

SEQ ID NO: 325875 - DNA, 412 bp, Homo sapiens
gtttaatgagatacaagacatacttccaggatagagcgcagacagcactcttgacacatatagattgaagggaagaatgctgcatttggccaatctaaggtggcttcctggaggaggcatagaaccatggttgaaaggaggaagaagaatccccagatgagtgcctggaagagcttggagagctcagggctaatggttcagaaactggaattaaactatgaagagattagatacagtttgggattgtggtgcttggaatgctgctcgattgacagggagccactgctgatgggaagggtaggaacaggggatgctggtgacataaccagtggagaagctgaggagcccctcttcactggtacatccttccctttacagtggctggatctctgctctggtggtgccgaagggc

SEQ ID NO: 325876 - DNA, 463 bp, Homo sapiens
gctggaatgggcggtaatgtctttgtcctctacttgcagatccactccttataccgccgcacaggtgccagctttcagaaggcccagcaagaatttgctgctggtgtcttctccaaccctgcggtgcgaacccgagctgccaatgcagccgctggggctgctgaaaatgccttccgggccccgtgacccctgactgggatgccctggccctgctacttgagggagctgacttagctcccgtccctaaggtctctgggacttggagagacatcactaactgatggctcctccgtagtgctcccaatcctatggccatgactgctgaacctgacaggcgtgtggggagttcactgtgacctagtccccccatcaggccacactgctgccacctctcacacgccccaacccagcttccctctgctgtgccacggctgttgcttcggttatttaaataaaaagaaag

SEQ ID NO: 325877 - DNA, 473 bp, Homo sapiens
gctggaatgggcggtaatgtctttgtcctctacttgcagatccactccttataccgccgcacaggtgccagctttcagaaggcccagcaagaatttgctgctggtgtcttctccaaccctgcggtgcgacaccgctgttgcatatgtcccgttggagtttaatatgcactaagtcatttgcagtgcttggagttgtggacacggccttgagtctcggtgcgagtgtgcgtgagtgtgagccaccttgccaagtgcctgcgcagggcccggccgccctccatctgggccgggtgactgggcgccggctgtgtcccgaggcctcaccctgccctcgcctagtctggaagctccgaccgacatcacggagcagccttcaagcattccattacgccccatctcgctctggcgctctccccaccagggcttcagcaggagccctggactcatcatcaataaacactgttacagcaaat

SEQ ID NO: 325878 - DNA, 217 bp, Homo sapiens
ctgaaaaagagggtgttctctcttgcttggacagaattgaaacacttctgcccaaagaacagattcaaaattgggccttgccgtctcatcagtccttgaaagatttctgctgtggaggatctgttgtttttcagtttttctgttctgagaatggaggtgagagagcagctttggcgctctccacgccaaagctgtctctcactccattctcagaaca

SEQ ID NO: 325879 - DNA, 429 bp, Homo sapiens
  misc_feature (156)..(156): n is a, c, g, or t
ggcgtcacgccgacgtcaagtcgaggccgccgccgcggggcctggttatcgccggttcagcgcagcccggagtcgcccaggcctgaactcctacccaggtccccggcccccgccccgggcccgcgaggacaccggaggccaccccccgggggtggnggagcggagccgcggcctagactcaagtctgggtttcagctgccgccagccctattgctgctgttgctgttctctgtccttggcccaggggctgggtctccaggatgagtgtcagtacctccttcagccgcagctgattgtccggcgtttgctggacgtcgctgtgctggttcctggccggccctcagagcaaaccctctccccacacaatcgctcagccctgtacaagtaagtcaaagactccccacacctggtcctttccctcttctgtgg

SEQ ID NO: 325880 - DNA, 2006 bp, Homo sapiens
catggaagttgtgacagctcccagcggcgcgcccctttcgtgtgtgccggtacctcggcttaggagtgcccgctgacaccttgaatgaaggaggccttttcctgactgattactccacctgctcaccccgcaagctgagtcctttccgctcctttgccagcaccgagctcttccacttccatgttcctgaggacacattcctggctgtttggaacctcatcatcttcaaggagcaagggggaacttttggggaccactgcccagaccaaagtgtgactgtgtatttccggtccggggcaccccctgtcatcaatcccctgcatacacacttcccaggggacacagctgtgcctggggttttctcactgaccctcagctggacactgcccaaccgcacctcaggcatctttaacgtcagcagccccttacctggggactggttcttggctgcccaccttccccaggcccacggccacatctctgtcaagggtctccaggatgagtgtcagtacctccttcagccgcagctgattgtccggcgtttgctggacgtcgctgtgctggttcctggccggccctcagagcaaaccctctccccacacaatcgctcagccctgtacaaggtctttgtgcccagcttcacttacagggtttcagcacagctggtgtgtgtggggggccgtggggtatctgcctgccccctgtcactgcgtctgcgtcccaaagccccacccctgcacaactcaagctctgtggcctgtggaggtgcctcaggatgccagctggagctggcactgcccccctgggggcactgggtctacgtgcgtgtggaaacatcatcccggggccctggtaggaccatccgcttccagctgtgtgtgcagttgcaagagtgcccacagcccggcctgctccgagccctggtccctggagctgccatgaacatgccccagtccctgggcaaccagccactgcccccagaaccgccatcccttggaacccctgcggaggggcctgggaccacgtccccacccgagcactgctggccagtgcgcccgactctgcgcaacgagctggacaccttctctgtccacttctacatcttctttggcccaagtgtggcccttccccctgagcgcccagccgtgttcgccatgaggctgttgccagtgctggacagtggaggcgtcctcagcctggagctccagctcaatgcgagctccgtgcgccaggaaaacgtgacggtgtttggatgcttgactcacgaggtgcccttgagcctgggggatgcagcagtgacctgttccaaagagtccctggccggcttcctcctctctgtcagtgccaccaccagggttgccaggctgcgaatcccattcccgcagacggggacctggttcctggccctccgctccctgtgcggggtggggcctcggttcgtgcggtgccgcaacgcgacggccgaggtgcggatgcgcaccttcctgtccccatgcgtggacgactgcgggccctacggccagtgcaagctgctgcgcacacacaattatctgtacgcagcctgcgagtgcaaggccgggtggagaggctggggctgcaccgacagtgcagatgcgctcacctatggattccagctgctgtccacactcctgctctgcctgagcaacctcatgtttctgccacctgtggtcctggccattcggagtcgatatgtgctggaagctgcagtctacaccttcaccatgttcttctccacggtatgcggtggtgtctgcatcttatcactgggtgcttgtgcatggtggtgggtcacagtctgtatttccaccacgttctccgagggtttgggaatgtctgtgccttcactgtgtcttctacagacagagacagcagtgcttcccaaactgtcatgcatagataatggtcatttttgtaagacacattggagtaaatgaacaaaactgtttgcaacttaataaagtaagtttgggcctcaaaaaaaaaaa

SEQ ID NO: 325881 - DNA, 3040 bp, Homo sapiens
ggcgtcacgccgacgtcaagtcgaggccgccgccgcggggcctggttatcgccggttcagcgcagcccggagtcgcccaggcctgaactcctacccagcctagactcaagtctgggtttcagctgccgccagccctattgctgctgttgctgttctctgtccttggcccaggggctggaggccttttcctgactgattactccacctgctcaccccgcaagctgagtcctttccgctcctttgccagcaccgagctcttccacttccatgttcctgaggacacattcctggctgtttggaacctcatcatcttcaaggagcaagggggaacttttggggaccactgcccagaccaaagtgtgactgtgtatttccggtccggggcaccccctgtcatcaatcccctgcatacacacttcccaggggacacagctgtgcctggggttttctcactgaccctcagctggacactgcccaaccgcacctcaggcatctttaacgtcagcagccccttacctggggactggttcttggctgcccaccttccccaggcccacggccacatctctgtcaagggtctccaggatgagtgtcagtacctccttcagccgcagctgattgtccggcgtttgctggacgtcgctgtgctggttcctggccggccctcagagcaaaccctctccccacacaatcgctcagccctgtacaaggtctttgtgcccagcttcacttacagggtttcagcacagctggtgtgtgtggggggccgtggggtatctgcctgccccctgtcactgcgtctgcgtcccaaagccccacccctgcacaactcaagctctgtggcctgtggaggtgcctcaggatgccagctggagctggcactgcccccctgggggcactgggtctacgtgcgtgtggaaacatcatcccggggccctggtaggaccatccgcttccagctgtgtgtgcagttgcaagagtgcccacagcccggcctgctccgagccctggtccctggagctgccatgaacatgccccagtccctgggcaaccagccactgcccccagaaccgccatcccttggaacccctgcggaggggcctgggaccacgtccccacccgagcactgctggccagtgcgcccgactctgcgcaacgagctggacaccttctctgtccacttctacatcttctttggcccaagtgtggcccttccccctgagcgcccagccgtgttcgccatgaggctgttgccagtgctggacagtggaggcgtcctcagcctggagctccagctcaatgcgagctccgtgcgccaggaaaacgtgacggtgtttggatgcttgactcacgaggtgcccttgagcctgggggatgcagcagtgacctgttccaaagagtccctggccggcttcctcctctctgtcagtgccaccaccagggttgccaggctgcgaatcccattcccgcagacggggacctggttcctggccctccgctccctgtgcggggtggggcctcggttcgtgcggtgccgcaacgcgacggccgaggtgcggatgcgcaccttcctgtccccatgcgtggacgactgcgggccctacggccagtgcaagctgctgcgcacacacaattatctgtacgcagcctgcgagtgcaaggccgggtggagaggctggggctgcaccgacagtgcagatgcgctcacctatggattccagctgctgtccacactcctgctctgcctgagcaacctcatgtttctgccacctgtggtcctggccattcggagtcgatatgtgctggaagctgcagtctacaccttcaccatgttcttctccacgttctatcatgcctgtgaccagccaggcatcgtggttttctgcatcatggactacgatgtgctgcagttctgtgatttcctgggctccttaatgtccgtgtgggtcactgtcattgccatggctcgtttacagcccgtggtcaagcaggtgctgtatttgctgggagctatgctgctgtccatggctctgcagcttgaccgacatggactctggaacctgcttggacccagtctcttcgccctggggatcttggccacagcctggacagtacgcagcgtccgccgccggcactgctacccacccacgtggcgccgctggcttttctacttgtgccctggcagccttattgcaggcagtgccgtcctgctttatgcttttgtggagacccgggacaactacttctacattcacagcatttggcatatgctcattgcgggcagtgtgggcttcctgctgccccctcgtgccaagactgaccacggggtcccatctggagcccgggcccggggctgtggttaccagctatgcatcaacgagcaggaggagctgggcctcgtgggcccaggaggggccactgtcagcagcatctgtgccagctgagaggggctttgggcctggccctgaggggatatgaatgcttcctagagttctttctgggggtgtggagccctcttagaaggagacaggctgtatttcttgaggacatggagtctttctcaaggacacaaaactcttccagggacctggagcccttcccaggacatggagaacttcctgagggcctggagtccccctgcatcatggagtccttcttaaggactggagcctatgcaggcacagagtccctcaggaccaaggagtccctcctgcaggtgtggagcctttcctgggatgcagagccttcccaagacatggattccttcccagggagacaaagccctgtcaggagcacagcatctttccagaggaggtggagtctatcttggggaaaccaaatttccagattttcccagaggctcagcaactctggcctcaggcttccttcccagaggcagcgtctgggctgtgctgtgctgtggaggagggattgcaggatggatggagctgggactggggctgtctgggtggctggtatcctcgtttgatacaggtggagtctgtgtgtctccagtgattgattggttcagaaaagttct

SEQ ID NO: 325882 - DNA, 1941 bp, Homo sapiens
  misc_feature (514)..(514): n is a, c, g, or t
  misc_feature (660)..(660): n is a, c, g, or t
gggactggccagccagaggaagagggcatgaggacacagccagcagcagttactgggtcgtgatgacgcagacctgccgggacacccccgtgggctcgaggcattggatgggcctgagagctgaagcaggggcacttgcaggaatggcacttgaagccacctgcctggctttacagggcagcctcctggaagcctccatgaaacgcagctttccctgggccacacactgcctggctccacaaaggcgaacaacacagcctgctttgccccggatattcctggttttggcattaaatgtccacagcctgagaaatccttcagtctcgggcaaatgggacgtttggtgaccctaccaccatgtatctttgattttagactcccctgaccaatgggagggctgcaagcactggctgggcctggcggaggtggtctttggtcatctctgtggtggctgaagtcccattagcctggcagggccccctctcttaccaccagaaatggatcctttcccaangctgctccccatcacaagcccttcctttcatcccattcctgccggttcagcgcagcccggagtcgcccaggcctgaactcctacccaggtccccggcccccgccccgggcccgcgaggacaccggaggccaccccccgggggtggnggagcggagccgcggcctagactcaagtctgggtttcagctgccgccagccctattgctgctgttgctgttctctgtccttggcccaggggctggaggccttttcctgactgattactccacctgctcaccccgcaagctgagtcctttccgctcctttgccagcaccgagctcttccacttccatgttcctgaggacacattcctggctgtttggaacctcatcatcttcaaggagcaagggggaacttttggggaccactgcccagaccaaagtgtgactgtgtatttccggtccggggcaccccctgtcatcaatcccctgcatacacacttcccaggggacacagctgtgcctggggttttctcactgaccctcagctggacactgcccaaccgcacctcaggcatctttaacgtcagcagccccttacctggggactggttcttggctgcccaccttccccaggcccacggccacatctctgtcaagagctccgtgcgccaggaaaacgtgacggtgtttggatgcttgactcacgaggtgcccttgagcctgggggatgcagcagtgacctgttccaaagagtccctggccggcttcctcctctctgtcagtgccaccaccagggttgccaggctgcgaatcccattcccgcagacggggacctggttcctggccctccgctccctgtgcggggtggggcctcggttcgtgcggtgccgcaacgcgacggccgaggtgcggatgcgcaccttcctgtccccatgcgtggacgactgcgggccctacggccagtgcaagctgctgcgcacacacaattatctgtacgcagcctgcgagtgcaaggccgggtggagaggctggggctgcaccgacagtgcagatgcgctcacctatggattccagctgctgtccacactcctgctctgcctgagcaacctcatgtttctgccacctgtggtcctggccattcggagtcgatatgtgctggaagctgcagtctacaccttcaccatgttcttctccacggtatgcggtggtgtctgcatcttatcactgggtgcttgtgcatggtggtgggtcacagtctgtatttccaccacgttctccgagggtttgggaatgtctgtgccttcactgtgtcttctacagacagagacagcagtgcttcccaaactgtcatgcatagataatggtcatttttgtaagacacattggagtaaatgaacaaaactgtttgcaacttaataaagtaagtttgggcctcaaaaaaaaaaa

SEQ ID NO: 325883 - DNA, 1419 bp, Homo sapiens
ggcgtcacgccgacgtcaagtcgaggccgccgccgcggggcctggttatcgccggttcagcgcagcccggagtcgcccaggcctgaactcctacccagcctagactcaagtctgggtttcagctgccgccagccctattgctgctgttgctgttctctgtccttggcccaggggctggaggccttttcctgactgattactccacctgctcaccccgcaagctgagtcctttccgctcctttgccagcaccgagctcttccacttccatgttcctgaggacacattcctggctgtttggaacctcatcatcttcaaggagcaagggggaacttttggggaccactgcccagaccaaagtgtgactgtgtatttccggtccggggcaccccctgtcatcaatcccctgcatacacacttcccaggggacacagctgtgcctggggttttctcactgaccctcagctggacactgcccaaccgcacctcaggcatctttaacgtcagcagccccttacctggggactggttcttggctgcccaccttccccaggcccacggccacatctctgtcaagggtctccaggatgagtgtcagtacctccttcagccgcagctgattgtccggcgtttgctggacgtcgctgtgctggttcctggccggccctcagagcaaaccctctccccacacaatcgctcagccctgtacaaggtctttgtgcccagcttcacttacagggtttcagcacagctggtgtgtgtggggggccgtggggtatctgcctgccccctgtcactgcgtctgcgtcccaaagccccacccctgcacaactcaagctctgtggcctgtggaggtgcctcaggatgccagctggagctggcactgcccccctgggggcactgggtctacgtgcgtgtggaaacatcatcccggggccctggtaggaccatccgcttccagctgtgtgtgcagttgcaagagtgcccacagcccggcctgctccgagccctggtccctggagctgccatgaacatgccccagtccctgggcaaccagccactgcccccagaaccgccatcccttggaacccctgcggaggggcctgggaccacgtccccacccgagcactgctggccagtgcgcccgactctgcgcaacgagctggacaccttctctgtccacttctacatcttctttggcccaagtgtggcccttccccctgagcgcccagccgtgttcgccatgaggctgttgccagtgctggacagtggaggcgtcctcagcctggagctccagctcaatgcggtactctttatggagagtggggaggttgctctgccagggagcttgaaggggaaggtgtcaggggtgttggggtgtttacctcctccaggaagcctgtccaggttgctcccaccca

SEQ ID NO: 325884 - DNA, 2670 bp, Homo sapiens
  misc_feature (514)..(514): n is a, c, g, or t
  misc_feature (660)..(660): n is a, c, g, or t
gggactggccagccagaggaagagggcatgaggacacagccagcagcagttactgggtcgtgatgacgcagacctgccgggacacccccgtgggctcgaggcattggatgggcctgagagctgaagcaggggcacttgcaggaatggcacttgaagccacctgcctggctttacagggcagcctcctggaagcctccatgaaacgcagctttccctgggccacacactgcctggctccacaaaggcgaacaacacagcctgctttgccccggatattcctggttttggcattaaatgtccacagcctgagaaatccttcagtctcgggcaaatgggacgtttggtgaccctaccaccatgtatctttgattttagactcccctgaccaatgggagggctgcaagcactggctgggcctggcggaggtggtctttggtcatctctgtggtggctgaagtcccattagcctggcagggccccctctcttaccaccagaaatggatcctttcccaangctgctccccatcacaagcccttcctttcatcccattcctgccggttcagcgcagcccggagtcgcccaggcctgaactcctacccaggtccccggcccccgccccgggcccgcgaggacaccggaggccaccccccgggggtggnggagcggagccgcggcctagactcaagtctgggtttcagctgccgccagccctattgctgctgttgctgttctctgtccttggcccaggggctggaggccttttcctgactgattactccacctgctcaccccgcaagctgagtcctttccgctcctttgccagcaccgagctcttccacttccatgttcctgaggacacattcctggctgtttggaacctcatcatcttcaaggagcaagggggaacttttggggaccactgcccagaccaaagtgtgactgtgtatttccggtccggggcaccccctgtcatcaatcccctgcatacacacttcccaggggacacagctgtgcctggggttttctcactgaccctcagctggacactgcccaaccgcacctcaggcatctttaacgtcagcagccccttacctggggactggttcttggctgcccaccttccccaggcccacggccacatctctgtcaagggtctccaggatgagtgtcagtacctccttcagccgcagctgattgtccggcgtttgctggacgtcgctgtgctggttcctggccggccctcagagcaaaccctctccccacacaatcgctcagccctgtacaaggtctttgtgcccagcttcacttacagggtttcagcacagctggtgtgtgtggggggccgtggggtatctgcctgccccctgtcactgcgtctgcgtcccaaagccccacccctgcacaactcaagctctgtggcctgtggaggtgcctcaggatgccagctggagctggcactgcccccctgggggcactgggtctacgtgcgtgtggaaacatcatcccggggccctggtaggaccatccgcttccagctgtgtgtgcagttgcaagagtgcccacagcccggcctgctccgagccctggtccctggagctgccatgaacatgccccagtccctgggcaaccagccactgcccccagaaccgccatcccttggaacccctgcggaggggcctgggaccacgtccccacccgagcactgctggccagtgcgcccgactctgcgcaacgagctggacaccttctctgtccacttctacatcttctttggcccaagtgtggcccttccccctgagcgcccagccgtgttcgccatgaggctgttgccagtgctggacagtggaggcgtcctcagcctggagctccagctcaatgcgagctccgtgcgccaggaaaacgtgacggtgtttggatgcttgactcacgaggtgcccttgagcctgggggatgcagcagtgacctgttccaaagagtccctggccggcttcctcctctctgtcagtgccaccaccagggttgccaggctgcgaatcccattcccgcagacggggacctggttcctggccctccgctccctgtgcggggtggggcctcggttcgtgcggtgccgcaacgcgacggccgaggtgcggatgcgcaccttcctgtccccatgcgtggacgactgcgggccctacggccagtgcaagctgctgcgcacacacaattatctgtacgcagcctgcgagtgcaaggccgggtggagaggctggggctgcaccgacagtgcagatgcgctcacctatggattccagctgctgtccacactcctgctctgcctgagcaacctcatgtttctgccacctgtggtcctggccattcggagtcgatatgtgctggaagctgcagtctacaccttcaccatgttcttctccacggtatgcggtggtgtctgcatcttatcactgggtgcttgtgcatggtggtgggtcacagtctgtatttccaccacgttctccgagggtttgggaatgtctgtgccttcactgtgtcttctacagacagagacagcagtgcttcccaaactgtcatgcatagataatggtcatttttgtaagacacattggagtaaatgaacaaaactgtttgcaacttaataaagtaagtttgggcctcaaaaaaaaaaa

SEQ ID NO: 325885 - DNA, 2093 bp, Homo sapiens
ggcgtcacgccgacgtcaagtcgaggccgccgccgcggggcctggttatcgccggttcagcgcagcccggagtcgcccaggcctgaactcctacccagcctagactcaagtctgggtttcagctgccgccagccctattgctgctgttgctgttctctgtccttggcccaggggctggaggccttttcctgactgattactccacctgctcaccccgcaagctgagtcctttccgctcctttgccagcaccgagctcttccacttccatgttcctgaggacacattcctggctgtttggaacctcatcatcttcaaggagcaagggggaacttttggggaccactgcccagaccaaagtgtgactgtgtatttccggtccggggcaccccctgtcatcaatcccctgcatacacacttcccaggggacacagctgtgcctggggttttctcactgaccctcagctggacactgcccaaccgcacctcaggcatctttaacgtcagcagccccttacctggggactggttcttggctgcccaccttccccaggcccacggccacatctctgtcaagggtctccaggatgagtgtcagtacctccttcagccgcagctgattgtccggcgtttgctggacgtcgctgtgctggttcctggccggccctcagagcaaaccctctccccacacaatcgctcagccctgtacaaggtctttgtgcccagcttcacttacagggtttcagcacagctggtgtgtgtggggggccgtggggtatctgcctgccccctgtcactgcgtctgcgtcccaaagccccacccctgcacaactcaagctctgtggcctgtggaggtgcctcaggatgccagctggagctggcactgcccccctgggggcactgggtctacgtgcgtgtggaaacatcatcccggggccctggtaggaccatccgcttccagctgtgtgtgcagttgcaagagtgcccacagcccggcctgctccgagccctggtccctggagctgccatgaacatgccccagtccctgggcaaccagccactgcccccagaaccgccatcccttggaacccctgcggaggggcctgggaccacgtccccacccgagcactgctggccagtgcgcccgactctgcgcaacgagctggacaccttctctgtccacttctacatcttctttggcccaagtgtggcccttccccctgagcgcccagccgtgttcgccatgaggctgttgccagtgctggacagtggaggcgtcctcagcctggagctccagctcaatgcgagctccgtgcgccaggaaaacgtgacggtgtttggatgcttgactcacgaggtgcccttgagcctgggggatgcagcagtgacctgttccaaagagtccctggccggcttcctcctctctgtcagtgccaccaccagggttgccaggctgcgaatcccattcccgcagacggggacctggttcctggccctccgctccctgtgcggggtggggcctcggttcgtgcggtgccgcaacgcgacggccgaggtgcggatgcgcaccttcctgtccccatgcgtggacgactgcgggccctacggccagtgcaagctgctgcgcacacacaattatctgtacgcagcctgcgagtgcaaggccgggtggagaggctggggctgcaccgacagtgcagatgcgctcacctatggattccagctgctgtccacactcctgctctgcctgagcaacctcatgtttctgccacctgtggtcctggccattcggagtcgatatgtgctggaagctgcagtctacaccttcaccatgttcttctccacggtatgcggtggtgtctgcatcttatcactgggtgcttgtgcatggtggtgggtcacagtctgtatttccaccacgttctccgagggtttgggaatgtctgtgccttcactgtgtcttctacagacagagacagcagtgcttcccaaactgtcatgcatagataatggtcatttttgtaagacacattggagtaaatgaacaaaactgtttgcaacttaataaagtaagtttgggcctcaaaaaaaaaaa

SEQ ID NO: 325886 - DNA, 2717 bp, Homo sapiens
ggcgtcacgccgacgtcaagtcgaggccgccgccgcggggcctggttatcgccggttcagcgcagcccggagtcgcccaggcctgaactcctacccaggctctctggcacaccagccttgtgtcagggtgggcagcagcacaagggtggctggggcggggcatggctaaaggccagcaggtcacccagtgggtcagaggccatgatctggaggaggcaacttggcagccccaggaggacatgctgggtccagggtctccaggatgagtgtcagtacctccttcagccgcagctgattgtccggcgtttgctggacgtcgctgtgctggttcctggccggccctcagagcaaaccctctccccacacaatcgctcagccctgtacaaggtctttgtgcccagcttcacttacagggtttcagcacagctggtgtgtgtggggggccgtggggtatctgcctgccccctgtcactgcgtctgcgtcccaaagccccacccctgcacaactcaagctctgtggcctgtggaggtgcctcaggatgccagctggagctggcactgcccccctgggggcactgggtctacgtgcgtgtggaaacatcatcccggggccctggtaggaccatccgcttccagctgtgtgtgcagttgcaagagtgcccacagcccggcctgctccgagccctggtccctggagctgccatgaacatgccccagtccctgggcaaccagccactgcccccagaaccgccatcccttggaacccctgcggaggggcctgggaccacgtccccacccgagcactgctggccagtgcgcccgactctgcgcaacgagctggacaccttctctgtccacttctacatcttctttggcccaagtgtggcccttccccctgagcgcccagccgtgttcgccatgaggctgttgccagtgctggacagtggaggcgtcctcagcctggagctccagctcaatgcgagctccgtgcgccaggaaaacgtgacggtgtttggatgcttgactcacgaggtgcccttgagcctgggggatgcagcagtgacctgttccaaagagtccctggccggcttcctcctctctgtcagtgccaccaccagggttgccaggctgcgaatcccattcccgcagacggggacctggttcctggccctccgctccctgtgcggggtggggcctcggttcgtgcggtgccgcaacgcgacggccgaggtgcggatgcgcaccttcctgtccccatgcgtggacgactgcgggccctacggccagtgcaagctgctgcgcacacacaattatctgtacgcagcctgcgagtgcaaggccgggtggagaggctggggctgcaccgacagtgcagatgcgctcacctatggattccagctgctgtccacactcctgctctgcctgagcaacctcatgtttctgccacctgtggtcctggccattcggagtcgatatgtgctggaagctgcagtctacaccttcaccatgttcttctccacgttctatcatgcctgtgaccagccaggcatcgtggttttctgcatcatggactacgatgtgctgcagttctgtgatttcctgggctccttaatgtccgtgtgggtcactgtcattgccatggctcgtttacagcccgtggtcaagcaggtgctgtatttgctgggagctatgctgctgtccatggctctgcagcttgaccgacatggactctggaacctgcttggacccagtctcttcgccctggggatcttggccacagcctggacagtacgcagcgtccgccgccggcactgctacccacccacgtggcgccgctggcttttctacttgtgccctggcagccttattgcaggcagtgccgtcctgctttatgcttttgtggagacccgggacaactacttctacattcacagcatttggcatatgctcattgcgggcagtgtgggcttcctgctgccccctcgtgccaagactgaccacggggtcccatctggagcccgggcccggggctgtggttaccagctatgcatcaacgagcaggaggagctgggcctcgtgggcccaggaggggccactgtcagcagcatctgtgccagctgagaggggctttgggcctggccctgaggggatatgaatgcttcctagagttctttctgggggtgtggagccctcttagaaggagacaggctgtatttcttgaggacatggagtctttctcaaggacacaaaactcttccagggacctggagcccttcccaggacatggagaacttcctgagggcctggagtccccctgcatcatggagtccttcttaaggactggagcctatgcaggcacagagtccctcaggaccaaggagtccctcctgcaggtgtggagcctttcctgggatgcagagccttcccaagacatggattccttcccagggagacaaagccctgtcaggagcacagcatctttccagaggaggtggagtctatcttggggaaaccaaatttccagattttcccagaggctcagcaactctggcctcaggcttccttcccagaggcagcgtctgggctgtgctgtgctgtggaggagggattgcaggatggatggagctgggactggggctgtctgggtggctggtatcctcgtttgatacaggtggagtctgtgtgtctccagtgattgattggttcagaaaagttct

SEQ ID NO: 325887 - DNA, 1090 bp, Homo sapiens
ctgaaaaagagggtgttctctcttgcttggacagaattgaaacacttctgcccaaagaacagattcaaaattgggccttgccgtctcatcagtccttgaaagatttctgctgtggaggatctgttgtttttcagtttttctgttctgagaatggaggtgagagagcagctttggcgtggagagcgccgggaggaatgggctgtccttggaaggtgtgggttaacaggggtgggagtctgagggtggcggtgggtggagatggaggatgtggcggcctcacttccatacctgccctccccagagctccgtgcgccaggaaaacgtgacggtgtttggatgcttgactcacgaggtgcccttgagcctgggggatgcagcagtgacctgttccaaagagtccctggccggcttcctcctctctgtcagtgccaccaccagggttgccaggctgcgaatcccattcccgcagacggggacctggttcctggccctccgctccctgtgcggggtggggcctcggttcgtgcggtgccgcaacgcgacggccgaggtgcggatgcgcaccttcctgtccccatgcgtggacgactgcgggccctacggccagtgcaagctgctgcgcacacacaattatctgtacgcagcctgcgagtgcaaggccgggtggagaggctggggctgcaccgacagtgcagatgcgctcacctatggattccagctgctgtccacactcctgctctgcctgagcaacctcatgtttctgccacctgtggtcctggccattcggagtcgatatgtgctggaagctgcagtctacaccttcaccatgttcttctccacggtatgcggtggtgtctgcatcttatcactgggtgcttgtgcatggtggtgggtcacagtctgtatttccaccacgttctccgagggtttgggaatgtctgtgccttcactgtgtcttctacagacagagacagcagtgcttcccaaactgtcatgcatagataatggtcatttttgtaagacacattggagtaaatgaacaaaactgtttgcaacttaataaagtaagtttgggcctcaaaaaaaaaaa

SEQ ID NO: 325888 - DNA, 199 bp, Homo sapiens
ttttcaaacagctttattgagatataactcacatactgtactatctatccatttaaaatgtgtaatttaatggtttttagtatgttcacagagttgtgcaaccgtgctcaccacaaccaattttagaacatttttatcaccccataaagaaagcctgtgcatcctcctccagttcctccacaccccccaaccctaggga

SEQ ID NO: 325889 - DNA, 415 bp, Homo sapiens
cttcctggggagacagctggtactgagaagaagaggaaataagattatatctataaatacaaattcagattataggattacttttaaaagtcagatactagactttaggccagggaatacaaaattcctgttttatcaccacacaggtgacaacagagggaagtaggcttcctatatgacaatagggagcagtgggactgtgtttaaataaagagaacattcaccacccaaagtggggagacactattcagctctagtctcttgctgatatttggaaacacagacccaggctaccatatcctccaattctttaaaagtaattggaaagtcaagagtttttatgaaagttaaagaaagaggacattaacaatgaaggaaggtttatgagcaagcagggaggaatgaaatccaaaca

SEQ ID NO: 325890 - DNA, 420 bp, Homo sapiens
gcctcctaggcctaggtgtctgccctagctggagaaaggcacaagaagaaaacaccagtcaatgggagaaaagtcccccaggccagtcttccacctagagcccctcccctttctcaccacaaagattgcttcactgagggcggggcgcagtggctcacgcctgtaatcttaacactttgggaggccaagacaggcgatcacttgaggtcaggagttcaagaccatcctgaccaacatggcaaaaccccgccttcattaaaaatgcaaaaattagccaggcatgatggtacacacctgtagtcccagctattggggaggctgaagcaggagaatcgcttgaacccaggaggtggaggttgcagtgagtcgagatcgcgccactgcactccagcctgggtgacagaatgagactctgtctca

SEQ ID NO: 325891 - DNA, 277 bp, Homo sapiens
aggggaattttgccatatatttgctatccctggactgcagagacacagattagaattttggaatagctgtgatagcaggtaatcaggaactatattccttcagtcatatataaggacttgctgtaagcactgtggaaatgtatataaaatatactgctaagatagaatttactagatatggacactgattcatttactcggcaaaaatatgtggtggccaaaaagaagccagggataagagaataaaatgtaaactctgctctcaaggaactcacag

SEQ ID NO: 325892 - DNA, 150 bp, Homo sapiens
attcttccgggcctcactctatttattgatcatcctcctggtcattagcagctagtttttcactctactggtgcctttcccctgtcttagaaacactttccctcaactcatttttctaccctttcaaatgatcactcttctctttatttt

SEQ ID NO: 325893 - DNA, 190 bp, Homo sapiens
atctgcaagtcacacccttctatagaagtaaaactgccttgctgagaaaattaaatttatgttcgagtgctatttataacaattccatcataaatcaaggagcacctgtatatttgtacatatgtgtgtatacatatataatgatgaaaatttagtatagttacctttctgaatcatttttatagctgtg

SEQ ID NO: 325894 - DNA, 2599 bp, Homo sapiens
  misc_feature (452)..(452): n is a, c, g, or t
  misc_feature (1541)..(1541): n is a, c, g, or t
  misc_feature (1778)..(1778): n is a, c, g, or t
cagatccttggcttaaaattcctcttctcattccatgcagaggctcacagaagggttctggagggacatggaactgggacaggtgcaggggacacaggaggtggttcttctcagtactgggaagcttgggcaaaatggtaggcagtaggccgggtgtggtggcccacgcctgtaatcccagcactttgggaggccgaggtgggcggatcacgaggtcaggagatcgagaccatcctggctaacacagtgaaaccccgtctctactaaaaatacaaaaaattagccgggcgtggtggtgggcgcctgtatcccagctactcgggaggctgaggcaggagaatggcgtgaacttgggaggcggagcttgcagtgagccgagatcgcgccactgcactccagcctgggcgacagagcaagactccgtctcaaaaaaaaaaaaaaaaaaggcagcnaagcagagcttgggaaaggtgagagctacgcaatggggtggatgggcatcctgaggcttaaaggaaactcacaggccggcaaagggcccctcccttttgcccattcaccctggctggcctgcctttctcttgccagatgaagttgggaagggtaacaaccactgcgtcccctgcaaggcagggcacttccagaatacctcctcccccagcgcccgctgccagccccacaccaggtgagtgcagccccacccaagctccttccaccctctgagaagcctcagctgctaacaacccccagcgcctatccttgacaccacggactcgactcaccactttcagcctccccgcctgcccagtggagtcgggacactggtgggccagggcgtgaaaaggtcatcatctttttttcctctgcaggtgtgagaaccaaggtctggtggaggcagctccaggcactgcccagtccgacacaacctgcaaaaatccattagagccactgcccccagagatgtcaggtgagggaccagggctgagggacacaggggggggcgcctctgaaaatgccttaatgctccacatcttaaaaaaaatggggaaaagatgaacacttccctcccagaattgggcaagaagaaagttccttacagaaaaaattggagtatctctaggctagtttacacacacacacacacacacacacacacacttttaaaattatatatactgtaatactatgtcaaggaacacatcccacactgagatgtaatgataactactattgtcatcattttgggcttaccaacattacacaatccgtttttttttttcacacaatccattaactagaccaaacacctctttattagactatatacttttattattagacagaagattcccatttgactctttcttgactgtttcctgtggactgattggcttgctagcctagtagatgactattgtttctaatgactgtaacatcactaattggcagaaggttcactgtgtgtgttgggcactctgtaaccactttacatttactaactcatttaatcttcttaatgatgctatgaagtagattctatnatcatcctcatggactgaaggaagaaaccgaggctcaaagaggttaagtgatatactcaagatcacccacacaggtggtcactggtgttattagaacctgtactcaggttttcttactccagagcccatgtcataatgcatgcactatagaaaattagagacttcagataagcaaaactaaaaactcacccacagagccactacctagaatatccactcgttacattgtggtatatntcctcccggacattttctatgcatgtttatacatactgggttttgttgttgtttactaaaagtgaagtaattttaatatttcgtaacctgattttttcattccacaatctaagtatttttctgtgccctgttaatttttaactatgtatcaaatacaactggcattttagagctggaattttagagagtatgtaagctaacctcatcctatatatgaaaaactgatgcccaaagaagtgaaatgacttaaaagtcacacagccgggcaggaaaccgtggcccagactcccagtccagtttctccccaggcctcccatcccatattcccttaggctacagatttacatgaatgagaagaggcaaaatgcccagcatagaaatgcgggagtcctcccgcccttccccaggcgtagctgacggacactggaggctccatgctattgctggcagcactggtacccagagaaagagaaattacccactgctacagatcacagctggagaagccgaactccagcctctctttctcttcccctcctagaacctgccctgagcaagggggtggagaacttgcaagccctgctctaccaggcgtccacaggcagttccgaagcaagtttccctactctctcacccctgtaaacacccccacaggtacaggtacagcaggacaaccctagctcctctacagcagcccctctgtacaatggctgaggccacagaaatgtggctctagcctgtgtctgtttacaactccaagtcccacccttccctactgtctcccaatcccacttccagaccttgaaaatcaactgcctaag

SEQ ID NO: 325895 - DNA, 2167 bp, Homo sapiens
ccactcccacttcctgagctccgccgtgggagccctggaggcccggcctggccgctcccggccctggggtgcacatcggccctgagtcccgtcccaggctctgggctcgggcagccgccgccaccgctgcccaggacgtcgggcctcctgccttcctcccaggcccccacgttgctggccgcctggccgagtggccgccatgctcctgccttgggccacctctgcccccggcctggcctgggggcctctggtgctgggcctcttcgggctcctggcagcatcgcagccccaggcggtgcctccatatgcgtcggagaaccagacctgcagggaccaggaaaaggaatactatgagccccagcaccgcatctgctgctcccgctgcccgccaggcacctatgtctcagctaaatgtagccgcatccgggacacagtttgtgccacatgtgccgagaattcctacaacgagcactggaactacctgaccatctgccagctgtgccgcccctgtgacccagtgatgggcctcgaggagattgccccctgcacaagcaaacggaagacccagtgccgctgccagccgggaatgttctgtgctgcctgggccctcgagtgtacacactgcgagctactttctgactgcccgcctggcactgaagccgagctcaaagatgaagttgggaagggtaacaaccactgcgtcccctgcaaggcagggcacttccagaatacctcctcccccagcgcccgctgccagccccacaccaggtgtgagaaccaaggtctggtggaggcagctccaggcactgcccagtccgacacaacctgcaaaaatccattagagccactgcccccagagatgtcaggaaccatgctgatgctggccgttctgctgccactggccttctttctgctccttgccaccgtcttctcctgcatctggaagagccacccttctctctgcaggaaactgggatcgctgctcaagaggcgtccgcagggagagggacccaatcctgtagctggaagctgggagcctccgaaggcccatccatacttccctgacttggtacagccactgctacccatttctggagatgtttccccagtatccactgggctccccgcagccccagttttggaggcaggggtgccgcaacagcagagtcctctggacctgaccagggagccgcagttggaacccggggagcagagccaggtggcccacggtaccaatggcattcatgtcaccggcgggtctatgactatcactggcaacatctacatctacaatggaccagtactggggggaccaccgggtcctggagacctcccagctacccccgaacctccataccccattcccgaagagggggaccctggccctcccgggctctctacaccccaccaggaagatggcaaggcttggcacctagcggagacagagcactgtggtgccacaccctctaacaggggcccaaggaaccaatttatcacccatgactgacggagtctgagaaaaggcagaagaaggggggcacaagggcaccttctcccttgaggctgccctgcccacgtgggattcacaggggcctgagtagggcccggggaagcagagccctaagggattaaggctcagacacctctgagagcaggtgggcactggctgggtacggtgccctccacaggactctccctactgcctgagcaaacctgaggcctcccggcagacccacccaccccctggggctgctcagcctcaggcacggacagggcacatgataccaactgctgcccactacggcacgccgcaccggagcacggcaccgagggagccgccacacggtcacctgcaaggacgtcacgggcccctctaaaggattcgtggtgctcatccccaagcttcagagaccctttggggttccacacttcacgtggactgaggtagaccctgcatgaagatgaaattatagggaggacgctccttccctcccctcctagaggagaggaaagggagtcattaacaactagggggttgggtaggattcctaggtatggggaagagttttggaaggggaggaaaatggcaagtgtatttatattgtaaccacatgcaaataaaaagaatgggacctaaactcgtgccgctcgtgccgaattcctgcag

SEQ ID NO: 325896 - DNA, 2415 bp, Homo sapiens
  misc_feature (452)..(452): n is a, c, g, or t
  misc_feature (1357)..(1357): n is a, c, g, or t
  misc_feature (1594)..(1594): n is a, c, g, or t
cagatccttggcttaaaattcctcttctcattccatgcagaggctcacagaagggttctggagggacatggaactgggacaggtgcaggggacacaggaggtggttcttctcagtactgggaagcttgggcaaaatggtaggcagtaggccgggtgtggtggcccacgcctgtaatcccagcactttgggaggccgaggtgggcggatcacgaggtcaggagatcgagaccatcctggctaacacagtgaaaccccgtctctactaaaaatacaaaaaattagccgggcgtggtggtgggcgcctgtatcccagctactcgggaggctgaggcaggagaatggcgtgaacttgggaggcggagcttgcagtgagccgagatcgcgccactgcactccagcctgggcgacagagcaagactccgtctcaaaaaaaaaaaaaaaaaaggcagcnaagcagagcttgggaaaggtgagagctacgcaatggggtggatgggcatcctgaggcttaaaggaaactcacaggccggcaaagggcccctcccttttgcccattcaccctggctggcctgcctttctcttgccagatgaagttgggaagggtaacaaccactgcgtcccctgcaaggcagggcacttccagaatacctcctcccccagcgcccgctgccagccccacaccaggtgtgagaaccaaggtctggtggaggcagctccaggcactgcccagtccgacacaacctgcaaaaatccattagagccactgcccccagagatgtcaggtgagggaccagggctgagggacacaggggggggcgcctctgaaaatgccttaatgctccacatcttaaaaaaaatggggaaaagatgaacacttccctcccagaattgggcaagaagaaagttccttacagaaaaaattggagtatctctaggctagtttacacacacacacacacacacacacacacacttttaaaattatatatactgtaatactatgtcaaggaacacatcccacactgagatgtaatgataactactattgtcatcattttgggcttaccaacattacacaatccgtttttttttttcacacaatccattaactagaccaaacacctctttattagactatatacttttattattagacagaagattcccatttgactctttcttgactgtttcctgtggactgattggcttgctagcctagtagatgactattgtttctaatgactgtaacatcactaattggcagaaggttcactgtgtgtgttgggcactctgtaaccactttacatttactaactcatttaatcttcttaatgatgctatgaagtagattctatnatcatcctcatggactgaaggaagaaaccgaggctcaaagaggttaagtgatatactcaagatcacccacacaggtggtcactggtgttattagaacctgtactcaggttttcttactccagagcccatgtcataatgcatgcactatagaaaattagagacttcagataagcaaaactaaaaactcacccacagagccactacctagaatatccactcgttacattgtggtatatntcctcccggacattttctatgcatgtttatacatactgggttttgttgttgtttactaaaagtgaagtaattttaatatttcgtaacctgattttttcattccacaatctaagtatttttctgtgccctgttaatttttaactatgtatcaaatacaactggcattttagagctggaattttagagagtatgtaagctaacctcatcctatatatgaaaaactgatgcccaaagaagtgaaatgacttaaaagtcacacagccgggcaggaaaccgtggcccagactcccagtccagtttctccccaggcctcccatcccatattcccttaggctacagatttacatgaatgagaagaggcaaaatgcccagcatagaaatgcgggagtcctcccgcccttccccaggcgtagctgacggacactggaggctccatgctattgctggcagcactggtacccagagaaagagaaattacccactgctacagatcacagctggagaagccgaactccagcctctctttctcttcccctcctagaacctgccctgagcaagggggtggagaacttgcaagccctgctctaccaggcgtccacaggcagttccgaagcaagtttccctactctctcacccctgtaaacacccccacaggtacaggtacagcaggacaaccctagctcctctacagcagcccctctgtacaatggctgaggccacagaaatgtggctctagcctgtgtctgtttacaactccaagtcccacccttccctactgtctcccaatcccacttccagaccttgaaaatcaactgcctaag

SEQ ID NO: 325897 - DNA, 398 bp, Homo sapiens
  misc_feature (36)..(36): n is a, c, g, or t
tagtggactcagtaccatattccctgctcccgctgnccgccaggcacctatgtctcagctaaatgtagccgcatccgggacacagtttgtgccacatgtgccgagaattcctacaacgagcactggaactacctgaccatctgccagctgtgccgcccctgtgacccagtgatgggcctcgaggagattgccccctgcacaagcaaacggaagacccagtgccgctgccagccgggaatgttctgtgctgcctgggccctcgagtgtacacactgcgagctactttctgactgcccgcctggcactgaagccgagctcaaaggtcagaggtccctgaggggctggatgtgaaaaggaggctgggtgccagggatctcaagtgggagcagggaatatgg

SEQ ID NO: 325898 - DNA, 2039 bp, Homo sapiens
ccactcccacttcctgagctccgccgtgggagccctggaggcccggcctggccgctcccggccctggggtgcacatcggccctgagtcccgtcccaggctctgggctcgggcagccgccgccaccgctgcccaggacgtcgggcctcctgccttcctcccaggcccccacgttgctggccgcctggccgagtggccgccatgctcctgccttgggccacctctgcccccggcctggcctgggggcctctggtgctgggcctcttcgggctcctggcagcatcgcagccccaggcggtgcctccatatgcgtcggagaaccagacctgcagggaccaggaaaaggaatactatgagccccagcaccgcatctgctgctcccgctgcccgccaggcacctatgtctcagctaaatgtagccgcatccgggacacagtttgtgccacatgtgccgagaattcctacaacgagcactggaactacctgaccatctgccagctgtgccgcccctgtgacccagtgatgggcctcgaggagattgccccctgcacaagcaaacggaagacccagtgccgctgccagccgggaatgttctgtgctgcctgggccctcgagtgtacacactgcgagctactttctgactgcccgcctggcactgaagccgagctcaaaggtgtgagaaccaaggtctggtggaggcagctccaggcactgcccagtccgacacaacctgcaaaaatccattagagccactgcccccagagatgtcaggaaccatgctgatgctggccgttctgctgccactggccttctttctgctccttgccaccgtcttctcctgcatctggaagagccacccttctctctgcaggaaactgggatcgctgctcaagaggcgtccgcagggagagggacccaatcctgtagctggaagctgggagcctccgaaggcccatccatacttccctgacttggtacagccactgctacccatttctggagatgtttccccagtatccactgggctccccgcagccccagttttggaggcaggggtgccgcaacagcagagtcctctggacctgaccagggagccgcagttggaacccggggagcagagccaggtggcccacggtaccaatggcattcatgtcaccggcgggtctatgactatcactggcaacatctacatctacaatggaccagtactggggggaccaccgggtcctggagacctcccagctacccccgaacctccataccccattcccgaagagggggaccctggccctcccgggctctctacaccccaccaggaagatggcaaggcttggcacctagcggagacagagcactgtggtgccacaccctctaacaggggcccaaggaaccaatttatcacccatgactgacggagtctgagaaaaggcagaagaaggggggcacaagggcaccttctcccttgaggctgccctgcccacgtgggattcacaggggcctgagtagggcccggggaagcagagccctaagggattaaggctcagacacctctgagagcaggtgggcactggctgggtacggtgccctccacaggactctccctactgcctgagcaaacctgaggcctcccggcagacccacccaccccctggggctgctcagcctcaggcacggacagggcacatgataccaactgctgcccactacggcacgccgcaccggagcacggcaccgagggagccgccacacggtcacctgcaaggacgtcacgggcccctctaaaggattcgtggtgctcatccccaagcttcagagaccctttggggttccacacttcacgtggactgaggtagaccctgcatgaagatgaaattatagggaggacgctccttccctcccctcctagaggagaggaaagggagtcattaacaactagggggttgggtaggattcctaggtatggggaagagttttggaaggggaggaaaatggcaagtgtatttatattgtaaccacatgcaaataaaaagaatgggaccta

SEQ ID NO: 325899 - DNA, 2264 bp, Homo sapiens
ccactcccacttcctgagctccgccgtgggagccctggaggcccggcctggccgctcccggccctggggtgcacatcggccctgagtcccgtcccaggctctgggctcgggcagccgccgccaccgctgcccaggacgtcgggcctcctgccttcctcccaggcccccacgttgctggccgcctggccgagtggccgccatgctcctgccttgggccacctctgcccccggcctggcctgggggcctctggtgctgggcctcttcgggctcctggcagcatcgcagccccaggcggtgcctccatatgcgtcggagaaccagacctgcagggaccaggaaaaggaatactatgagccccagcaccgcatctgctgctcccgctgcccgccaggcacctatgtctcagctaaatgtagccgcatccgggacacagtttgtgccacatgtgccgagaattcctacaacgagcactggaactacctgaccatctgccagctgtgccgcccctgtgacccagtgatgggcctcgaggagattgccccctgcacaagcaaacggaagacccagtgccgctgccagccgggaatgttctgtgctgcctgggccctcgagtgtacacactgcgagctactttctgactgcccgcctggcactgaagccgagctcaaagatgaagttgggaagggtaacaaccactgcgtcccctgcaaggcagggcacttccagaatacctcctcccccagcgcccgctgccagccccacaccaggtgtgagaaccaaggtctggtggaggcagctccaggcactgcccagtccgacacaacctgcaaaaatccattagagccactgcccccagagatgtcaggaaccatgctgatgctggccgttctgctgccactggccttctttctgctccttgccaccgtcttctcctgcatctggaagagccacccttctctctgcaggaaactgggatcgctgctcaagaggcgtccgcagggagagggacccaatcctgtagctggaagctgggagcctccgaaggcccatccatacttccctgacttggtacagccactgctacccatttctggagatgtttccccagtatccactgggctccccgcagccccagttttggaggcaggggtgccgcaacagcagagtcctctggacctgaccagggagccgcagttggaacccggggagcagagccaggtggcccacggtaccaatggcattcatgtcaccggcgggtctatgactatcactggcaacatctacatctacaatggaccagtactggggggaccaccgggtcctggagacctcccagctacccccgaacctccataccccattcccgaagagggggaccctggccctcccgggctctctacaccccaccaggaagatggcaaggcttggcacctagcggagacagagcactgtggtgccacaccctctaacaggggcccaaggaaccaatttatcacccatgactgacggagtctgagaaaaggcagaagaaggggggcacaagggcaccttctcccttgaggctgccctgcccacgtgggattcacaggggcctgagtagggcccggggaagcagagccctaagggattaaggctcagacacctctgagagcaggtgggcactggctgggtacggtgccctccacaggactctccctactgcctgagcaaacctgaggcctcccggcagacccacccaccccctggggctgctcagcctcaggcacggacagggcacatgataccaactgctgcccactacggcacgccgcaccggagcacggcaccgagggagccgccacacggtcacctgcaaggacgtcacgggcccctctaaaggattcgtggtgctcatccccaagcttcagagaccctttggggttccacacttcacgtggactgaggtagaccctgcatgaagatgaaattatagggaggacgctccttccctcccctcctagaggagaggaaagggagtcattaacaactagggggttgggtaggattcctaggtatggggaagagttttggaaggggaggaaaatggcaagtgtatttatattgtaaccacatgcaaataaaaagaatgggacctagtgaagcgcttgcagacgcactgctacaaggtccatgaccgcaatgccaccgtagataagttggaggacttcatcaacaacattaaacagtgtcttggagtccttgtatattgaggtaatcgtgaggg

SEQ ID NO: 325900 - DNA, 2237 bp, Homo sapiens
  misc_feature (452)..(452): n is a, c, g, or t
cagatccttggcttaaaattcctcttctcattccatgcagaggctcacagaagggttctggagggacatggaactgggacaggtgcaggggacacaggaggtggttcttctcagtactgggaagcttgggcaaaatggtaggcagtaggccgggtgtggtggcccacgcctgtaatcccagcactttgggaggccgaggtgggcggatcacgaggtcaggagatcgagaccatcctggctaacacagtgaaaccccgtctctactaaaaatacaaaaaattagccgggcgtggtggtgggcgcctgtatcccagctactcgggaggctgaggcaggagaatggcgtgaacttgggaggcggagcttgcagtgagccgagatcgcgccactgcactccagcctgggcgacagagcaagactccgtctcaaaaaaaaaaaaaaaaaaggcagcnaagcagagcttgggaaaggtgagagctacgcaatggggtggatgggcatcctgaggcttaaaggaaactcacaggccggcaaagggcccctcccttttgcccattcaccctggctggcctgcctttctcttgccagatgaagttgggaagggtaacaaccactgcgtcccctgcaaggcagggcacttccagaatacctcctcccccagcgcccgctgccagccccacaccaggtgagtgcagccccacccaagctccttccaccctctgagaagcctcagctgctaacaacccccagcgcctatccttgacaccacggactcgactcaccactttcagcctccccgcctgcccagtggagtcgggacactggtgggccagggcgtgaaaaggtcatcatctttttttcctctgcaggtgtgagaaccaaggtctggtggaggcagctccaggcactgcccagtccgacacaacctgcaaaaatccattagagccactgcccccagagatgtcaggaaccatgctgatgctggccgttctgctgccactggccttctttctgctccttgccaccgtcttctcctgcatctggaagagccacccttctctctgcaggaaactgggatcgctgctcaagaggcgtccgcagggagagggacccaatcctgtagctggaagctgggagcctccgaaggcccatccatacttccctgacttggtacagccactgctacccatttctggagatgtttccccagtatccactgggctccccgcagccccagttttggaggcaggggtgccgcaacagcagagtcctctggacctgaccagggagccgcagttggaacccggggagcagagccaggtggcccacggtaccaatggcattcatgtcaccggcgggtctatgactatcactggcaacatctacatctacaatggaccagtactggggggaccaccgggtcctggagacctcccagctacccccgaacctccataccccattcccgaagagggggaccctggccctcccgggctctctacaccccaccaggaagatggcaaggcttggcacctagcggagacagagcactgtggtgccacaccctctaacaggggcccaaggaaccaatttatcacccatgactgacggagtctgagaaaaggcagaagaaggggggcacaagggcaccttctcccttgaggctgccctgcccacgtgggattcacaggggcctgagtagggcccggggaagcagagccctaagggattaaggctcagacacctctgagagcaggtgggcactggctgggtacggtgccctccacaggactctccctactgcctgagcaaacctgaggcctcccggcagacccacccaccccctggggctgctcagcctcaggcacggacagggcacatgataccaactgctgcccactacggcacgccgcaccggagcacggcaccgagggagccgccacacggtcacctgcaaggacgtcacgggcccctctaaaggattcgtggtgctcatccccaagcttcagagaccctttggggttccacacttcacgtggactgaggtagaccctgcatgaagatgaaattatagggaggacgctccttccctcccctcctagaggagaggaaagggagtcattaacaactagggggttgggtaggattcctaggtatggggaagagttttggaaggggaggaaaatggcaagtgtatttatattgtaaccacatgcaaataaaaagaatgggaccta

SEQ ID NO: 325901 - DNA, 1416 bp, Homo sapiens
ggcgccagataactactcctcagaggaagtgtattataaccatgcgctctgaatggaagtcatgtccatggcactgtgcctcatccgctgtcacccttgaccacaactccacttagtacccacgttggccccatcatgatgtctctgaaccatgctgatgctggccgttctgctgccactggccttctttctgctccttgccaccgtcttctcctgcatctggaagagccacccttctctctgcaggaaactgggatcgctgctcaagaggcgtccgcagggagagggacccaatcctgtagctggaagctgggagcctccgaaggcccatccatacttccctgacttggtacagccactgctacccatttctggagatgtttccccagtatccactgggctccccgcagccccagttttggaggcaggggtgccgcaacagcagagtcctctggacctgaccagggagccgcagttggaacccggggagcagagccaggtggcccacggtaccaatggcattcatgtcaccggcgggtctatgactatcactggcaacatctacatctacaatggaccagtactggggggaccaccgggtcctggagacctcccagctacccccgaacctccataccccattcccgaagagggggaccctggccctcccgggctctctacaccccaccaggaagatggcaaggcttggcacctagcggagacagagcactgtggtgccacaccctctaacaggggcccaaggaaccaatttatcacccatgactgacggagtctgagaaaaggcagaagaaggggggcacaagggcaccttctcccttgaggctgccctgcccacgtgggattcacaggggcctgagtagggcccggggaagcagagccctaagggattaaggctcagacacctctgagagcaggtgggcactggctgggtacggtgccctccacaggactctccctactgcctgagcaaacctgaggcctcccggcagacccacccaccccctggggctgctcagcctcaggcacggacagggcacatgataccaactgctgcccactacggcacgccgcaccggagcacggcaccgagggagccgccacacggtcacctgcaaggacgtcacgggcccctctaaaggattcgtggtgctcatccccaagcttcagagaccctttggggttccacacttcacgtggactgaggtagaccctgcatgaagatgaaattatagggaggacgctccttccctcccctcctagaggagaggaaagggagtcattaacaactagggggttgggtaggattcctaggtatggggaagagttttggaaggggaggaaaatggcaagtgtatttatattgtaaccacatgcaaataaaaagaatgggaccta

SEQ ID NO: 325902 - DNA, 1227 bp, Homo sapiens
ccactcccacttcctgagctccgccgtgggagccctggaggcccggcctggccgctcccggccctggggtgcacatcggccctgagtcccgtcccaggctctgggctcgggcagccgccgccaccgctgcccaggacgtcgggcctcctgccttcctcccaggcccccacgttgctggccgcctggccgagtggccgccatgctcctgccttgggccacctctgcccccggcctggcctgggggcctctggtgctgggcctcttcgggctcctggcagcatcgcagccccaggcggtgcctccatatgcgtcggagaaccagacctgcagggaccaggaaaaggaatactatgagccccagcaccgcatctgctgctcccgctgcccgccaggcacctatgtctcagctaaatgtagccgcatccgggacacagtttgtgccacatgtgccgagaattcctacaacgagcactggaactacctgaccatctgccagctgtgccgcccctgtgacccagtgatgggcctcgaggagattgccccctgcacaagcaaacggaagacccagtgccgctgccagccgggaatgttctgtgctgcctgggccctcgagtgtacacactgcgagctactttctgactgcccgcctggcactgaagccgagctcaaagatgaagttgggaagggtaacaaccactgcgtcccctgcaaggcagggcacttccagaatacctcctcccccagcgcccgctgccagccccacaccaggtgtgagaaccaaggtctggtggaggcagctccaggcactgcccagtccgacacaacctgcaaaaatccattagagccactgcccccagagatgtcaggaaccatgctgatgctggccgttctgctgccactggccttctttctgctccttgccaccgtcttctcctgcatctggaagagccacccttctctctgcaggaaactgggatcgctgctcaagaggcgtccgcaggtaatggcgggggctgagaaggcagcaagaaggggaagaggtgatgagggtacaaggtggagcagacaggaagagagtatgcaggctgactccacactcattcattcattcaactgatgatttactgaacatgccacgtaccaggcactgtcctaggcactgggcgtacagcagtgagcaaaacacagtacctcatttcctggagttcacatgcccatggagcaaga

SEQ ID NO: 325903 - DNA, 2682 bp, Homo sapiens
  misc_feature (1624)..(1624): n is a, c, g, or t
  misc_feature (1861)..(1861): n is a, c, g, or t
ccactcccacttcctgagctccgccgtgggagccctggaggcccggcctggccgctcccggccctggggtgcacatcggccctgagtcccgtcccaggctctgggctcgggcagccgccgccaccgctgcccaggacgtcgggcctcctgccttcctcccaggcccccacgttgctggccgcctggccgagtggccgccatgctcctgccttgggccacctctgcccccggcctggcctgggggcctctggtgctgggcctcttcgggctcctggcagcatcgcagccccaggcggtgcctccatatgcgtcggagaaccagacctgcagggaccaggaaaaggaatactatgagccccagcaccgcatctgctgctcccgctgcccgccaggcacctatgtctcagctaaatgtagccgcatccgggacacagtttgtgccacatgtgccgagaattcctacaacgagcactggaactacctgaccatctgccagctgtgccgcccctgtgacccagtgatgggcctcgaggagattgccccctgcacaagcaaacggaagacccagtgccgctgccagccgggaatgttctgtgctgcctgggccctcgagtgtacacactgcgagctactttctgactgcccgcctggcactgaagccgagctcaaagatgaagttgggaagggtaacaaccactgcgtcccctgcaaggcagggcacttccagaatacctcctcccccagcgcccgctgccagccccacaccaggtgagtgcagccccacccaagctccttccaccctctgagaagcctcagctgctaacaacccccagcgcctatccttgacaccacggactcgactcaccactttcagcctccccgcctgcccagtggagtcgggacactggtgggccagggcgtgaaaaggtcatcatctttttttcctctgcaggtgtgagaaccaaggtctggtggaggcagctccaggcactgcccagtccgacacaacctgcaaaaatccattagagccactgcccccagagatgtcaggtgagggaccagggctgagggacacaggggggggcgcctctgaaaatgccttaatgctccacatcttaaaaaaaatggggaaaagatgaacacttccctcccagaattgggcaagaagaaagttccttacagaaaaaattggagtatctctaggctagtttacacacacacacacacacacacacacacacttttaaaattatatatactgtaatactatgtcaaggaacacatcccacactgagatgtaatgataactactattgtcatcattttgggcttaccaacattacacaatccgtttttttttttcacacaatccattaactagaccaaacacctctttattagactatatacttttattattagacagaagattcccatttgactctttcttgactgtttcctgtggactgattggcttgctagcctagtagatgactattgtttctaatgactgtaacatcactaattggcagaaggttcactgtgtgtgttgggcactctgtaaccactttacatttactaactcatttaatcttcttaatgatgctatgaagtagattctatnatcatcctcatggactgaaggaagaaaccgaggctcaaagaggttaagtgatatactcaagatcacccacacaggtggtcactggtgttattagaacctgtactcaggttttcttactccagagcccatgtcataatgcatgcactatagaaaattagagacttcagataagcaaaactaaaaactcacccacagagccactacctagaatatccactcgttacattgtggtatatntcctcccggacattttctatgcatgtttatacatactgggttttgttgttgtttactaaaagtgaagtaattttaatatttcgtaacctgattttttcattccacaatctaagtatttttctgtgccctgttaatttttaactatgtatcaaatacaactggcattttagagctggaattttagagagtatgtaagctaacctcatcctatatatgaaaaactgatgcccaaagaagtgaaatgacttaaaagtcacacagccgggcaggaaaccgtggcccagactcccagtccagtttctccccaggcctcccatcccatattcccttaggctacagatttacatgaatgagaagaggcaaaatgcccagcatagaaatgcgggagtcctcccgcccttccccaggcgtagctgacggacactggaggctccatgctattgctggcagcactggtacccagagaaagagaaattacccactgctacagatcacagctggagaagccgaactccagcctctctttctcttcccctcctagaacctgccctgagcaagggggtggagaacttgcaagccctgctctaccaggcgtccacaggcagttccgaagcaagtttccctactctctcacccctgtaaacacccccacaggtacaggtacagcaggacaaccctagctcctctacagcagcccctctgtacaatggctgaggccacagaaatgtggctctagcctgtgtctgtttacaactccaagtcccacccttccctactgtctcccaatcccacttccagaccttgaaaatcaactgcctaag

SEQ ID NO: 325904 - DNA, 457 bp, Homo sapiens
tgagcaggagggcacccacaccacccccaaacatgcccatccatgatacagtctctcctggctgccaagaggtcctcaagtccaacttagttccccttctctataacccaagggaagtttctctcattctgcctttaggagctgcattgtgtctagaaggaaaaaagctgctcccttttctctgtctgggttgcccagggatctggaaagctcttccttctcctcctcccctctgcccttcttggggctgtgatcaccctcctgtctgctgtcctggcaggaaccatgctgatgctggccgttctgctgccactggccttctttctgctccttgccaccgtcttctcctgcatctggaagagccacccttctctctgcaggaaactgggtaggaaagggttggatgcagtggatggttggcaatgggagccggagggaggaatattcaacttccccg

SEQ ID NO: 325905 - DNA, 2136 bp, Homo sapiens
ccactcccacttcctgagctccgccgtgggagccctggaggcccggcctggccgctcccggccctggggtgcacatcggccctgagtcccgtcccaggctctgggctcgggcagccgccgccaccgctgcccaggacgtcgggcctcctgccttcctcccaggcccccacgttgctggccgcctggccgagtggccgccatgctcctgccttgggccacctctgcccccggcctggcctgggggcctctggtgctgggcctcttcgggctcctggcagcatcgcagccccaggcggtgcctccatatgcgtcggagaaccagacctgcagggaccaggaaaaggaatactatgagccccagcaccgcatctgctgctcccgctgcccgccaggcacctatgtctcagctaaatgtagccgcatccgggacacagtttgtgccacatgtgccgagaattcctacaacgagcactggaactacctgaccatctgccagctgtgccgcccctgtgacccagtgatgggcctcgaggagattgccccctgcacaagcaaacggaagacccagtgccgctgccagccgggaatgttctgtgctgcctgggccctcgagtgtacacactgcgagctactttctgactgcccgcctggcactgaagccgagctcaaagatgaagttgggaagggtaacaaccactgcgtcccctgcaaggcagggcacttccagaatacctcctcccccagcgcccgctgccagccccacaccaggtgtgagaaccaaggtctggtggaggcagctccaggcactgcccagtccgacacaacctgcaaaaatccattagagccactgcccccagagatgtcaggaaccatgctgatgctggccgttctgctgccactggccttctttctgctccttgccaccgtcttctcctgcatctggaagagccacccttctctctgcaggaaactgggatcgctgctcaagaggcgtccgcagggagagggacccaatcctgtagctggaagctgggagcctccgaaggcccatccatacttccctgacttggtacagccactgctacccatttctggagatgtttccccagtatccactgggctccccgcagccccagttttggaggcaggggtgccgcaacagcagagtcctctggacctgaccagggagccgcagttggaacccggggagcagagccaggtggcccacggtaccaatggcattcatgtcaccggcgggtctatgactatcactggcaacatctacatctacaatggaccagtactggggggaccaccgggtcctggagacctcccagctacccccgaacctccataccccattcccgaagagggggaccctggccctcccgggctctctacaccccaccaggaagatggcaaggcttggcacctagcggagacagagcactgtggtgccacaccctctaacaggggcccaaggaaccaatttatcacccatgactgacggagtctgagaaaaggcagaagaaggggggcacaagggcaccttctcccttgaggctgccctgcccacgtgggattcacaggggcctgagtagggcccggggaagcagagccctaagggattaaggctcagacacctctgagagcaggtgggcactggctgggtacggtgccctccacaggactctccctactgcctgagcaaacctgaggcctcccggcagacccacccaccccctggggctgctcagcctcaggcacggacagggcacatgataccaactgctgcccactacggcacgccgcaccggagcacggcaccgagggagccgccacacggtcacctgcaaggacgtcacgggcccctctaaaggattcgtggtgctcatccccaagcttcagagaccctttggggttccacacttcacgtggactgaggtagaccctgcatgaagatgaaattatagggaggacgctccttccctcccctcctagaggagaggaaagggagtcattaacaactagggggttgggtaggattcctaggtatggggaagagttttggaaggggaggaaaatggcaagtgtatttatattgtaaccacatgcaaataaaaagaatgggaccta

SEQ ID NO: 325906 - DNA, 1871 bp, Homo sapiens
ggagggccactggcaggatgatggggggccagagagaccgagggaaaggccagggtcacactacaggcagcggaggtgagggtggagcctcgtctcctgaggctctactgctccactcacgttctaggcacctatgtctcagctaaatgtagccgcatccgggacacagtttgtgccacatgtgccgagaattcctacaacgagcactggaactacctgaccatctgccagctgtgccgcccctgtgacccagtgatgggcctcgaggagattgccccctgcacaagcaaacggaagacccagtgccgctgccagccgggaatgttctgtgctgcctgggccctcgagtgtacacactgcgagctactttctgactgcccgcctggcactgaagccgagctcaaagatgaagttgggaagggtaacaaccactgcgtcccctgcaaggcagggcacttccagaatacctcctcccccagcgcccgctgccagccccacaccaggtgtgagaaccaaggtctggtggaggcagctccaggcactgcccagtccgacacaacctgcaaaaatccattagagccactgcccccagagatgtcaggaaccatgctgatgctggccgttctgctgccactggccttctttctgctccttgccaccgtcttctcctgcatctggaagagccacccttctctctgcaggaaactgggatcgctgctcaagaggcgtccgcagggagagggacccaatcctgtagctggaagctgggagcctccgaaggcccatccatacttccctgacttggtacagccactgctacccatttctggagatgtttccccagtatccactgggctccccgcagccccagttttggaggcaggggtgccgcaacagcagagtcctctggacctgaccagggagccgcagttggaacccggggagcagagccaggtggcccacggtaccaatggcattcatgtcaccggcgggtctatgactatcactggcaacatctacatctacaatggaccagtactggggggaccaccgggtcctggagacctcccagctacccccgaacctccataccccattcccgaagagggggaccctggccctcccgggctctctacaccccaccaggaagatggcaaggcttggcacctagcggagacagagcactgtggtgccacaccctctaacaggggcccaaggaaccaatttatcacccatgactgacggagtctgagaaaaggcagaagaaggggggcacaagggcaccttctcccttgaggctgccctgcccacgtgggattcacaggggcctgagtagggcccggggaagcagagccctaagggattaaggctcagacacctctgagagcaggtgggcactggctgggtacggtgccctccacaggactctccctactgcctgagcaaacctgaggcctcccggcagacccacccaccccctggggctgctcagcctcaggcacggacagggcacatgataccaactgctgcccactacggcacgccgcaccggagcacggcaccgagggagccgccacacggtcacctgcaaggacgtcacgggcccctctaaaggattcgtggtgctcatccccaagcttcagagaccctttggggttccacacttcacgtggactgaggtagaccctgcatgaagatgaaattatagggaggacgctccttccctcccctcctagaggagaggaaagggagtcattaacaactagggggttgggtaggattcctaggtatggggaagagttttggaaggggaggaaaatggcaagtgtatttatattgtaaccacatgcaaataaaaagaatgggaccta

SEQ ID NO: 325907 - DNA, 2221 bp, Homo sapiens
ccactcccacttcctgagctccgccgtgggagccctggaggcccggcctggccgctcccggccctggggtgcacatcggccctgagtcccgtcccaggctctgggctcgggcagccgccgccaccgctgcccaggacgtcgggcctcctgccttcctcccaggcccccacgttgctggccgcctggccgagtggccgccatgctcctgccttgggccacctctgcccccggcctggcctgggggcctctggtgctgggcctcttcgggctcctggcagcatcgcagccccaggcggtgcctccatatgcgtcggagaaccagacctgcagggaccaggaaaaggaatactatgagccccagcaccgcatctgctgctcccgctgcccgccaggcacctatgtctcagctaaatgtagccgcatccgggacacagtttgtgccacatgtgccgagaattcctacaacgagcactggaactacctgaccatctgccagctgtgccgcccctgtgacccagtgatgggcctcgaggagattgccccctgcacaagcaaacggaagacccagtgccgctgccagccgggaatgttctgtgctgcctgggccctcgagtgtacacactgcgagctactttctgactgcccgcctggcactgaagccgagctcaaagatgaagttgggaagggtaacaaccactgcgtcccctgcaaggcagggcacttccagaatacctcctcccccagcgcccgctgccagccccacaccaggtgtgagaaccaaggtctggtggaggcagctccaggcactgcccagtccgacacaacctgcaaaaatccattagagccactgcccccagagatgtcaggaaccatgctgatgctggccgttctgctgccactggccttctttctgctccttgccaccgtcttctcctgcatctggaagagccacccttctctctgcaggaaactgggatcgctgctcaagaggcgtccgcagggagagggacccaatcctgtagctggaagctgggagcctccgaaggcccatccatacttccctgacttggtacagccactgctacccatttctggagatgtttccccagtatccactgggctccccgcagccccagttttggaggcaggggtgccgcaacagcagagtcctctggacctgaccagggagccgcagttggaacccggggagcagagccaggtggcccacggtaccaatggcattcatgtcaccggcgggtctatgactatcactggcaacatctacatctacaatggaccagtactggggggaccaccgggtcctggagacctcccagctacccccgaacctccataccccattcccgaagagggggaccctggccctcccgggctctctacaccccaccaggaagatggcaaggcttggcacctagcggagacagagcactgtggtgccacaccctctaacaggggcccaaggaaccaatttatcacccatgactgacggagtctgagaaaaggcagaagaaggggggcacaagggcaccttctcccttgaggctgccctgcccacgtgggattcacaggggcctgagtagggcccggggaagcagagccctaagggattaaggctcagacacctctgagagcaggtgggcactggctgggtacggtgccctccacaggactctccctactgcctgagcaaacctgaggcctcccggcagacccacccaccccctggggctgctcagcctcaggcacggacagggcacatgataccaactgctgcccactacggcacgccgcaccggagcacggcaccgagggagccgccacacggtcacctgcaaggacgtcacgggcccctctaaaggattcgtggtgctcatccccaagcttcagagaccctttggggttccacacttcacgtggactgaggtagaccctgcatgaagatgaaattatagggaggacgctccttccctcccctcctagaggagaggaaagggagtcattaacaactagggggttgggtaggattcctaggtatggggaagagttttggaaggggaggaaaatggcaagtgtatttatattgtaaccacatgcaaataaaaagaatgggacctaaaaaaacaacacaaaaccaacacgaagaacgagagcaccaacaacacaaacaaacagaaaagccacaacaaaaacaactaaacgg

SEQ ID NO: 325908 - DNA, 2053 bp, Homo sapiens
  misc_feature (452)..(452): n is a, c, g, or t
cagatccttggcttaaaattcctcttctcattccatgcagaggctcacagaagggttctggagggacatggaactgggacaggtgcaggggacacaggaggtggttcttctcagtactgggaagcttgggcaaaatggtaggcagtaggccgggtgtggtggcccacgcctgtaatcccagcactttgggaggccgaggtgggcggatcacgaggtcaggagatcgagaccatcctggctaacacagtgaaaccccgtctctactaaaaatacaaaaaattagccgggcgtggtggtgggcgcctgtatcccagctactcgggaggctgaggcaggagaatggcgtgaacttgggaggcggagcttgcagtgagccgagatcgcgccactgcactccagcctgggcgacagagcaagactccgtctcaaaaaaaaaaaaaaaaaaggcagcnaagcagagcttgggaaaggtgagagctacgcaatggggtggatgggcatcctgaggcttaaaggaaactcacaggccggcaaagggcccctcccttttgcccattcaccctggctggcctgcctttctcttgccagatgaagttgggaagggtaacaaccactgcgtcccctgcaaggcagggcacttccagaatacctcctcccccagcgcccgctgccagccccacaccaggtgtgagaaccaaggtctggtggaggcagctccaggcactgcccagtccgacacaacctgcaaaaatccattagagccactgcccccagagatgtcaggaaccatgctgatgctggccgttctgctgccactggccttctttctgctccttgccaccgtcttctcctgcatctggaagagccacccttctctctgcaggaaactgggatcgctgctcaagaggcgtccgcagggagagggacccaatcctgtagctggaagctgggagcctccgaaggcccatccatacttccctgacttggtacagccactgctacccatttctggagatgtttccccagtatccactgggctccccgcagccccagttttggaggcaggggtgccgcaacagcagagtcctctggacctgaccagggagccgcagttggaacccggggagcagagccaggtggcccacggtaccaatggcattcatgtcaccggcgggtctatgactatcactggcaacatctacatctacaatggaccagtactggggggaccaccgggtcctggagacctcccagctacccccgaacctccataccccattcccgaagagggggaccctggccctcccgggctctctacaccccaccaggaagatggcaaggcttggcacctagcggagacagagcactgtggtgccacaccctctaacaggggcccaaggaaccaatttatcacccatgactgacggagtctgagaaaaggcagaagaaggggggcacaagggcaccttctcccttgaggctgccctgcccacgtgggattcacaggggcctgagtagggcccggggaagcagagccctaagggattaaggctcagacacctctgagagcaggtgggcactggctgggtacggtgccctccacaggactctccctactgcctgagcaaacctgaggcctcccggcagacccacccaccccctggggctgctcagcctcaggcacggacagggcacatgataccaactgctgcccactacggcacgccgcaccggagcacggcaccgagggagccgccacacggtcacctgcaaggacgtcacgggcccctctaaaggattcgtggtgctcatccccaagcttcagagaccctttggggttccacacttcacgtggactgaggtagaccctgcatgaagatgaaattatagggaggacgctccttccctcccctcctagaggagaggaaagggagtcattaacaactagggggttgggtaggattcctaggtatggggaagagttttggaaggggaggaaaatggcaagtgtatttatattgtaaccacatgcaaataaaaagaatgggaccta

SEQ ID NO: 325909 - DNA, 1729 bp, Homo sapiens
ccactcccacttcctgagctccgccgtgggagccctggaggcccggcctggccgctcccggccctggggtgcacatcggccctgagtcccgtcccaggctctgggctcgggcagccgccgccaccgctgcccaggacgtcgggcctcctgccttcctcccaggcccccacgttgctggccgcctggccgagtggccgccatgctcctgccttgggccacctctgcccccggcctggcctgggggcctctggtgctgggcctcttcgggctcctggcagcatcgcagccccaggcggtgcctccatatgcgtcggagaaccagacctgcagggaccaggaaaaggaatactatgagccccagcaccgcatctgctgctcccgctgcccgccaggcacctatgtctcagctaaatgtagccgcatccgggacacagtttgtgccacatgtgccgagaattcctacaacgagcactggaactacctgaccatctgccagctgtgccgcccctgtgacccagtgatgggcctcgaggagattgccccctgcacaagcaaacggaagacccagtgccgctgccagccgggaatgttctgtgctgcctgggccctcgagtgtacacactgcgagctactttctgactgcccgcctggcactgaagccgagctcaaagatgaagttgggaagggtaacaaccactgcgtcccctgcaaggcagggcacttccagaatacctcctcccccagcgcccgctgccagccccacaccaggtgtgagaaccaaggtctggtggaggcagctccaggcactgcccagtccgacacaacctgcaaaaatccattagagccactgcccccagagatgtcaggaaccatgctgatgctggccgttctgctgccactggccttctttctgctccttgccaccgtcttctcctgcatctggaagagccacccttctctctgcaggaaactgggatcgctgctcaagaggcgtccgcagggagagggacccaatcctgtagctggaagctgggagcctccgaaggcccatccatacttccctgacttggtacagccactgctacccatttctggagatgtttccccagtatccactgggctccccgcagccccagttttggaggcaggggtgccgcaacagcagagtcctctggacctgaccagggagccgcagttggaacccggggagcagagccaggtggcccacggtaccaatggcattcatgtcaccggcgggtctatgactatcactggcaacatctacatctacaatggaccagtactggggggaccaccgggtcctggagacctcccagctacccccgaacctccataccccattcccgaagagggggaccctggccctcccgggctctctacaccccaccaggaagatggcaaggcttggcacctagcggagacagagcactgtggtgccacaccctctaaaggattcgtggtgctcatccccaagcttcagagaccctttggggttccacacttcacgtggactgaggtagaccctgcatgaagatgaaattatagggaggacgctccttccctcccctcctagaggagaggaaagggagtcattaacaactagggggttgggtaggattcctaggtatggggaagagttttggaaggggaggaaaatggcaagtgtatttatattgtaaccacatgcaaataaaaagaatgggaccta

SEQ ID NO: 325910 - DNA, 2498 bp, Homo sapiens
  misc_feature (1440)..(1440): n is a, c, g, or t
  misc_feature (1677)..(1677): n is a, c, g, or t
ccactcccacttcctgagctccgccgtgggagccctggaggcccggcctggccgctcccggccctggggtgcacatcggccctgagtcccgtcccaggctctgggctcgggcagccgccgccaccgctgcccaggacgtcgggcctcctgccttcctcccaggcccccacgttgctggccgcctggccgagtggccgccatgctcctgccttgggccacctctgcccccggcctggcctgggggcctctggtgctgggcctcttcgggctcctggcagcatcgcagccccaggcggtgcctccatatgcgtcggagaaccagacctgcagggaccaggaaaaggaatactatgagccccagcaccgcatctgctgctcccgctgcccgccaggcacctatgtctcagctaaatgtagccgcatccgggacacagtttgtgccacatgtgccgagaattcctacaacgagcactggaactacctgaccatctgccagctgtgccgcccctgtgacccagtgatgggcctcgaggagattgccccctgcacaagcaaacggaagacccagtgccgctgccagccgggaatgttctgtgctgcctgggccctcgagtgtacacactgcgagctactttctgactgcccgcctggcactgaagccgagctcaaagatgaagttgggaagggtaacaaccactgcgtcccctgcaaggcagggcacttccagaatacctcctcccccagcgcccgctgccagccccacaccaggtgtgagaaccaaggtctggtggaggcagctccaggcactgcccagtccgacacaacctgcaaaaatccattagagccactgcccccagagatgtcaggtgagggaccagggctgagggacacaggggggggcgcctctgaaaatgccttaatgctccacatcttaaaaaaaatggggaaaagatgaacacttccctcccagaattgggcaagaagaaagttccttacagaaaaaattggagtatctctaggctagtttacacacacacacacacacacacacacacacttttaaaattatatatactgtaatactatgtcaaggaacacatcccacactgagatgtaatgataactactattgtcatcattttgggcttaccaacattacacaatccgtttttttttttcacacaatccattaactagaccaaacacctctttattagactatatacttttattattagacagaagattcccatttgactctttcttgactgtttcctgtggactgattggcttgctagcctagtagatgactattgtttctaatgactgtaacatcactaattggcagaaggttcactgtgtgtgttgggcactctgtaaccactttacatttactaactcatttaatcttcttaatgatgctatgaagtagattctatnatcatcctcatggactgaaggaagaaaccgaggctcaaagaggttaagtgatatactcaagatcacccacacaggtggtcactggtgttattagaacctgtactcaggttttcttactccagagcccatgtcataatgcatgcactatagaaaattagagacttcagataagcaaaactaaaaactcacccacagagccactacctagaatatccactcgttacattgtggtatatntcctcccggacattttctatgcatgtttatacatactgggttttgttgttgtttactaaaagtgaagtaattttaatatttcgtaacctgattttttcattccacaatctaagtatttttctgtgccctgttaatttttaactatgtatcaaatacaactggcattttagagctggaattttagagagtatgtaagctaacctcatcctatatatgaaaaactgatgcccaaagaagtgaaatgacttaaaagtcacacagccgggcaggaaaccgtggcccagactcccagtccagtttctccccaggcctcccatcccatattcccttaggctacagatttacatgaatgagaagaggcaaaatgcccagcatagaaatgcgggagtcctcccgcccttccccaggcgtagctgacggacactggaggctccatgctattgctggcagcactggtacccagagaaagagaaattacccactgctacagatcacagctggagaagccgaactccagcctctctttctcttcccctcctagaacctgccctgagcaagggggtggagaacttgcaagccctgctctaccaggcgtccacaggcagttccgaagcaagtttccctactctctcacccctgtaaacacccccacaggtacaggtacagcaggacaaccctagctcctctacagcagcccctctgtacaatggctgaggccacagaaatgtggctctagcctgtgtctgtttacaactccaagtcccacccttccctactgtctcccaatcccacttccagaccttgaaaatcaactgcctaag

SEQ ID NO: 325911 - DNA, 515 bp, Homo sapiens
  misc_feature (395)..(395): n is a, c, g, or t
  misc_feature (494)..(494): n is a, c, g, or t
  misc_feature (510)..(510): n is a, c, g, or t
ccactcccacttcctgagctccgccgtgggagccctggaggcccggcctggccgctcccggccctggggtgcacatcggccctgagtcccgtcccaggctctgggctcgggcagccgccgccaccgctgcccaggacgtcgggcctcctgccttcctcccaggcccccacgttgctggccgcctggccgagtggccgccatgctcctgccttgggccacctctgcccccggcctggcctgggggcctctggtgctgggcctcttcgggctcctggcagcatcgcagccccaggcggtgcctccatatgcgtcggagaaccagacctgcagggaccaggaaaaggaatactatgagccccagcaccgcatctgctgctcccgctgcccgccagggnttgaatgcagtcgggaaggggaggacgggaagtctagccggcttggacccgccccactctgttacctgccagatgacgctgaggaaactgcttttcttntcgacgcctccgttgncccgt

SEQ ID NO: 325912 - DNA, 4352 bp, Homo sapiens
ggcgcgagcgcccgtggggcgggcctcagcggcggcgcgacaagtccagaggtgagggctgaggaaggggcgtggctagcgggctggcctcagccaccctcttccgggctccgccagctgcgcgcgcatcttctcccccttcttttgtggtccggcccattgcgagggtgacaggaaaccctgtgcagggagcgccgccatcttggaccagcccgaggaagatactgagggagcacaggagcagtcaccgctgccactgctactgccgctactgctgccggcgcgtctgcacctctcggcctgccagtgtacctgccggcgcctcggtcgaccgcccccgccccctctcccgctgcgtccgcactcctgttcctggtcctgacgcccccctcccgcccggaaagctgcccagccaccagcaaccccccagtgccaccatggcaactgcaccatacaactactcttacatctttaaatatattattattggggacatgggagtaggaaaatcttgcttgcttcatcaatttacagaaaaaaaatttatggctgattgtcctcacacaattggtgttgaatttggtacaagaataatcgaagttagtggccaaaaaataaaactgcagatttgggatacggcaggacaggagcgatttagggctgttacacggagctactacagaggagctgcgggagctcttatggtctatgatatcactagaagaagtacatataaccacttaagcagctggttgacagatgcaaggaatctcaccaatccaaatactgtaataattctcataggaaataaagcagatttggaggcacagagagatgttacatatgaagaagccaaacagtttgctgaagaaaatggcttattgttcctcgaagcgagtgcaaaaacgggagagaatgtagaagatgccttccttgaggctgccaagaaaatctatcagaacattcaggatggaagcttggatctgaatgctgctgagtctggtgtacaacacaaaccttcagccccgcagggaggccggctaaccagtgaaccccaaccccagagagaaggctgtggctgctagtgacctctttgctgtggcccctcatttgacctttcacctctgtctgttggaagcagtactttttactgcctcattgtcttctgtacatcttactgggtttaattaaaaaaaaagaaaaaactctgttgtaaaaacagtttaacacaatactaaactgctaaacaactagatgtaatcaggttatcaaaggcaagtagagtaataaatctctcctgcatggtaaatctagactttttttcccccttgtcctcgtgataagtatgtcaccaatatatgatttaaaccgagcactgatgctggacttcatgatttttaccctccctttggcaaggctttgtctcactgtacggtttaatttggtgatatcttaagcctttcttcccatccttaactgttcaagtatgtctgttgtaaccaataagtttattgctgtgaaattacttctgatggtagagaaggggttctataactgcttttgttttgttttggataaatttcctgttgtgtgggtggcatttttcttaacgagatttgcttctgtcttagcctcacacagggaaaatatccatttatcttctctctcgtgcttaattaatagctttatctttttttataccattttatccttttctctttaacagaaagtaaatatgtataaaatttgaaggaatcgaactaacaatacattctgtgtatattattttaatgaagaaaataaattgattactggcattggaacagtataaaataccagtttgtacagtatgacctatatgtgaccatgttactcccttccatttcacacaaagaaatagacacaactgcagttcacaagtagtactggctccaccccttggtgctggcagtgtttggggacattatgctggaaagagctcctagcatcagaggattaacactagcagattctgttccatctttgcactgttgcttacctgctgattttcttaactgttcttgtgcaatcgacaatgtgctaacctgcttttctctttttgtaaacgtttttgcattacaggctgcattcttgccttactgtatagaaaaagaaaaaaggctgggtttactattgcacattttaagcttttatacctttatcttcttggaatggtcagattctgaactggacagtcagaaccacaggtctgctgttaagggattttaaattgtgcatttttaaccctacagtgaaataacttaagatatccctgtgttcacagtgtgaggggctgttttatgtcatgttggcataaattgttttgtaaaagggaaagtgtttctaaaggtgtttcagcgcttgtgctgatacaaagtaagttattactttgcaccaggtggtttggccactgaattaatactgtatagcaagagaaacaatcttatttttttggacaacatgttttattaagttcttcatttctgttgattttttttattgcatttatgattcagtggctgggaattgagaatttatttgaaatagaataggtaacacctcagcgtactatagaaaatgcactcagctcaactgctgtgtttaaaatacacattttaaatccctctttacagacactaacataaaagtacatctttctgggttgtaaacatgtggtagtaccagagtattgtatagtcaatgttaaataaaagccaaaactggaatgtgcagaaagtaggctttggttaatttgtggattcatttttatttttgtctttgtttaactttttaaaaaataagatttctggagtagattggtatattctgttaaagacttacagtgatccattttgcttacactgttgcatcacaagggactcacccagggaccatgacctgctggtgtgtgtgtatatttacaaaaacaaaacaaacaaaccacccattgggatataaggtagcaatcacaaactaaagactgcggcttgttgaggtgcaataccctgactcccaaagttagttacagtgggttttattgtttttgtgactgaaggatttattcagactgctgtactcttcatttgatgtaacaaaatgctattaatctaaatatttgtaaataaagtacctgtatctagattaaattaaaattggttgcattattttctgaactataatagggtttttcttcaggtgaacaatttgacgtgtcatcagtttttattgcagcactgtccatattcattgtataaagagaggtctacgtatgtagcatataaaaccacatcactaagtaatagacccacagctttattcttgtgtttacattacccttgaaatgttttcagtcaacccttttcagtgtaagatcagcacatttggtggctgatgctgttctcctttgactgtaccgggagccagattctatcatatgcatgtgtaatcccctgtaatacactcaggtgctcacaaatagagcagattgtcatattgtaacatgcgtgtgccagacaccgggcagtacactttggaaagaatgtgaaatccttttaatttttaatccatagcttactgcttgtgcagtcacctgcctcttgaggttgctcattgcccttggacctgtgaggaggccttcagattagtaattggtgcttagtactatttatgcttaaatagatcttccagtacaatgttgaagtcttttttatggataataacgtgtttgatggagtaacttattatttttttttggttggtggtttacacgttaatagaggtagtacaatttctttggaaaggtgtcttttgaagccagctgttaagcttcatacattacctcccttctcaaattcggtaagacagtagttttggggaacttttttgcccatgtgtcttttaagtgtgattttaaaaaaatgagtggttcagttcattcccctaaacagaagaaaagaccaaataattaccttccattcctcttcatgtgggaatatagagagggttcatgtggcattttagagaaaagataatttatcctcattcaacacaggcccagaaaattgtgtcccagaaggatgtcagtaattgtgactaggccaggccttttagcattttgctaagacttgaaacaaaaaatgtaaatacaaaagaaatcaagttttgttttgaaagatgccttctagaacttactgtgtattaataaattgtcactttcattgtctttattgtaactccattgatcccgtatcttaacggttcacgtctagccaaataactgttttggaataaaaaccttggtggtgagggatgac

SEQ ID NO: 325913 - DNA, 481 bp, Homo sapiens
ggcgcgagcgcccgtggggcgggcctcagcggcggcgcgacaagtccagaggtgagggctgaggaaggggcgtggctagcgggctggcctcagccaccctcttccgggctccgccagctgcgcgcgcatcttctcccccttcttttgtggtccggcccattgcgagggtgacaggaaaccctgtgcagggagcgccgccatcttggaccagcccgaggaagatactgagggagcacaggagcagtcaccgctgccactgctactgccgctactgctgccggcgcgtctgcacctctcggcctgccagtgtacctgccggcgcctcggtcgaccgccacgccgtcgagaatgacaatttccaggatgacctctacgcgggactccctcagcttcgcaagagactgcctcagcttgatgacgatgcggacactgcaacacacacctccaatcctcctcgttggctcactacacccattacacc

SEQ ID NO: 325914 - DNA, 2924 bp, Homo sapiens
actgcacatgcgcccctctcaagtgctggcagaccactgtgcatgcagacaacgcacccaaagggaagaatcaggggaacagtaacgcaaccctgccagcatgccaatgtagaaaacttgaaagaatgaacacaaaaatgtttacaaaggatatcatggcagagtgccaccatggcaactgcaccatacaactactcttacatctttaaatatattattattggggacatgggagtaggaaaatcttgcttgcttcatcaatttacagaaaaaaaatttatggctgattgtcctcacacaattggtgttgaatttggtacaagaataatcgaagttagtggccaaaaaataaaactgcagatttgggatacggcaggacaggagcgatttagggctgttacacggagctactacagaggagctgcgggagctcttatggtctatgatatcactagaagaagtacatataaccacttaagcagctggttgacagatgcaaggaatctcaccaatccaaatactgtaataattctcataggaaataaagcagatttggaggcacagagagatgttacatatgaagaagccaaacagtttgctgaagaaaatggcttattgttcctcgaagcgagtgcaaaaacgggagagaatgtagaagatgccttccttgaggctgccaagaaaatctatcagaacattcaggatggaagcttggatctgaatgctgctgagtctggtgtacaacacaaaccttcagccccgcagggaggccggctaaccagtgaaccccaaccccagagagaaggctgtggctgctagtgacctctttgctgtggcccctcatttgacctttcacctctgtctgttggaagcagtactttttactgcctcattgtcttctgtacatcttactgggtttaattaaaaaaaaagaaaaaactctgttgtaaaaacagtttaacacaatactaaactgctaaacaactagatgtaatcaggttatcaaaggcaagtagagtaataaatctctcctgcatggtaaatctagactttttttcccccttgtcctcgtgataagtatgtcaccaatatatgatttaaaccgagcactgatgctggacttcatgatttttaccctccctttggcaaggctttgtctcactgtacggtttaatttggtgatatcttaagcctttcttcccatccttaactgttcaagtatgtctgttgtaaccaataagtttattgctgtgaaattacttctgatggtagagaaggggttctataactgcttttgttttgttttggataaatttcctgttgtgtgggtggcatttttcttaacgagatttgcttctgtcttagcctcacacagggaaaatatccatttatcttctctctcgtgcttaattaatagctttatctttttttataccattttatccttttctctttaacagaaagtaaatatgtataaaatttgaaggaatcgaactaacaatacattctgtgtatattattttaatgaagaaaataaattgattactggcattggaacagtataaaataccagtttgtacagtatgacctatatgtgaccatgttactcccttccatttcacacaaagaaatagacacaactgcagttcacaagtagtactggctccaccccttggtgctggcagtgtttggggacattatgctggaaagagctcctagcatcagaggattaacactagcagattctgttccatctttgcactgttgcttacctgctgattttcttaactgttcttgtgcaatcgacaatgtgctaacctgcttttctctttttgtaaacgtttttgcattacaggctgcattcttgccttactgtatagaaaaagaaaaaaggctgggtttactattgcacattttaagcttttatacctttatcttcttggaatggtcagattctgaactggacagtcagaaccacaggtctgctgttaagggattttaaattgtgcatttttaaccctacagtgaaataacttaagatatccctgtgttcacagtgtgaggggctgttttatgtcatgttggcataaattgttttgtaaaagggaaagtgtttctaaaggtgtttcagcgcttgtgctgatacaaagtaagttattactttgcaccaggtggtttggccactgaattaatactgtatagcaagagaaacaatcttatttttttggacaacatgttttattaagttcttcatttctgttgattttttttattgcatttatgattcagtggctgggaattgagaatttatttgaaatagaataggtaacacctcagcgtactatagaaaatgcactcagctcaactgctgtgtttaaaatacacattttaaatccctctttacagacactaacataaaagtacatctttctgggttgtaaacatgtggtagtaccagagtattgtatagtcaatgttaaataaaagccaaaactggaatgtgcagaaagtaggctttggttaatttgtggattcatttttatttttgtctttgtttaactttttaaaaaataagatttctggagtagattggtatattctgttaaagacttacagtgatccattttgcttacactgttgcatcacaagggactcacccagggaccatgacctgctggtgtgtgtgtatatttacaaaaacaaaacaaacaaaccacccattgggatataaggtagcaatcacaaactaaagactgcggcttgttgaggtgcaataccctgactcccaaagttagttacagtgggttttattgtttttgtgactgaaggatttattcagactgctgtactcttcatttgatgtaacaaaatgctattaatctaaatatttgtaaataaagtacctgtatctagattaaattaaa

SEQ ID NO: 325915 - DNA, 2988 bp, Homo sapiens
ggcgcgagcgcccgtggggcgggcctcagcggcggcgcgacaagtccagaggtgagggctgaggaaggggcgtggctagcgggctggcctcagccaccctcttccgggctccgccagctgcgcgcgcatcttctcccccttcttttgtggtccggcccattgcgagggtgacaggaaaccctgtgcagggagcgccgccatcttggaccagcccgaggaagatactgagggagcacaggagcagtcaccgctgccactgctactgccgctactgctgccggcgcgtctgcacctctcggcctgccagtgtacctgccggcgcctcggtcgaccgcccccgccccctctcccgctgcgtccgcactcctgttcctggtcctgacgcccccctcccgcccggaaagctgcccagccaccagcaaccccccagtgccaccatggcaactgcaccatacaactactcttacatctttaaatatattattattggggacatgggagtaggaaaatcttgcttgcttcatcaatttacagaaaaaaaatttatggctgattgtcctcacacaattggtgttgaatttggtacaagaataatcgaagttagtggccaaaaaataaagaggcacagagagatgttacatatgaagaagccaaacagtttgctgaagaaaatggcttattgttcctcgaagcgagtgcaaaaacgggagagaatgtagaagatgccttccttgaggctgccaagaaaatctatcagaacattcaggatggaagcttggatctgaatgctgctgagtctggtgtacaacacaaaccttcagccccgcagggaggccggctaaccagtgaaccccaaccccagagagaaggctgtggctgctagtgacctctttgctgtggcccctcatttgacctttcacctctgtctgttggaagcagtactttttactgcctcattgtcttctgtacatcttactgggtttaattaaaaaaaaagaaaaaactctgttgtaaaaacagtttaacacaatactaaactgctaaacaactagatgtaatcaggttatcaaaggcaagtagagtaataaatctctcctgcatggtaaatctagactttttttcccccttgtcctcgtgataagtatgtcaccaatatatgatttaaaccgagcactgatgctggacttcatgatttttaccctccctttggcaaggctttgtctcactgtacggtttaatttggtgatatcttaagcctttcttcccatccttaactgttcaagtatgtctgttgtaaccaataagtttattgctgtgaaattacttctgatggtagagaaggggttctataactgcttttgttttgttttggataaatttcctgttgtgtgggtggcatttttcttaacgagatttgcttctgtcttagcctcacacagggaaaatatccatttatcttctctctcgtgcttaattaatagctttatctttttttataccattttatccttttctctttaacagaaagtaaatatgtataaaatttgaaggaatcgaactaacaatacattctgtgtatattattttaatgaagaaaataaattgattactggcattggaacagtataaaataccagtttgtacagtatgacctatatgtgaccatgttactcccttccatttcacacaaagaaatagacacaactgcagttcacaagtagtactggctccaccccttggtgctggcagtgtttggggacattatgctggaaagagctcctagcatcagaggattaacactagcagattctgttccatctttgcactgttgcttacctgctgattttcttaactgttcttgtgcaatcgacaatgtgctaacctgcttttctctttttgtaaacgtttttgcattacaggctgcattcttgccttactgtatagaaaaagaaaaaaggctgggtttactattgcacattttaagcttttatacctttatcttcttggaatggtcagattctgaactggacagtcagaaccacaggtctgctgttaagggattttaaattgtgcatttttaaccctacagtgaaataacttaagatatccctgtgttcacagtgtgaggggctgttttatgtcatgttggcataaattgttttgtaaaagggaaagtgtttctaaaggtgtttcagcgcttgtgctgatacaaagtaagttattactttgcaccaggtggtttggccactgaattaatactgtatagcaagagaaacaatcttatttttttggacaacatgttttattaagttcttcatttctgttgattttttttattgcatttatgattcagtggctgggaattgagaatttatttgaaatagaataggtaacacctcagcgtactatagaaaatgcactcagctcaactgctgtgtttaaaatacacattttaaatccctctttacagacactaacataaaagtacatctttctgggttgtaaacatgtggtagtaccagagtattgtatagtcaatgttaaataaaagccaaaactggaatgtgcagaaagtaggctttggttaatttgtggattcatttttatttttgtctttgtttaactttttaaaaaataagatttctggagtagattggtatattctgttaaagacttacagtgatccattttgcttacactgttgcatcacaagggactcacccagggaccatgacctgctggtgtgtgtgtatatttacaaaaacaaaacaaacaaaccacccattgggatataaggtagcaatcacaaactaaagactgcggcttgttgaggtgcaataccctgactcccaaagttagttacagtgggttttattgtttttgtgactgaaggatttattcagactgctgtactcttcatttgatgtaacaaaatgctattaatctaaatatttgtaaataaagtacctgtatctagattaaattaaa

SEQ ID NO: 325916 - DNA, 2533 bp, Homo sapiens
aactatacagagaagtcgcagtcatgttgaactcgatcatatgactatctgtaccacccctgttgtttaccaccttggcaattcgtctagaagtatacctggaatcttaccagtttggatatggtcgtcgttctcataggacatgactgagatttgcctgccgggaggcacagagagatgttacatatgaagaagccaaacagtttgctgaagaaaatggcttattgttcctcgaagcgagtgcaaaaacgggagagaatgtagaagatgccttccttgaggctgccaagaaaatctatcagaacattcaggatggaagcttggatctgaatgctgctgagtctggtgtacaacacaaaccttcagccccgcagggaggccggctaaccagtgaaccccaaccccagagagaaggctgtggctgctagtgacctctttgctgtggcccctcatttgacctttcacctctgtctgttggaagcagtactttttactgcctcattgtcttctgtacatcttactgggtttaattaaaaaaaaagaaaaaactctgttgtaaaaacagtttaacacaatactaaactgctaaacaactagatgtaatcaggttatcaaaggcaagtagagtaataaatctctcctgcatggtaaatctagactttttttcccccttgtcctcgtgataagtatgtcaccaatatatgatttaaaccgagcactgatgctggacttcatgatttttaccctccctttggcaaggctttgtctcactgtacggtttaatttggtgatatcttaagcctttcttcccatccttaactgttcaagtatgtctgttgtaaccaataagtttattgctgtgaaattacttctgatggtagagaaggggttctataactgcttttgttttgttttggataaatttcctgttgtgtgggtggcatttttcttaacgagatttgcttctgtcttagcctcacacagggaaaatatccatttatcttctctctcgtgcttaattaatagctttatctttttttataccattttatccttttctctttaacagaaagtaaatatgtataaaatttgaaggaatcgaactaacaatacattctgtgtatattattttaatgaagaaaataaattgattactggcattggaacagtataaaataccagtttgtacagtatgacctatatgtgaccatgttactcccttccatttcacacaaagaaatagacacaactgcagttcacaagtagtactggctccaccccttggtgctggcagtgtttggggacattatgctggaaagagctcctagcatcagaggattaacactagcagattctgttccatctttgcactgttgcttacctgctgattttcttaactgttcttgtgcaatcgacaatgtgctaacctgcttttctctttttgtaaacgtttttgcattacaggctgcattcttgccttactgtatagaaaaagaaaaaaggctgggtttactattgcacattttaagcttttatacctttatcttcttggaatggtcagattctgaactggacagtcagaaccacaggtctgctgttaagggattttaaattgtgcatttttaaccctacagtgaaataacttaagatatccctgtgttcacagtgtgaggggctgttttatgtcatgttggcataaattgttttgtaaaagggaaagtgtttctaaaggtgtttcagcgcttgtgctgatacaaagtaagttattactttgcaccaggtggtttggccactgaattaatactgtatagcaagagaaacaatcttatttttttggacaacatgttttattaagttcttcatttctgttgattttttttattgcatttatgattcagtggctgggaattgagaatttatttgaaatagaataggtaacacctcagcgtactatagaaaatgcactcagctcaactgctgtgtttaaaatacacattttaaatccctctttacagacactaacataaaagtacatctttctgggttgtaaacatgtggtagtaccagagtattgtatagtcaatgttaaataaaagccaaaactggaatgtgcagaaagtaggctttggttaatttgtggattcatttttatttttgtctttgtttaactttttaaaaaataagatttctggagtagattggtatattctgttaaagacttacagtgatccattttgcttacactgttgcatcacaagggactcacccagggaccatgacctgctggtgtgtgtgtatatttacaaaaacaaaacaaacaaaccacccattgggatataaggtagcaatcacaaactaaagactgcggcttgttgaggtgcaataccctgactcccaaagttagttacagtgggttttattgtttttgtgactgaaggatttattcagactgctgtactcttcatttgatgtaacaaaatgctattaatctaaatatttgtaaataaagtacctgtatctagattaaattaaa

SEQ ID NO: 325917 - DNA, 2039 bp, Homo sapiens
  misc_feature (19)..(19): n is a, c, g, or t
  misc_feature (55)..(55): n is a, c, g, or t
tgcgagggcgcggggaggntgggtgtggggggcgcggtgcagagggagagggggncattcctgtacatcttactgggtttaattaaaaaaaaagaaaaaactctgttaatcaggttatcaaaggcaagtagagtaataaatctctcctgcatggtaaatctagactttttttcccccttgtcctcgtgataagtatgtcaccaatatatgatttaaaccgagcactgatgctggacttcatgatttttaccctccctttggcaaggctttgtctcactgtacggtttaatttggtgatatcttaagcctttcttcccatccttaactgttcaagtatgtctgttgtaaccaataagtttattgctgtgaaattacttctgatggtagagaaggggttctataactgcttttgttttgttttggataaatttcctgttgtgtgggtggcatttttcttaacgagatttgcttctgtcttagcctcacacagggaaaatatccatttatcttctctctcgtgcttaattaatagctttatctttttttataccattttatccttttctctttaacagaaagtaaatatgtataaaatttgaaggaatcgaactaacaatacattctgtgtatattattttaatgaagaaaataaattgattactggcattggaacagtataaaataccagtttgtacagtatgacctatatgtgaccatgttactcccttccatttcacacaaagaaatagacacaactgcagttcacaagtagtactggctccaccccttggtgctggcagtgtttggggacattatgctggaaagagctcctagcatcagaggattaacactagcagattctgttccatctttgcactgttgcttacctgctgattttcttaactgttcttgtgcaatcgacaatgtgctaacctgcttttctctttttgtaaacgtttttgcattacaggctgcattcttgccttactgtatagaaaaagaaaaaaggctgggtttactattgcacattttaagcttttatacctttatcttcttggaatggtcagattctgaactggacagtcagaaccacaggtctgctgttaagggattttaaattgtgcatttttaaccctacagtgaaataacttaagatatccctgtgttcacagtgtgaggggctgttttatgtcatgttggcataaattgttttgtaaaagggaaagtgtttctaaaggtgtttcagcgcttgtgctgatacaaagtaagttattactttgcaccaggtggtttggccactgaattaatactgtatagcaagagaaacaatcttatttttttggacaacatgttttattaagttcttcatttctgttgattttttttattgcatttatgattcagtggctgggaattgagaatttatttgaaatagaataggtaacacctcagcgtactatagaaaatgcactcagctcaactgctgtgtttaaaatacacattttaaatccctctttacagacactaacataaaagtacatctttctgggttgtaaacatgtggtagtaccagagtattgtatagtcaatgttaaataaaagccaaaactggaatgtgcagaaagtaggctttggttaatttgtggattcatttttatttttgtctttgtttaactttttaaaaaataagatttctggagtagattggtatattctgttaaagacttacagtgatccattttgcttacactgttgcatcacaagggactcacccagggaccatgacctgctggtgtgtgtgtatatttacaaaaacaaaacaaacaaaccacccattgggatataaggtagcaatcacaaactaaagactgcggcttgttgaggtgcaataccctgactcccaaagttagttacagtgggttttattgtttttgtgactgaaggatttattcagactgctgtactcttcatttgatgtaacaaaatgctattaatctaaatatttgtaaataaagtacctgtatctagattaaattaaa

SEQ ID NO: 325918 - DNA, 2724 bp, Homo sapiens
  misc_feature (2678)..(2678): n is a, c, g, or t
ggcgcgagcgcccgtggggcgggcctcagcggcggcgcgacaagtccagaggtgagggctgaggaaggggcgtggctagcgggctggcctcagccaccctcttccgggctccgccagctgcgcgcgcatcttctcccccttcttttgtggtccggcccattgcgagggtgacaggaaaccctgtgcagggagcgccgccatcttggaccagcccgaggaagatactgagggagcacaggagcagtcaccgctgccactgctactgccgctactgctgccggcgcgtctgcacctctcggcctgccagtgtacctgccggcgcctcggtcgaccgcccccgccccctctcccgctgcgtccgcactcctgttcctggtcctgacgcccccctcccgcccggaaagctgcccagccaccagcaaccccccagtgccaccatggcaactgcaccatacaactactcttacatctttaaatatattattattggggacatgggagtaggaaaatcttgcttgcttcatcaatttacagaaaaaaaatttatggctgattgtcctcacacaattggtgttgaatttggtacaagaataatcgaagttagtggccaaaaaataaaactgcagatttgggatacggcaggacaggagcgatttagggctgttacacggagctactacagaggagctgcgggagctcttatggtctatgatatcactagaagaagtacatataaccacttaagcagctggttgacagatgcaaggaatctcaccaatccaaatactgtaataattctcataggaaataaagcagatttggaggcacagagagatgttacatatgaagaagccaaacagtttgctgaagaaaatggcttattgttcctcgaagcgagtgcaaaaacgggagagaatgtagaagatgccttccttgaggctgccaagaaaatctatcagaacattcaggatggaagcttggatctgaatgctgctgagtctggtgtacaacacaaaccttcagccccgcagggaggccggctaaccagtgaaccccaaccccagagagaaggctgtggctgctagtgacctctttgctgtggcccctcatttgacctttcacctctgtctgttggaagcagtactttttactgcctcattgtcttctgtacatcttactgggtttaattaaaaaaaaagaaaaaactctgttgtaaaaacagtttaacacaatactaaactgctaaacaactagatgtaatcaggttatcaaaggcaagtagagtaataaatctctcctgcatggtaaatctagactttttttcccccttgtcctcgtgataagtatgtcaccaatatatgatttaaaccgagcactgatgctggacttcatgatttttaccctccctttggcaaggctttgtctcactgtacggtttaatttggtgatatcttaagcctttcttcccatccttaactgttcaagtatgtctgttgtaaccaataagtttattgctgtgaaattacttctgatggtagagaaggggttctataactgcttttgttttgttttggataaatttcctgttgtgtgggtggcatttttcttaacgagatttgcttctgtcttagcctcacacagggaaaatatccatttatcttctctctcgtgcttaattaatagctttatctttttttataccattttatccttttctctttaacagaaagtaaatatgtataaaatttgaaggaatcgaactaacaatacattctgtgtatattattttaatgaagaaaataaattgattactggcattggaacagtataaaataccagtttgtacagtatgacctatatgtgaccatgttactcccttccatttcacacaaagaaatagacacaactgcagttcacaagtagtactggctccaccccttggtgctggcagtgtttggggacattatgctggaaagagctcctagcatcagaggattaacactagcagattctgttccatctttgcactgttgcttacctgctgattttcttaactgttcttgtgcaatcgacaatgtgctaacctgcttttctctttttgtaaacgtttttgcattacaggctgcattcttgccttactgtatagaaaaagaaaaaaggctgggtttactattgcacattttaagcttttatacctttatcttcttggaatggtcagattctgaactggacagtcagaaccacaggtctgctgttaagggattttaaattgtgcatttttaaccctacagtgaaataacttaagatatccctgtgttcacagtgtgaggggctgttttatgtcatgttggcataaattgttttgtaaaagggaaagtgtttctaaaggtgtttcagcgcttgtgctgatacaaagtaagttattactttgcaccaggtggtttggccactgaattaatactgtatagcaagagaaacaatcttatttttttggacaacatgttttattaagttcttcatttctgttgattttttttattgcatttatgattcagtggctgggaattgagaatttatttgaaatagaataggtaacacctcagcgtactatagaaaatgcactcagctcaactgctgtgtttaaaatgtgtattttaaacacagcagttgactgagtnattttctatagtaccctgaggtgtttaaaatacacattttaaatcc

SEQ ID NO: 325919 - DNA, 1372 bp, Homo sapiens
tgaactgcagttgtgtctatttctttgtgtgaaatggaagggagtaacatggtcacatataggtcatactgtacaaactggtattttatactgttccaatgccagtactggctccaccccttggtgctggcagtgtttggggacattatgctggaaagagctcctagcatcagaggattaacactagcagattctgttccatctttgcactgttgcttacctgctgattttcttaactgttcttgtgcaatcgacaatgtgctaacctgcttttctctttttgtaaacgtttttgcattacaggctgcattcttgccttactgtatagaaaaagaaaaaaggctgggtttactattgcacattttaagcttttatacctttatcttcttggaatggtcagattctgaactggacagtcagaaccacaggtctgctgttaagggattttaaattgtgcatttttaaccctacagtgaaataacttaagatatccctgtgttcacagtgtgaggggctgttttatgtcatgttggcataaattgttttgtaaaagggaaagtgtttctaaaggtgtttcagcgcttgtgctgatacaaagtaagttattactttgcaccaggtggtttggccactgaattaatactgtatagcaagagaaacaatcttatttttttggacaacatgttttattaagttcttcatttctgttgattttttttattgcatttatgattcagtggctgggaattgagaatttatttgaaatagaataggtaacacctcagcgtactatagaaaatgcactcagctcaactgctgtgtttaaaatacacattttaaatccctctttacagacactaacataaaagtacatctttctgggttgtaaacatgtggtagtaccagagtattgtatagtcaatgttaaataaaagccaaaactggaatgtgcagaaagtaggctttggttaatttgtggattcatttttatttttgtctttgtttaactttttaaaaaataagatttctggagtagattggtatattctgttaaagacttacagtgatccattttgcttacactgttgcatcacaagggactcacccagggaccatgacctgctggtgtgtgtgtatatttacaaaaacaaaacaaacaaaccacccattgggatataaggtagcaatcacaaactaaagactgcggcttgttgaggtgcaataccctgactcccaaagttagttacagtgggttttattgtttttgtgactgaaggatttattcagactgctgtactcttcatttgatgtaacaaaatgctattaatctaaatatttgtaaataaagtacctgtatctagattaaattaaa

SEQ ID NO: 325920 - DNA, 1437 bp, Homo sapiens
  misc_feature (1153)..(1153): n is a, c, g, or t
  misc_feature (1177)..(1178): n is a, c, g, or t
  misc_feature (1231)..(1231): n is a, c, g, or t
  misc_feature (1260)..(1260): n is a, c, g, or t
ggcgcgagcgcccgtggggcgggcctcagcggcggcgcgacaagtccagaggtgagggctgaggaaggggcgtggctagcgggctggcctcagccaccctcttccgggctccgccagctgcgcgcgcatcttctcccccttcttttgtggtccggcccattgcgagggtgacaggaaaccctgtgcagggagcgccgccatcttggaccagcccgaggaagatactgagggagcacaggagcagtcaccgctgccactgctactgccgctactgctgccggcgcgtctgcacctctcggcctgccagtgtacctgccggcgcctcggtcgaccgcccccgccccctctcccgctgcgtccgcactcctgttcctggtcctgacgcccccctcccgcccggaaagctgcccagccaccagcaaccccccagtgccaccatggcaactgcaccatacaactactcttacatctttaaatatattattattggggacatgggagtaggaaaatcttgcttgcttcatcaatttacagaaaaaaaatttatggctgattgtcctcacacaattggtgttgaatttggtacaagaataatcgaagttagtggccaaaaaataaaactgcagatttgggatacggcaggacaggagcgatttagggctgttacacggagctactacagaggagctgcgggagctcttatggtctatgatatcactagaagaagtacatataaccacttaagcagctggttgacagatgcaaggaatctcaccaatccaaatactgtaataattctcataggaaataaagcagatttggaggcacagagagatgttacatatgaagaagccaaacagtttgctgaagaaaatggcttattgttcctcgaagcgagtgcaaaaacgggagagaatgtagaagatgccttccttgaggctgccaagaaaatctatcagaacattcaggatggaagcttggatctgaatgctgctgagtctggtgtacaacacaaaccttcagccccgcagggaggccggctaaccagtgaaccccaaccccagagagaaggctgtggctgctagtgacctctttgctgtggcccctcatttgacctttcacctctgtctgttggaagcagtactttactgcntatgctctgcattactgggtatannaaagaaacttgtgaaacagtaccatctactgtacactgtgatagtataagagnagatatttctgtgattaactttcctgctngagtgacattgtacgctgctgtagatctctgagtgtatcgatggatacttcacacgaatttgccaatgtgaattggaggtcattttgaaaagggggttaatttcccaaaaaattttcaggaattcttctttaaaaaagggccctgttaaaatcggaaaggtgtttaaaaagaaccgg

SEQ ID NO: 325921 - DNA, 608 bp, Homo sapiens
agatcattagtaacttacttgatcagttaacagggaaggggactttaaggggagaagagactatagtgatgtttaacttaaatttataaagatttttttgtttgacaattttcagattaatacttattggattttttttaaattatacttttaagttctagtggatattaagtgaaatattggagttgtggtataaatggtttcttatatttctgtggatagcacatgagaatgtgtaagcatcattcatccaagagaatttgtgtatttgatcagtttgtgaaatgcagttttattttgacttactgtaaccaacatttgtttgtattcagtgtccttttctacctttaaaggatatcagtcatccgtttgaattacttgtatatgctttccttctgaagtaacagagatttctttgtttttatgccaccatggcaactgcaccatacaactactcttacatctttaaatatattattattggtaagtttatttaacttacactcttgttcccaaaagaaggttaacatacaaaatatttatatgttaatacttaaacagtaccacttcaggactgagtgattttcttactgtaaaactaaaactcc

SEQ ID NO: 325922 - DNA, 3190 bp, Homo sapiens
ggcgcgagcgcccgtggggcgggcctcagcggcggcgcgacaagtccagaggtgagggctgaggaaggggcgtggctagcgggctggcctcagccaccctcttccgggctccgccagctgcgcgcgcatcttctcccccttcttttgtggtccggcccattgcgagggtgacaggaaaccctgtgcagggagcgccgccatcttggaccagcccgaggaagatactgagggagcacaggagcagtcaccgctgccactgctactgccgctactgctgccggcgcgtctgcacctctcggcctgccagtgtacctgccggcgcctcggtcgaccgcccccgccccctctcccgctgcgtccgcactcctgttcctggtcctgacgcccccctcccgcccggaaagctgcccagccaccagcaaccccccagtgccaccatggcaactgcaccatacaactactcttacatctttaaatatattattattggggacatgggagtaggaaaatcttgcttgcttcatcaatttacagaaaaaaaatttatggctgattgtcctcacacaattggtgttgaatttggtacaagaataatcgaagttagtggccaaaaaataaaactgcagatttgggatacggcaggacaggagcgatttagggctgttacacggagctactacagaggagctgcgggagctcttatggtctatgatatcactagaagaagtacatataaccacttaagcagctggttgacagatgcaaggaatctcaccaatccaaatactgtaataattctcataggaaataaagcagatttggaggcacagagagatgttacatatgaagaagccaaacagtttgctgaagaaaatggcttattgttcctcgaagcgagtgcaaaaacgggagagaatgtagaagatgccttccttgaggctgccaagaaaatctatcagaacattcaggatggaagcttggatctgaatgctgctgagtctggtgtacaacacaaaccttcagccccgcagggaggccggctaaccagtgaaccccaaccccagagagaaggctgtggctgctagtgacctctttgctgtggcccctcatttgacctttcacctctgtctgttggaagcagtactttttactgcctcattgtcttctgtacatcttactgggtttaattaaaaaaaaagaaaaaactctgttgtaaaaacagtttaacacaatactaaactgctaaacaactagatgtaatcaggttatcaaaggcaagtagagtaataaatctctcctgcatggtaaatctagactttttttcccccttgtcctcgtgataagtatgtcaccaatatatgatttaaaccgagcactgatgctggacttcatgatttttaccctccctttggcaaggctttgtctcactgtacggtttaatttggtgatatcttaagcctttcttcccatccttaactgttcaagtatgtctgttgtaaccaataagtttattgctgtgaaattacttctgatggtagagaaggggttctataactgcttttgttttgttttggataaatttcctgttgtgtgggtggcatttttcttaacgagatttgcttctgtcttagcctcacacagggaaaatatccatttatcttctctctcgtgcttaattaatagctttatctttttttataccattttatccttttctctttaacagaaagtaaatatgtataaaatttgaaggaatcgaactaacaatacattctgtgtatattattttaatgaagaaaataaattgattactggcattggaacagtataaaataccagtttgtacagtatgacctatatgtgaccatgttactcccttccatttcacacaaagaaatagacacaactgcagttcacaagtagtactggctccaccccttggtgctggcagtgtttggggacattatgctggaaagagctcctagcatcagaggattaacactagcagattctgttccatctttgcactgttgcttacctgctgattttcttaactgttcttgtgcaatcgacaatgtgctaacctgcttttctctttttgtaaacgtttttgcattacaggctgcattcttgccttactgtatagaaaaagaaaaaaggctgggtttactattgcacattttaagcttttatacctttatcttcttggaatggtcagattctgaactggacagtcagaaccacaggtctgctgttaagggattttaaattgtgcatttttaaccctacagtgaaataacttaagatatccctgtgttcacagtgtgaggggctgttttatgtcatgttggcataaattgttttgtaaaagggaaagtgtttctaaaggtgtttcagcgcttgtgctgatacaaagtaagttattactttgcaccaggtggtttggccactgaattaatactgtatagcaagagaaacaatcttatttttttggacaacatgttttattaagttcttcatttctgttgattttttttattgcatttatgattcagtggctgggaattgagaatttatttgaaatagaataggtaacacctcagcgtactatagaaaatgcactcagctcaactgctgtgtttaaaatacacattttaaatccctctttacagacactaacataaaagtacatctttctgggttgtaaacatgtggtagtaccagagtattgtatagtcaatgttaaataaaagccaaaactggaatgtgcagaaagtaggctttggttaatttgtggattcatttttatttttgtctttgtttaactttttaaaaaataagatttctggagtagattggtatattctgttaaagacttacagtgatccattttgcttacactgttgcatcacaagggactcacccagggaccatgacctgctggtgtgtgtgtatatttacaaaaacaaaacaaacaaaccacccattgggatataaggtagcaatcacaaactaaagactgcggcttgttgaggtgcaataccctgactcccaaagttagttacagtgggttttattgtttttgtgactgaaggatttattcagactgctgtactcttcatttgatgtaacaaaatgctattaatctaaatatttgtaaataaagtacctgtatctagattaaattaaa

SEQ ID NO: 325923 - DNA, 994 bp, Homo sapiens
  misc_feature (943)..(943): n is a, c, g, or t
ggcgcgagcgcccgtggggcgggcctcagcggcggcgcgacaagtccagaggtgagggctgaggaaggggcgtggctagcgggctggcctcagccaccctcttccgggctccgccagctgcgcgcgcatcttctcccccttcttttgtggtccggcccattgcgagggtgacaggaaaccctgtgcagggagcgccgccatcttggaccagcccgaggaagatactgagggagcacaggagcagtcaccgctgccactgctactgccgctactgctgccggcgcgtctgcacctctcggcctgccagtgtacctgccggcgcctcggtcgaccgcctgccaccatggcaactgcaccatacaactactcttacatctttaaatatattattattggggacatgggagtaggaaaatcttgcttgcttcatcaatttacagaaaaaaaatttatggctgattgtcctcacacaattggtgttgaatttggtacaagaataatcgaagttagtggccaaaaaataaaactgcagatttgggatacggcaggacaggagcgatttagggctgttacacggagctactacagaggagctgcgggagctcttatggtctatgatatcactagaagaagtacatataaccacttaagcagctggttgacagatgcaaggaatctcaccaatccaaatactgtaataattctcataggaaataaagcagatttggaggcacagagagatgttacatatgaagaagccaaacagtttgctgaagaaaatggcttattgttcctcgaagcgagagtccaggcgacgcgggagcggcagcggaaaggggggaggctgggcggcggcggcgttggcgcttctgacggggggcggggaaatgctgctgaacgtggcgctggtggctctggtgctgctgggggcctaccggctgtngggtgcgctgggggcggcggggtctgggggccggggcggggcgggcgagga

SEQ ID NO: 325924 - DNA, 3144 bp, Homo sapiens
ggcgcgagcgcccgtggggcgggcctcagcggcggcgcgacaagtccagaggtgagggctgaggaaggggcgtggctagcgggctggcctcagccaccctcttccgggctccgccagctgcgcgcgcatcttctcccccttcttttgtggtccggcccattgcgagggtgacaggaaaccctgtgcagggagcgccgccatcttggaccagcccgaggaagatactgagggagcacaggagcagtcaccgctgccactgctactgccgctactgctgccggcgcgtctgcacctctcggcctgccagtgtacctgccggcgcctcggtcgaccgcccccgccccctctcccgctgcgtccgcactcctgttcctggtcctgacgcccccctcccgcccggaaagctgcccagccaccagcaaccccccagtgccaccatggcaactgcaccatacaactactcttacatctttaaatatattattattggggacatgggagtaggaaaatcttgcttgcttcatcaatttacagaaaaaaaatttatggctgattgtcctcacacaattggtgttgaatttggtacaagaataatcgaagttagtggccaaaaaataaaactgcagatttgggatacggcaggacaggagcgatttagggctgttacacggagctactacagaggagctgcgggagctcttatggtctatgatatcactagaagaagtacatataaccacttaagcagctggttgacagatgcaaggaatctcaccaatccaaatactgtaataattctcataggaaataaagcagatttggaggcacagagagatgttacatatgaagaagccaaacagtttgctgaagaaaatggcttattgttcctcgaagcgagtgcaaaaacgggagagaatgtagaagatgccttccttgaggctgccaagaaaatctatcagaacattcaggatggaagcttggatctgaatgctgctgagtctggtgtacaacacaaaccttcagccccgcagggaggccggctaaccagtgaaccccaaccccagagagaaggctgtggctgctagtgacctctttgctgtggcccctcatttgacctttcacctctgtctgttggaagcagtactttttactgcctcattgtcttctgtacatcttactgggtttaattaaaaaaaaagaaaaaactctgttaatcaggttatcaaaggcaagtagagtaataaatctctcctgcatggtaaatctagactttttttcccccttgtcctcgtgataagtatgtcaccaatatatgatttaaaccgagcactgatgctggacttcatgatttttaccctccctttggcaaggctttgtctcactgtacggtttaatttggtgatatcttaagcctttcttcccatccttaactgttcaagtatgtctgttgtaaccaataagtttattgctgtgaaattacttctgatggtagagaaggggttctataactgcttttgttttgttttggataaatttcctgttgtgtgggtggcatttttcttaacgagatttgcttctgtcttagcctcacacagggaaaatatccatttatcttctctctcgtgcttaattaatagctttatctttttttataccattttatccttttctctttaacagaaagtaaatatgtataaaatttgaaggaatcgaactaacaatacattctgtgtatattattttaatgaagaaaataaattgattactggcattggaacagtataaaataccagtttgtacagtatgacctatatgtgaccatgttactcccttccatttcacacaaagaaatagacacaactgcagttcacaagtagtactggctccaccccttggtgctggcagtgtttggggacattatgctggaaagagctcctagcatcagaggattaacactagcagattctgttccatctttgcactgttgcttacctgctgattttcttaactgttcttgtgcaatcgacaatgtgctaacctgcttttctctttttgtaaacgtttttgcattacaggctgcattcttgccttactgtatagaaaaagaaaaaaggctgggtttactattgcacattttaagcttttatacctttatcttcttggaatggtcagattctgaactggacagtcagaaccacaggtctgctgttaagggattttaaattgtgcatttttaaccctacagtgaaataacttaagatatccctgtgttcacagtgtgaggggctgttttatgtcatgttggcataaattgttttgtaaaagggaaagtgtttctaaaggtgtttcagcgcttgtgctgatacaaagtaagttattactttgcaccaggtggtttggccactgaattaatactgtatagcaagagaaacaatcttatttttttggacaacatgttttattaagttcttcatttctgttgattttttttattgcatttatgattcagtggctgggaattgagaatttatttgaaatagaataggtaacacctcagcgtactatagaaaatgcactcagctcaactgctgtgtttaaaatacacattttaaatccctctttacagacactaacataaaagtacatctttctgggttgtaaacatgtggtagtaccagagtattgtatagtcaatgttaaataaaagccaaaactggaatgtgcagaaagtaggctttggttaatttgtggattcatttttatttttgtctttgtttaactttttaaaaaataagatttctggagtagattggtatattctgttaaagacttacagtgatccattttgcttacactgttgcatcacaagggactcacccagggaccatgacctgctggtgtgtgtgtatatttacaaaaacaaaacaaacaaaccacccattgggatataaggtagcaatcacaaactaaagactgcggcttgttgaggtgcaataccctgactcccaaagttagttacagtgggttttattgtttttgtgactgaaggatttattcagactgctgtactcttcatttgatgtaacaaaatgctattaatctaaatatttgtaaataaagtacctgtatctagattaaattaaa

SEQ ID NO: 325925 - DNA, 3131 bp, Homo sapiens
ggcgcgagcgcccgtggggcgggcctcagcggcggcgcgacaagtccagaggtgagggctgaggaaggggcgtggctagcgggctggcctcagccaccctcttccgggctccgccagctgcgcgcgcatcttctcccccttcttttgtggtccggcccattgcgagggtgacaggaaaccctgtgcagggagcgccgccatcttggaccagcccgaggaagatactgagggagcacaggagcagtcaccgctgccactgctactgccgctactgctgccggcgcgtctgcacctctcggcctgccagtgtacctgccggcgcctcggtcgaccgcccccgccccctctcccgctgcgtccgcactcctgttcctggtcctgacgcccccctcccgcccggaaagctgcccagccaccagcaaccccccaggggacatgggagtaggaaaatcttgcttgcttcatcaatttacagaaaaaaaatttatggctgattgtcctcacacaattggtgttgaatttggtacaagaataatcgaagttagtggccaaaaaataaaactgcagatttgggatacggcaggacaggagcgatttagggctgttacacggagctactacagaggagctgcgggagctcttatggtctatgatatcactagaagaagtacatataaccacttaagcagctggttgacagatgcaaggaatctcaccaatccaaatactgtaataattctcataggaaataaagcagatttggaggcacagagagatgttacatatgaagaagccaaacagtttgctgaagaaaatggcttattgttcctcgaagcgagtgcaaaaacgggagagaatgtagaagatgccttccttgaggctgccaagaaaatctatcagaacattcaggatggaagcttggatctgaatgctgctgagtctggtgtacaacacaaaccttcagccccgcagggaggccggctaaccagtgaaccccaaccccagagagaaggctgtggctgctagtgacctctttgctgtggcccctcatttgacctttcacctctgtctgttggaagcagtactttttactgcctcattgtcttctgtacatcttactgggtttaattaaaaaaaaagaaaaaactctgttgtaaaaacagtttaacacaatactaaactgctaaacaactagatgtaatcaggttatcaaaggcaagtagagtaataaatctctcctgcatggtaaatctagactttttttcccccttgtcctcgtgataagtatgtcaccaatatatgatttaaaccgagcactgatgctggacttcatgatttttaccctccctttggcaaggctttgtctcactgtacggtttaatttggtgatatcttaagcctttcttcccatccttaactgttcaagtatgtctgttgtaaccaataagtttattgctgtgaaattacttctgatggtagagaaggggttctataactgcttttgttttgttttggataaatttcctgttgtgtgggtggcatttttcttaacgagatttgcttctgtcttagcctcacacagggaaaatatccatttatcttctctctcgtgcttaattaatagctttatctttttttataccattttatccttttctctttaacagaaagtaaatatgtataaaatttgaaggaatcgaactaacaatacattctgtgtatattattttaatgaagaaaataaattgattactggcattggaacagtataaaataccagtttgtacagtatgacctatatgtgaccatgttactcccttccatttcacacaaagaaatagacacaactgcagttcacaagtagtactggctccaccccttggtgctggcagtgtttggggacattatgctggaaagagctcctagcatcagaggattaacactagcagattctgttccatctttgcactgttgcttacctgctgattttcttaactgttcttgtgcaatcgacaatgtgctaacctgcttttctctttttgtaaacgtttttgcattacaggctgcattcttgccttactgtatagaaaaagaaaaaaggctgggtttactattgcacattttaagcttttatacctttatcttcttggaatggtcagattctgaactggacagtcagaaccacaggtctgctgttaagggattttaaattgtgcatttttaaccctacagtgaaataacttaagatatccctgtgttcacagtgtgaggggctgttttatgtcatgttggcataaattgttttgtaaaagggaaagtgtttctaaaggtgtttcagcgcttgtgctgatacaaagtaagttattactttgcaccaggtggtttggccactgaattaatactgtatagcaagagaaacaatcttatttttttggacaacatgttttattaagttcttcatttctgttgattttttttattgcatttatgattcagtggctgggaattgagaatttatttgaaatagaataggtaacacctcagcgtactatagaaaatgcactcagctcaactgctgtgtttaaaatacacattttaaatccctctttacagacactaacataaaagtacatctttctgggttgtaaacatgtggtagtaccagagtattgtatagtcaatgttaaataaaagccaaaactggaatgtgcagaaagtaggctttggttaatttgtggattcatttttatttttgtctttgtttaactttttaaaaaataagatttctggagtagattggtatattctgttaaagacttacagtgatccattttgcttacactgttgcatcacaagggactcacccagggaccatgacctgctggtgtgtgtgtatatttacaaaaacaaaacaaacaaaccacccattgggatataaggtagcaatcacaaactaaagactgcggcttgttgaggtgcaataccctgactcccaaagttagttacagtgggttttattgtttttgtgactgaaggatttattcagactgctgtactcttcatttgatgtaacaaaatgctattaatctaaatatttgtaaataaagtacctgtatctagattaaattaaa

SEQ ID NO: 325926 - DNA, 3136 bp, Homo sapiens
ggcgcgagcgcccgtggggcgggcctcagcggcggcgcgacaagtccagaggtgagggctgaggaaggggcgtggctagcgggctggcctcagccaccctcttccgggctccgccagctgcgcgcgcatcttctcccccttcttttgtggtccggcccattgcgagggtgacaggaaaccctgtgcagggagcgccgccatcttggaccagcccgaggaagatactgagggagcacaggagcagtcaccgctgccactgctactgccgctactgctgccggcgcgtctgcacctctcggcctgccagtgtacctgccggcgcctcggtcgaccgcccccgccccctctcccgctgcgtccgcactcctgttcctggtcctgacgcccccctcccgcccggaaagctgcccagccaccagcaaccccccagtgccaccatggcaactgcaccatacaactactcttacatctttaaatatattattattggggacatgggagtaggaaaatcttgcttgcttcatcaatttacagaaaaaaaatttatggctgattgtcctcacacaattggtgttgaatttggtacaagaataatcgaagttagtggccaaaaaataaaactgcagatttgggatacggcaggacaggagcgatttagggctgttacacggagctactacagaggagctgcgggagctcttatggtctatgatatcactagaagaagtacatataaccacttaagcagctggttgacagatgcaaggaatctcaccaatccaaatactgtaataattctcataggaaataaagcagatttggaggcacagagagatgttacatatgaagaagccaaacagtttgctgaagaaaatggcttattgttcctcgaagcgagtgcaaaaacgggagagaatgtagaagatgccttccttgaggctgccaagaaaatctatcagaacattcaggatggaagcttggatctgaatgctgctgagtctggtgtacaacacaaaccttcagccccgcagggaggccggctaaccagtgaaccccaaccccagagagaaggctgtggctgctagtgacctctttgctgtggcccctcatttgacctttcacctctgtctgttggaagcagtactttttactgcctcattgtcttctgtacatcttactgggtttaattaaaaaaaaagaaaaaactctgttgtaaaaacagtttaacacaatactaaactgctaaacaactagatgtaatcaggttatcaaaggcaagtagagtaataaatctctcctgcatggtaaatctagactttttttcccccttgtcctcgtgataagtatgtcaccaatatatgatttaaaccgagcactgatgctggacttcatgatttttaccctccctttggcaaggctttgtctcactgtacggtttaatttggtgatatcttaagcctttcttcccatccttaactgttcaagtatgtctgttgtaaccaataagtttattgctgtgaaattacttctgatggtagagaaggggttctataactgcttttgttttgttttggataaatttcctgttgtgtgggtggcatttttcttaacgagatttgcttctgtcttagcctcacacagggaaaatatccatttatcttctctctcgtgcttaattaatagctttatctttttttataccattttatccttttctctttaacagaaagtaaatatgtataaaatttgaaggaatcgaactaacaatacattctgtgtatattattttaatgaagaaaataaattgattactggcattggaacagtatttcacacaaagaaatagacacaactgcagttcacaagtagtactggctccaccccttggtgctggcagtgtttggggacattatgctggaaagagctcctagcatcagaggattaacactagcagattctgttccatctttgcactgttgcttacctgctgattttcttaactgttcttgtgcaatcgacaatgtgctaacctgcttttctctttttgtaaacgtttttgcattacaggctgcattcttgccttactgtatagaaaaagaaaaaaggctgggtttactattgcacattttaagcttttatacctttatcttcttggaatggtcagattctgaactggacagtcagaaccacaggtctgctgttaagggattttaaattgtgcatttttaaccctacagtgaaataacttaagatatccctgtgttcacagtgtgaggggctgttttatgtcatgttggcataaattgttttgtaaaagggaaagtgtttctaaaggtgtttcagcgcttgtgctgatacaaagtaagttattactttgcaccaggtggtttggccactgaattaatactgtatagcaagagaaacaatcttatttttttggacaacatgttttattaagttcttcatttctgttgattttttttattgcatttatgattcagtggctgggaattgagaatttatttgaaatagaataggtaacacctcagcgtactatagaaaatgcactcagctcaactgctgtgtttaaaatacacattttaaatccctctttacagacactaacataaaagtacatctttctgggttgtaaacatgtggtagtaccagagtattgtatagtcaatgttaaataaaagccaaaactggaatgtgcagaaagtaggctttggttaatttgtggattcatttttatttttgtctttgtttaactttttaaaaaataagatttctggagtagattggtatattctgttaaagacttacagtgatccattttgcttacactgttgcatcacaagggactcacccagggaccatgacctgctggtgtgtgtgtatatttacaaaaacaaaacaaacaaaccacccattgggatataaggtagcaatcacaaactaaagactgcggcttgttgaggtgcaataccctgactcccaaagttagttacagtgggttttattgtttttgtgactgaaggatttattcagactgctgtactcttcatttgatgtaacaaaatgctattaatctaaatatttgtaaataaagtacctgtatctagattaaattaaa

SEQ ID NO: 325927 - DNA, 3140 bp, Homo sapiens
ggcgcgagcgcccgtggggcgggcctcagcggcggcgcgacaagtccagaggtgagggctgaggaaggggcgtggctagcgggctggcctcagccaccctcttccgggctccgccagctgcgcgcgcatcttctcccccttcttttgtggtccggcccattgcgagggtgacaggaaaccctgtgcagggagcgccgccatcttggaccagcccgaggaagatactgagggagcacaggagcagtcaccgctgccactgctactgccgctactgctgccggcgcgtctgcacctctcggcctgccagtgtacctgccggcgcctcggtcgaccgcccccgccccctctcccgctgcgtccgcactcctgttcctggtcctgacgcccccctcccgcccggaaagctgcccagccaccagcaaccccccagtgccaccatggcaactgcaccatacaactactcttacatctttaaatatattattattggggacatgggagtaggaaaatcttgcttgcttcatcaatttacagaaaaaaaatttatggctgattgtcctcacacaattggtgttgaatttggtacaagaataatcgaagttagtggccaaaaaataaaggagctactacagaggagctgcgggagctcttatggtctatgatatcactagaagaagtacatataaccacttaagcagctggttgacagatgcaaggaatctcaccaatccaaatactgtaataattctcataggaaataaagcagatttggaggcacagagagatgttacatatgaagaagccaaacagtttgctgaagaaaatggcttattgttcctcgaagcgagtgcaaaaacgggagagaatgtagaagatgccttccttgaggctgccaagaaaatctatcagaacattcaggatggaagcttggatctgaatgctgctgagtctggtgtacaacacaaaccttcagccccgcagggaggccggctaaccagtgaaccccaaccccagagagaaggctgtggctgctagtgacctctttgctgtggcccctcatttgacctttcacctctgtctgttggaagcagtactttttactgcctcattgtcttctgtacatcttactgggtttaattaaaaaaaaagaaaaaactctgttgtaaaaacagtttaacacaatactaaactgctaaacaactagatgtaatcaggttatcaaaggcaagtagagtaataaatctctcctgcatggtaaatctagactttttttcccccttgtcctcgtgataagtatgtcaccaatatatgatttaaaccgagcactgatgctggacttcatgatttttaccctccctttggcaaggctttgtctcactgtacggtttaatttggtgatatcttaagcctttcttcccatccttaactgttcaagtatgtctgttgtaaccaataagtttattgctgtgaaattacttctgatggtagagaaggggttctataactgcttttgttttgttttggataaatttcctgttgtgtgggtggcatttttcttaacgagatttgcttctgtcttagcctcacacagggaaaatatccatttatcttctctctcgtgcttaattaatagctttatctttttttataccattttatccttttctctttaacagaaagtaaatatgtataaaatttgaaggaatcgaactaacaatacattctgtgtatattattttaatgaagaaaataaattgattactggcattggaacagtataaaataccagtttgtacagtatgacctatatgtgaccatgttactcccttccatttcacacaaagaaatagacacaactgcagttcacaagtagtactggctccaccccttggtgctggcagtgtttggggacattatgctggaaagagctcctagcatcagaggattaacactagcagattctgttccatctttgcactgttgcttacctgctgattttcttaactgttcttgtgcaatcgacaatgtgctaacctgcttttctctttttgtaaacgtttttgcattacaggctgcattcttgccttactgtatagaaaaagaaaaaaggctgggtttactattgcacattttaagcttttatacctttatcttcttggaatggtcagattctgaactggacagtcagaaccacaggtctgctgttaagggattttaaattgtgcatttttaaccctacagtgaaataacttaagatatccctgtgttcacagtgtgaggggctgttttatgtcatgttggcataaattgttttgtaaaagggaaagtgtttctaaaggtgtttcagcgcttgtgctgatacaaagtaagttattactttgcaccaggtggtttggccactgaattaatactgtatagcaagagaaacaatcttatttttttggacaacatgttttattaagttcttcatttctgttgattttttttattgcatttatgattcagtggctgggaattgagaatttatttgaaatagaataggtaacacctcagcgtactatagaaaatgcactcagctcaactgctgtgtttaaaatacacattttaaatccctctttacagacactaacataaaagtacatctttctgggttgtaaacatgtggtagtaccagagtattgtatagtcaatgttaaataaaagccaaaactggaatgtgcagaaagtaggctttggttaatttgtggattcatttttatttttgtctttgtttaactttttaaaaaataagatttctggagtagattggtatattctgttaaagacttacagtgatccattttgcttacactgttgcatcacaagggactcacccagggaccatgacctgctggtgtgtgtgtatatttacaaaaacaaaacaaacaaaccacccattgggatataaggtagcaatcacaaactaaagactgcggcttgttgaggtgcaataccctgactcccaaagttagttacagtgggttttattgtttttgtgactgaaggatttattcagactgctgtactcttcatttgatgtaacaaaatgctattaatctaaatatttgtaaataaagtacctgtatctagattaaattaaa

SEQ ID NO: 325928 - DNA, 2559 bp, Homo sapiens
ggatatgttgattaaatatgtattttaaatatttaagttttttttctataattatatggcagtcacaaatttaaacttttatttttgcagaagaagtacatataaccacttaagcagctggttgacagatgcaaggaatctcaccaatccaaatactgtaataattctcataggaaataaagcagatttggaggcacagagagatgttacatatgaagaagccaaacagtttgctgaagaaaatggcttattgttcctcgaagcgagtgcaaaaacgggagagaatgtagaagatgccttccttgaggctgccaagaaaatctatcagaacattcaggatggaagcttggatctgaatgctgctgagtctggtgtacaacacaaaccttcagccccgcagggaggccggctaaccagtgaaccccaaccccagagagaaggctgtggctgctagtgacctctttgctgtggcccctcatttgacctttcacctctgtctgttggaagcagtactttttactgcctcattgtcttctgtacatcttactgggtttaattaaaaaaaaagaaaaaactctgttgtaaaaacagtttaacacaatactaaactgctaaacaactagatgtaatcaggttatcaaaggcaagtagagtaataaatctctcctgcatggtaaatctagactttttttcccccttgtcctcgtgataagtatgtcaccaatatatgatttaaaccgagcactgatgctggacttcatgatttttaccctccctttggcaaggctttgtctcactgtacggtttaatttggtgatatcttaagcctttcttcccatccttaactgttcaagtatgtctgttgtaaccaataagtttattgctgtgaaattacttctgatggtagagaaggggttctataactgcttttgttttgttttggataaatttcctgttgtgtgggtggcatttttcttaacgagatttgcttctgtcttagcctcacacagggaaaatatccatttatcttctctctcgtgcttaattaatagctttatctttttttataccattttatccttttctctttaacagaaagtaaatatgtataaaatttgaaggaatcgaactaacaatacattctgtgtatattattttaatgaagaaaataaattgattactggcattggaacagtataaaataccagtttgtacagtatgacctatatgtgaccatgttactcccttccatttcacacaaagaaatagacacaactgcagttcacaagtagtactggctccaccccttggtgctggcagtgtttggggacattatgctggaaagagctcctagcatcagaggattaacactagcagattctgttccatctttgcactgttgcttacctgctgattttcttaactgttcttgtgcaatcgacaatgtgctaacctgcttttctctttttgtaaacgtttttgcattacaggctgcattcttgccttactgtatagaaaaagaaaaaaggctgggtttactattgcacattttaagcttttatacctttatcttcttggaatggtcagattctgaactggacagtcagaaccacaggtctgctgttaagggattttaaattgtgcatttttaaccctacagtgaaataacttaagatatccctgtgttcacagtgtgaggggctgttttatgtcatgttggcataaattgttttgtaaaagggaaagtgtttctaaaggtgtttcagcgcttgtgctgatacaaagtaagttattactttgcaccaggtggtttggccactgaattaatactgtatagcaagagaaacaatcttatttttttggacaacatgttttattaagttcttcatttctgttgattttttttattgcatttatgattcagtggctgggaattgagaatttatttgaaatagaataggtaacacctcagcgtactatagaaaatgcactcagctcaactgctgtgtttaaaatacacattttaaatccctctttacagacactaacataaaagtacatctttctgggttgtaaacatgtggtagtaccagagtattgtatagtcaatgttaaataaaagccaaaactggaatgtgcagaaagtaggctttggttaatttgtggattcatttttatttttgtctttgtttaactttttaaaaaataagatttctggagtagattggtatattctgttaaagacttacagtgatccattttgcttacactgttgcatcacaagggactcacccagggaccatgacctgctggtgtgtgtgtatatttacaaaaacaaaacaaacaaaccacccattgggatataaggtagcaatcacaaactaaagactgcggcttgttgaggtgcaataccctgactcccaaagttagttacagtgggttttattgtttttgtgactgaaggatttattcagactgctgtactcttcatttgatgtaacaaaatgctattaatctaaatatttgtaaataaagtacctgtatctagattaaattaaa

SEQ ID NO: 325929 - DNA, 2773 bp, Homo sapiens
ggcgcgagcgcccgtggggcgggcctcagcggcggcgcgacaagtccagaggtgagggctgaggaaggggcgtggctagcgggctggcctcagccaccctcttccgggctccgccagctgcgcgcgcatcttctcccccttcttttgtggtccggcccattgcgagggtgacaggaaaccctgtgcagggagcgccgccatcttggaccagcccgaggaagatactgagggagcacaggagcagtcaccgctgccactgctactgccgctactgctgccggcgcgtctgcacctctcggcctgccagtgtacctgccggcgcctcggtcgaccgcccccgccccctctcccgctgcgtccgcactcctgttcctggtcctgacgcccccctcccgcccggaaagctgcccagccaccagcaaccccccagtgccaccatggcaactgcaccatacaactactcttacatctttaaatatattattattggggacatgggagtaggaaaatcttgcttgcttcatcaatttacagaaaaaaaatttatggctgattgtcctcacacaattggtgttgaatttggtacaagaataatcgaagttagtggccaaaaaataaaactgcagatttgggatacggcaggacaggagcgatttagggctgttacacggagctactacagaggagctgcgggagctcttatggtctatgatatcactagaagaagtacatataaccacttaagcagctggttgacagatgcaaggaatctcaccaatccaaatactgtaataattctcataggaaataaagcagatttggaggcacagagagatgttacatatgaagaagccaaacagtttgctgaagaaaatggcttattgttcctcgaagcgagtgcaaaaacgggagagaatgtagaagatgccttccttgaggctgccaagaaaatctatcagaacattcaggatggaagcttggatctgaatgctgctgagtctggtgtacaacacaaaccttcagccccgcagggaggccggctaaccagtgaaccccaaccccagagagaaggctgtggctgctagtgacctctttgctgtggcccctcatttgacctttcacctctgtctgttggaagcagtactttttactgcctcattgtcttctgtacatcttactgggtttaattaaaaaaaaagaaaaaactctgttgtaaaaacagtttaacacaatactaaactgctaaacaactagatgtaatcaggttatcaaaggcaagtagagtaataaatctctcctgcatggtaaatctagactttttttcccccttgtcctcgtgataagtatgtcaccaatatatgatttaaaccgagcactgatgctggacttcatgatttttaccctccctttggcaaggctttgtctcactgtacggtttaatttggtgatatcttaagcctttcttcccatccttaactgttcaagtatgtctgttgtaaccaataagtttattgctgtgaaattacttctgatggtagagaaggggttctataactgcttttgttttgttttggataaatttcctgttgtgtgggtggcatttttcttaacgagatttgcttctgtcttagcctcacacagggaaaatatccatttatcttctctctcgtgcttaattaatagctttatctttttttataccattttatccttttctctttaacagaaagtaaatatgtataaaatttgaaggaatcgaactaacaatacattctgtgtatattattttaatgaagaaaataaattgattactggcattggaacagtataaaataccagtttgtacagtatgacctatatgtgaccatgttactcccttccatttcacacaaagaaatagacacaactgcagttcacaagtagtactggctccaccccttggtgctggcagtgtttggggacattatgctggaaagagctcctagcatcagaggattaacactagcagattctgttccatctttgcactgttgcttacctgctgattttcttaactgttcttgtgcaatcgacaatgtgctaacctgcttttctctttttgtaaacgtttttgcattacaggctgcattcttgccttactgtatagaaaaagaaaaaaggctgggtttactattgcacattttaagcttttatacctttatcttcttggaatggtcagattctgaactggacagtcagaaccacaggtctgctgttaagggattttaaattgtgcatttttaaccctacagtgaaataacttaagatatccctgtgttcacagtgtgaggggctgttttatgtcatgttggcataaattgttttgtaaaagggaaagtgtttctaaaggtgtttcagcgcttgtgctgatacaaagtaagttattactttgcaccaggtggtttggccactgaattaatactgtatagcaagagaaacaatcttatttttttggacaacatgttttattaagttcttcatttctgttgattttttttattgcatttatgattcagtggctgggaattgagaatttatttgaaatagaataggtaacacctcagcgtactatagaaaatgcactcagctcaactgctgtgtttaaaatacacattttaaatccctctttacagacactaacataaaagtacatctttctgggttgtaaacatgtggtagtaccagagtattgtatagtcaatgttaaataaaagccaaaactggaatgtgcaga

SEQ ID NO: 325930 - DNA, 2500 bp, Homo sapiens
ggcgcgagcgcccgtggggcgggcctcagcggcggcgcgacaagtccagaggtgagggctgaggaaggggcgtggctagcgggctggcctcagccaccctcttccgggctccgccagctgcgcgcgcatcttctcccccttcttttgtggtccggcccattgcgagggtgacaggaaaccctgtgcagggagcgccgccatcttggaccagcccgaggaagatactgagggagcacaggagcagtcaccgctgccactgctactgccgctactgctgccggcgcgtctgcacctctcggcctgccagtgtacctgccggcgcctcggtcgaccgcccccgccccctctcccgctgcgtccgcactcctgttcctggtcctgacgcccccctcccgcccggaaagctgcccagccaccagcaaccccccagtgccaccatggcaactgcaccatacaactactcttacatctttaaatatattattattggggacatgggagtaggaaaatcttgcttgcttcatcaatttacagaaaaaaaatttatggctgattgtcctcacacaattggtgttgaatttggtacaagaataatcgaagttagtggccaaaaaataaaactgcagatttgggatacggcaggacaggagcgatttagggctgttacacggagctactacagaggagctgcgggagctcttatggtctatgatatcactagaagaagtacatataaccacttaagcagctggttgacagatgcaaggaatctcaccaatccaaatactgtaataattctcataggaaataaagcagatttggaggcacagagagatgttacatatgaagaagccaaacagtttgctgaagaaaatggcttattgttcctcgaagcgagtgcaaaaacgggagagaatgtagaagatgccttccttgaggctgccaagaaaatctatcagaacattcaggatggaagcttggatctgaatgctgctgagtctggtgtacaacacaaaccttcagccccgcagggaggccggctaaccagtgaaccccaaccccagagagaaggctgtggctgctagtgacctctttgctgtggcccctcatttgacctttcacctctgtctgttggaagcagtactttttactgcctcattgtcttctgtacatcttactgggtttaattaaaaaaaaagaaaaaactctgttgtaaaaacagtttaacacaatactaaactgctaaacaactagatgtaatcaggttatcaaaggcaagtagagtaataaatctctcctgcatggtaaatctagactttttttcccccttgtcctcgtgataagtatgtcaccaatatatgatttaaaccgagcactgatgctggacttcatgatttttaccctccctttggcaaggctttgtctcactgtacggtttaatttggtgatatcttaagcctttcttcccatccttaactgttcaagtatgtctgttgtaaccaataagtttattgctgtgaaattacttctgatggtagagaaggggttctataactgcttttgttttgttttggataaatttcctgttgtgtgggtggcatttttcttaacgagatttgcttctgtcttagcctcacacagggaaaatatccatttatcttctctctcgtgcttaattaatagctttatctttttttataccattttatccttttctctttaacagaaagtaaatatgtataaaatttgaaggaatcgaactaacaatacattctgtgtatattattttaatgaagaaaataaattgattactggcattggaacagtataaaataccagtttgtacagtatgacctatatgtgaccatgttactcccttccatttcacacaaagaaatagacacaactgcagttcacaagtagtactggctccaccccttggtgctggcagtgtttggggacattatgctggaaagagctcctagcatcagaggattaacactagcagattctgttccatctttgcactgttgcttacctgctgattttcttaactgttcttgtgcaatcgacaatgtgctaacctgcttttctctttttgtaaacgtttttgcattacaggctgcattcttgccttactgtatagaaaaagaaaaaaggctgggtttactattgcacattttaagcttttatacctttatcttcttggaatggtcagattctgaactggacagtcagaaccacaggtctgctgttaagggattttaaattgtgcatttttaaccctacagtgaaataacttaagatatccctgtgttcacagtgtgaggggctgttttatgtcatgttggcataaattgttttgtaaaagggaaagtgtttctaaaggtgtttcagcgcttgtgctgatacaaagtaagttattactttgcaccaggtgggtatttcccacttggaataaaaactggtttagcagggagatttcttggtggaatatttg

SEQ ID NO: 325931 - DNA, 5746 bp, Homo sapiens
agatcgctgtgcagtcagccttaaacactgactgcacccctcccagatttcttttacattaactaaaaagtcttatcacacaatctcataaaatttatgtaatttcatttaattttagccacaaatcatcaaaatgacgaggattttgacagctttcaaagtggtgaggacactgaagactggttttggctttaccaatgtgactgcacaccaaaaatggaaattttcaagacctggcatcaggctcctttctgtcaaggcacagacagcacacattgtcctggaagatggaactaagatgaaaggttactcctttggccatccatcctctgttgctggtgaagtggtttttaatactggcctgggagggtacccagaagctattactgaccctgcctacaaaggacagattctcacaatggccaaccctattattgggaatggtggagctcctgatactactgctctggatgaactgggacttagcaaatatttggagtctaatggaatcaaggtttcaggtttgctggtgctggattatagtaaagactacaaccactggctggctaccaagagtttagggcaatggctacaggaagaaaaggttcctgcaatttatggagtggacacaagaatgctgactaaaataattcgggataagggtaccatgcttgggaagattgaatttgaaggtcagcctgtggattttgtggatccaaataaacagaatttgattgctgaggtttcaaccaaggatgtcaaagtgtacggcaaaggaaaccccacaaaagtggtagctgtagactgtgggattaaaaacaatgtaatccgcctgctagtaaagcgaggagctgaagtgcacttagttccctggaaccatgatttcaccaagatggagtatgatgggattttgatcgcgggaggaccggggaacccagctcttgcagaaccactaattcagaatgtcagaaagattttggagagtgatcgcaaggagccattgtttggaatcagtacaggaaacttaataacaggattggctgctggtgccaaaacctacaagatgtccatggccaacagagggcagaatcagcctgttttgaatatcacaaacaaacaggctttcattactgctcagaatcatggctatgccttggacaacaccctccctgctggctggaaaccactttttgtgaatgtcaacgatcaaacaaatgaggggattatgcatgagagcaaacccttcttcgctgtgcagttccacccagaggtcaccccggggccaatagacactgagtacctgtttgattcctttttctcactgataaagaaaggaaaagctaccaccattacatcagtcttaccgaagccagcactagttgcatctcgggttgaggtttccaaagtccttattctaggatcaggaggtctgtccattggtcaggctggagaatttgattactcaggatctcaagctgtaaaagccatgaaggaagaaaatgtcaaaactgttctgatgaacccaaacattgcatcagtccagaccaatgaggtgggcttaaagcaagcggatactgtctactttcttcccatcacccctcagtttgtcacagaggtcatcaaggcagaacagccagatgggttaattctgggcatgggtggccagacagctctgaactgtggagtggaactattcaagagaggtgtgctcaaggaatatggtgtgaaagtcctgggaacttcagttgagtccattatggctacggaagacaggcagctgttttcagataaactaaatgagatcaatgaaaagattgctccaagttttgcagtggaatcgattgaggatgcactgaaggcagcagacaccattggctacccagtgatgatccgttccgcctatgcactgggtgggttaggctcaggcatctgtcccaacagagagactttgatggacctcagcacaaaggcctttgctatgaccaaccaaattctggtggagaagtcagtgacaggttggaaagaaatagaatatgaagtggttcgagatgctgatgacaattgtgtcactgtctgtaacatggaaaatgttgatgccatgggtgttcacacaggtgactcagttgttgtggctcctgcccagacactctccaatgccgagtttcagatgttgagacgtacttcaatcaatgttgttcgccacttgggcattgtgggtgaatgcaacattcagtttgcccttcatcctacctcaatggaatactgcatcattgaagtgaatgccagactgtcccgaagctctgctctggcctcaaaagccactggctacccattggcattcattgctgcaaagattgccctaggaatcccacttccagaaattaagaacgtcgtatccgggaagacatcagcctgttttgaacctagcctggattacatggtcaccaagattccccgctgggatcttgaccgttttcatggaacatctagccgaattggtagctctatgaaaagtgtaggagaggtcatggctattggtcgtacctttgaggagagtttccagaaagctttacggatgtgccacccatctatagaaggtttcactccccgtctcccaatgaacaaagaatggccatctaatttagatcttagaaaagagttgtctgaaccaagcagcacgcgtatctatgccattgccaaggccattgatgacaacatgtcccttgatgagattgagaagctcacatacattgacaagtggtttttgtataagatgcgtgatattttaaacatggaaaagacactgaaaggcctcaacagtgagtccatgacagaagaaaccctgaaaagggcaaaggagattgggttctcagataagcagatttcaaaatgccttgggctcactgaggcccagacaagggagctgaggttaaagaaaaacatccacccttgggttaaacagattgatacactggctgcagaatacccatcagtaacaaactatctctatgttacctacaatggtcaggagcatgatgtcaattttgatgaccatggaatgatggtgctaggctgtggtccatatcacattggcagcagtgtggaatttgattggtgtgctgtctctagtatccgcacactgcgtcaacttggcaagaagacggtggtggtgaattgcaatcctgagactgtgagcacagactttgatgagtgtgacaaactgtactttgaagagttgtccttggagagaatcctagacatctaccatcaggaggcatgtggtggctgcatcatatcagttggaggccagattccaaacaacctggcagttcctctatacaagaatggtgtcaagatcatgggcacaagccccctgcagatcgacagggctgaggatcgctccatcttctcagctgtcttggatgagctgaaggtggctcaggcaccttggaaagctgttaatactttgaatgaagcactggaatttgcaaagtctgtggactacccctgcttgttgaggccttcctatgttttgagtgggtctgctatgaatgtggtattctctgaggatgagatgaaaaaattcctagaagaggcgactagagtttctcaggagcacccagtggtgctgacaaaatttgttgaaggggcccgagaagtagaaatggacgctgttggcaaagatggaagggttatctctcatgccatctctgaacatgttgaagatgcaggtgtccactcgggagatgccactctgatgctgcccacacaaaccatcagccaaggggccattggtgaaggatgctacccggaagattgcaaaggcttttgccatctctggtccattcaacgtccaatttcttgtcaaaggaaatgatgtcttggtgattgagtgtaacttgagagcttctcgatccttcccctttgtttccaagactcttggggttgacttcattgatgtggccaccaaggtgatgattggagagaatgttgatgagaaacatcttccaacattggaccatcccataattcctgctgactatgttgcaattaaggctcccatgttttcctggccccggttgagggatgctgaccccattctgagatgtgagatggcttccactggagaggtggcttgctttggtgaaggtattcatacagccttcctaaaggcaatgctttccacaggatttaagataccccagaaaggcatcctgataggcatccagcaatcattccggccaagattccttggtgtggctgaacaattacacaatgaaggtttcaagctgtttgccacggaagccacatcagactggctcaacgccaacaatgtccctgccaccccagtggcatggccgtctcaagaaggacagaatcccagcctctcttccatcagaaaattgattagagatggcagcattgacctagtgattaaccttcccaacaacaacactaaatttgtccatgataattatgtgattcggaggacagctgttgatagtggaatccctctcctcactaattttcaggtgaccaaactttttgctgaagctgtgcagaaatctcgcaaggtggactccaagagtcttttccactacaggcagtacagtgctggaaaagcagcatagagatgcagacaccccagccccattattaaatcaacctgagccacatgttatctaaaggaactgattcacaactttctcagagatgaatattgataactaaacttcatttcagtttactttgttatgccttaatattctgtgtcttttgcaattaaattgtcagtcacttcttcaaaaccttacagtccttcctaagttactcttcatgagatttcatccatttactaatactgtatttttggtggactaggcttgcctatgtgcttatgtgtagctttttactttttatggtgctgattaatggtgatcaaggtaggaaaagttgctgttctattttctgaactctttctatactttaagatactctatttttaaaacactatctgcaaactcaggacactttaacagggcagaatactctaaaaacttgataaaattaaatatagatttaatttatgaaccttccatcatgatgtttgtgtattgcttctttttggatcctcattctcacccatttggctaatccaggaatattgttatcccttcccattatattgaagttgagaaatgtgacagaggcatttagagtatggacttttcttttctttttctttttctttttttctttttgagatggagtcacactctccaggctggagtgcagtggcacaatctcggctcactgcaatttccgtctcccaagttcaagcgattctcctgctttagactatggatttctttaaggaatactggtttgcagttttgttttctggactatatcagcagatggtagacagtgtttatgtagatgtgttgttgtttttatcattggattttaacttggcccgagtgaaataatcagatttttgtcattcacactctcccccagttttggaataacttggaagtaaggttcattcccttaagacgatggattctgttgaactatggggtcccacactgcactattaattccacccactgtaagggcaaggacaccattccttctacatataagaaaaaagtctctccccaagggcagcctttgttacttttaaatattttctgttattacaagtgctctaattgtgaacttttaaataaaatactattaa

SEQ ID NO: 325932 - DNA, 701 bp, Homo sapiens
ctttactcaaaattaaggtgtctaaaatatacatggtataaaccactcaatacagtaaatgactgaactccaccaactgccatatactcataaaaacacgagagatttgagggtttataatttattttctatcaaaatcactttaacatattaggaactacttctttctttgcatgttagaggaaaactcttgagaaaagtaagctatgctacaaaaactaaattagagactaatgcagaaaatatgctccaggaaaacagagacttttgtctatactctatttccacaaaatagaacagtgcctggaaataccaggagttcaataatgtctttgaagaatgattacacgtgcagccaagaaacctgtgtaacttacatggcagtcatagaagtgaatttgacagaattactgtaagggctattttgggaattatttaggaaatagctcacggacagcttattgcttcatctttacttactttttgaactgaagtgaaatgagacccttgaattgttgacatagaattttgaaaacagataagtacaattcagcatatttaaataactacaatggcagacttacatataaacaacttgggtttcgtttttctaaagttgtgaaaattacaaaaaagggaaacatacctcacataaatgtttcttgttaccattctggacatatgaatcacatatttagagc

SEQ ID NO: 325933 - DNA, 445 bp, Homo sapiens
aatgccatgcatgtcagaagggggacctagtttagtctcaggatttaccaagccaggtaagcctgctccctctcaggataattaatgcaacaattacatattttaaaagaagggcattgatttttttttttttgcctcttgtttttaaaaatcctaagtctcatgtcagtggatatcataaaacttaaaaacaaatgcaaattgactcacaagagttggataatatcttgtgataacctctttaaaatgactgtctgtctttctaggtttcaggtttgctggtgctggattatagtaaagactacaaccactggctggctaccaagagtttagggcaatggctacaggaagaaaaggttcctgcaatttatggagtggacacaagaatgctgactaaaataattcgggataaggtataatcatcatctttagccaaatctatgtt

SEQ ID NO: 325934 - DNA, 112 bp, Homo sapiens
ggcacgaggagaaattaaagacatccaaatttaaggtactgtgccttttagaaagttttcaaaaactaagatatgctctttagcacactatacgattatgctttttaattca

SEQ ID NO: 325935 - DNA, 5883 bp, Homo sapiens
agatcgctgtgcagtcagccttaaacactgactgcacccctcccagatttcttttacattaactaaaaagtcttatcacacaatctcataaaatttatgtaatttcatttaattttagccacaaatcatcaaaatgacgaggattttgacagctttcaaagtggtgaggacactgaagactggttttggctttaccaatgtgactgcacaccaaaaatggaaattttcaagacctggcatcaggctcctttctgtcaaggcacagacagcacacattgtcctggaagatggaactaagatgaaaggttactcctttggccatccatcctctgttgctggtgaagtggtttttaatactggcctgggagggtacccagaagctattactgaccctgcctacaaaggacagattctcacaatggccaaccctattattgggaatggtggagctcctgatactactgctctggatgaactgggacttagcaaatatttggagtctaatggaatcaaggtttcaggtttgctggtgctggattatagtaaagactacaaccactggctggctaccaagagtttagggcaatggctacaggaagaaaaggttcctgcaatttatggagtggacacaagaatgctgactaaaataattcgggataagggtaccatgcttgggaagattgaatttgaaggtcagcctgtggattttgtggatccaaataaacagaatttgattgctgaggtttcaaccaaggatgtcaaagtgtacggcaaaggaaaccccacaaaagtggtagctgtagactgtgggattaaaaacaatgtaatccgcctgctagtaaagcgaggagctgaagtgcacttagttccctggaaccatgatttcaccaagatggagtatgatgggattttgatcgcgggaggaccggggaacccagctcttgcagaaccactaattcagaatgtcagaaagattttggagagtgatcgcaaggagccattgtttggaatcagtacaggaaacttaataacaggattggctgctggtgccaaaacctacaagatgtccatggccaacagagggcagaatcagcctgttttgaatatcacaaacaaacaggctttcattactgctcagaatcatggctatgccttggacaacaccctccctgctggctggaaaccactttttgtgaatgtcaacgatcaaacaaatgaggggattatgcatgagagcaaacccttcttcgctgtgcagttccacccagaggtcaccccggggccaatagacactgagtacctgtttgattcctttttctcactgataaagaaaggaaaagctaccaccattacatcagtcttaccgaagccagcactagttgcatctcgggttgaggtttccaaagtccttattctaggatcaggaggtctgtccattggtcaggctggagaatttgattactcaggatctcaagctgtaaaagccatgaaggaagaaaatgtcaaaactgttctgatgaacccaaacattgcatcagtccagaccaatgaggtgggcttaaagcaagcggatactgtctactttcttcccatcacccctcagtttgtcacagaggtcatcaaggcagaacagccagatgggttaattctgggcatgggtggccagacagctctgaactgtggagtggaactattcaagagaggtgtgctcaaggaatatggtgtgaaagtcctgggaacttcagttgagtccattatggctacggaagacaggcagctgttttcagataaactaaatgagatcaatgaaaagattgctccaagttttgcagtggaatcgattgaggatgcactgaaggcagcagacaccattggctacccagtgatgatccgttccgcctatgcactgggtgggttaggctcaggcatctgtcccaacagagagactttgatggacctcagcacaaaggcctttgctatgaccaaccaaattctggtggagaagtcagtgacaggttggaaagaaatagaatatgaagtggttcgagatgctgatgacaattgtgtcactgtctgtaacatggaaaatgttgatgccatgggtgttcacacaggtgactcagttgttgtggctcctgcccagacactctccaatgccgagtttcagatgttgagacgtacttcaatcaatgttgttcgccacttgggcattgtgggtgaatgcaacattcagtttgcccttcatcctacctcaatggaatactgcatcattgaagtgaatgccagactgtcccgaagctctgctctggcctcaaaagccactggctacccattggcattcattgctgcaaagattgccctaggaatcccacttccagaaattaagaacgtcgtatccgggaagacatcagcctgttttgaacctagcctggattacatggtcaccaagattccccgctgggatcttgaccgttttcatggaacatctagccgaattggtagctctatgaaaagtgtaggagaggtcatggctattggtcgtacctttgaggagagtttccagaaagctttacggatgtgccacccatctatagaaggtttcactccccgtctcccaatgaacaaagaatggccatctaatttagatcttagaaaagagttgtctgaaccaagcagcacgcgtatctatgccattgccaaggccattgatgacaacatgtcccttgatgagattgagaagctcacatacattgacaagtggtttttgtataagatgcgtgatattttaaacatggaaaagacactgaaaggcctcaacagtgagtccatgacagaagaaaccctgaaaagggcaaaggagattgggttctcagataagcagatttcaaaatgccttgggctcactgaggcccagacaagggagctgaggttaaagaaaaacatccacccttgggttaaacagattgatacactggctgcagaatacccatcagtaacaaactatctctatgttacctacaatggtcaggagcatgatgtcaattttgatgaccatggaatgatggtgctaggctgtggtccatatcacattggcagcagtgtggaatttgattggtgtgctgtctctagtatccgcacactgcgtcaacttggcaagaagacggtggtggtgaattgcaatcctgagactgtgagcacagactttgatgagtgtgacaaactgtactttgaagagttgtccttggagagaatcctagacatctaccatcaggaggcatgtggtggctgcatcatatcagttggaggccagattccaaacaacctggcagttcctctatacaagaatggtgtcaagatcatgggcacaagccccctgcagatcgacagggctgaggatcgctccatcttctcagctgtcttggatgagctgaaggtggctcaggcaccttggaaagctgttaatactttgaatgaagcactggaatttgcaaagtctgtggactacccctgcttgttgaggccttcctatgttttgagtgggtctgctatgaatgtggtattctctgaggatgagatgaaaaaattcctagaagaggcgactagagtttctcaggagcacccagtggtgctgacaaaatttgttgaaggggcccgagaagtagaaatggacgctgttggcaaagatggaagggttatctctcatgccatctctgaacatgttgaagatgcaggtgtccactcgggagatgccactctgatgctgcccacacaaaccatcagccaaggggccattggtgaaggatgctacccggaagattgcaaaggcttttgccatctctggtccattcaacgtccaatttcttgtcaaaggaaatgatgtcttggtgattgagtgtaacttgagagcttctcgatccttcccctttgtttccaagactcttggggttgacttcattgatgtggccaccaaggtgatgattggagagaatgttgatgagaaacatcttccaacattggaccatcccataattcctgctgactatgttgcaattaaggctcccatgttttcctggccccggttgagggatgctgaccccattctgagatgtgagatggcttccactggagaggtggcttgctttggtgaaggtattcatacagccttcctaaaggcaatgctttccacaggatttaagataccccagaaaggcatcctgataggcatccagcaatcattccggccaagattccttggtgtggctgaacaattacacaatgaaggtttcaagctgtttgccacggaagccacatcagactggctcaacgccaacaatgtccctgccaccccagtggcatggccgtctcaagaaggacagaatcccagcctctcttccatcagaaaattgattagagatggcagcattgacctagtgattaaccttcccaacaacaacactaaatttgtccatgataattatgtgattcggaggacagctgttgatagtggaatccctctcctcactaattttcaggtgaccaaactttttgctgaagctgtgcagaaatctcgcaaggtggactccaagagtcttttccactacaggcagtacagtgctggaaaagcagcatagagatgcagacaccccagccccattattaaatcaacctgagccacatgttatctaaaggaactgattcacaactttctcagagatgaatattgataactaaacttcatttcagtttactttgttatgccttaatattctgtgtcttttgcaattaaattgtcagtcacttcttcaaaaccttacagtccttcctaagttactcttcatgagatttcatccatttactaatactgtatttttggtggactaggcttgcctatgtgcttatgtgtagctttttactttttatggtgctgattaatggtgatcaaggtaggaaaagttgctgttctattttctgaactctttctatactttaagatactctatttttaaaacactatctgcaaactcaggacactttaacagggcagaatactctaaaaacttgataaaattaaatatagatttaatttatgaaccttccatcatgatgtttgtgtattgcttctttttggatcctcattctcacccatttggctaatccaggaatattgttatcccttcccattatattgaagttgagaaatgtgacagaggcatttagagtatggacttttcttttctttttctttttctttttttctttttgagatggagtcacactctccaggctggagtgcagtggcacaatctcggctcactgcaatttccgtctcccaagttcaagcgattctcctgctttagactatggatttctttaaggaatactggtttgcagttttgttttctggactatatcagcagatggtagacagtgtttatgtagatgtgttgttgtttttatcattggattttaacttggcccgagtgaaataatcagatttttgtcattcacactctcccccagttttggaataacttggaagtaaggttcattcccttaagacgatggattctgttgaactatggggtcccacactgcactattaattccacccactgtaagggcaaggacaccattccttctacatataagaaaaaagtctctccccaagggcagcctttgttacttttaaatattttctgttattacaagtgctctaattgtgaacttttaaataaaatactattaatacgaggctgaccacacccaccaaagaaaaacactttttgggcgcgctgggcctcagaaagattttttaaacctttggttttggggcgcggccccttgtgttggtcaccttgggccaaacggttcccagggaaaccg

SEQ ID NO: 325936 - DNA, 5643 bp, Homo sapiens
agatcgctgtgcagtcagccttaaacactgactgcacccctcccagatttcttttacattaactaaaaagtcttatcacacaatctcataaaatttatgtaatttcatttaattttagccacaaatcatcaaaatgacgaggattttgacagctttcaaagtggtgaggacactgaagactggttttggctttaccaatgtgactgcacaccaaaaatggaaattttcaagacctggcatcaggctcctttctgtcaaggcacagacagcacacattgtcctggaagatggaactaagatgaaaggttactcctttggccatccatcctctgttgctggtgaagtggtttttaatactggcctgggagggtacccagaagctattactgaccctgcctacaaaggacagattctcacaatggccaaccctattattgggaatggtggagctcctgatactactgctctggatgaactgggacttagcaaatatttggagtctaatggaatcaaggtttcaggtttgctggtgctggattatagtaaagactacaaccactggctggctaccaagagtttagggcaatggctacaggaagaaaaggttcctgcaatttatggagtggacacaagaatgctgactaaaataattcgggataagggtaccatgcttgggaagattgaatttgaaggtcagcctgtggattttgtggatccaaataaacagaatttgattgctgaggtttcaaccaaggatgtcaaagtgtacggcaaaggaaaccccacaaaagtggtagctgtagactgtgggattaaaaacaatgtaatccgcctgctagtaaagcgaggagctgaagtgcacttagttccctggaaccatgatttcaccaagatggagtatgatgggattttgatcgcgggaggaccggggaacccagctcttgcagaaccactaattcagaatgtcagaaagattttggagagtgatcgcaaggagccattgtttggaatcagtacaggaaacttaataacaggattggctgctggtgccaaaacctacaagatgtccatggccaacagagggcagaatcagcctgttttgaatatcacaaacaaacaggctttcattactgctcagaatcatggctatgccttggacaacaccctccctgctggctggaaaccactttttgtgaatgtcaacgatcaaacaaatgaggggattatgcatgagagcaaacccttcttcgctgtgcagttccacccagaggtcaccccggggccaatagacactgagtacctgtttgattcctttttctcactgataaagaaaggaaaagctaccaccattacatcagtcttaccgaagccagcactagttgcatctcgggttgaggtttccaaagtccttattctaggatcaggaggtctgtccattggtcaggctggagaatttgattactcaggatctcaagctgtaaaagccatgaaggaagaaaatgtcaaaactgttctgatgaacccaaacattgcatcagtccagaccaatgaggtgggcttaaagcaagcggatactgtctactttcttcccatcacccctcagtttgtcacagaggtcatcaaggcagaacagccagatgggttaattctgggcatgggtggccagacagctctgaactgtggagtggaactattcaagagaggtgtgctcaaggaatatggtgtgaaagtcctgggaacttcagttgagtccattatggctacggaagacaggcagctgttttcagataaactaaatgagatcaatgaaaagattgctccaagttttgcagtggaatcgattgaggatgcactgaaggcagcagacaccattggctacccagtgatgatccgttccgcctatgcactgggtgggttaggctcaggcatctgtcccaacagagagactttgatggacctcagcacaaaggcctttgctatgaccaaccaaattctggtggagaagtcagtgacaggttggaaagaaatagaatatgaagtggttcgagatgctgatgacaattgtgtcactgtctgtaacatggaaaatgttgatgccatgggtgttcacacaggtgactcagttgttgtggctcctgcccagacactctccaatgccgagtttcagatgttgagacgtacttcaatcaatgttgttcgccacttgggcattgtgggtgaatgcaacattcagtttgcccttcatcctacctcaatggaatactgcatcattgaagtgaatgccagactgtcccgaagctctgctctggcctcaaaagccactggctacccattggcattcattgctgcaaagattgccctaggaatcccacttccagaaattaagaacgtcgtatccgggaagacatcagcctgttttgaacctagcctggattacatggtcaccaagattccccgctgggatcttgaccgttttcatggaacatctagccgaattggtagctctatgaaaagtgtaggagaggtcatggctattggtcgtacctttgaggagagtttccagaaagctttacggatgtgccacccatctatagaaggtttcactccccgtctcccaatgaacaaagaatggccatctaatttagatcttagaaaagagttgtctgaaccaagcagcacgcgtatctatgccattgccaaggccattgatgacaacatgtcccttgatgagattgagaagctcacatacattgacaagtggtttttgtataagatgcgtgatattttaaacatggaaaagacactgaaaggcctcaacagtgagtccatgacagaagaaaccctgaaaagggcaaaggagattgggttctcagataagcagatttcaaaatgccttgggctcactgaggcccagacaagggagctgaggttaaagacagtaacaaactatctctatgttacctacaatggtcaggagcatgatgtcaattttgatgaccatggaatgatggtgctaggctgtggtccatatcacattggcagcagtgtggaatttgattggtgtgctgtctctagtatccgcacactgcgtcaacttggcaagaagacggtggtggtgaattgcaatcctgagactgtgagcacagactttgatgagtgtgacaaactgtactttgaagagttgtccttggagagaatcctagacatctaccatcaggaggcatgtggtggctgcatcatatcagttggaggccagattccaaacaacctggcagttcctctatacaagaatggtgtcaagatcatgggcacaagccccctgcagatcgacagggctgaggatcgctccatcttctcagctgtcttggatgagctgaaggtggctcaggcaccttggaaagctgttaatactttgaatgaagcactggaatttgcaaagtctgtggactacccctgcttgttgaggccttcctatgttttgagtgggtctgctatgaatgtggtattctctgaggatgagatgaaaaaattcctagaagaggcgactagagtttctcaggagcacccagtggtgctgacaaaatttgttgaaggggcccgagaagtagaaatggacgctgttggcaaagatggaagggttatctctcatgccatctctgaacatgttgaagatgcaggtgtccactcgggagatgccactctgatgctgcccacacaaaccatcagccaaggggccattgcattcaacgtccaatttcttgtcaaaggaaatgatgtcttggtgattgagtgtaacttgagagcttctcgatccttcccctttgtttccaagactcttggggttgacttcattgatgtggccaccaaggtgatgattggagagaatgttgatgagaaacatcttccaacattggaccatcccataattcctgctgactatgttgcaattaaggctcccatgttttcctggccccggttgagggatgctgaccccattctgagatgtgagatggcttccactggagaggtggcttgctttggtgaaggtattcatacagccttcctaaaggcaatgctttccacaggatttaagataccccagaaaggcatcctgataggcatccagcaatcattccggccaagattccttggtgtggctgaacaattacacaatgaaggtttcaagctgtttgccacggaagccacatcagactggctcaacgccaacaatgtccctgccaccccagtggcatggccgtctcaagaaggacagaatcccagcctctcttccatcagaaaattgattagagatggcagcattgacctagtgattaaccttcccaacaacaacactaaatttgtccatgataattatgtgattcggaggacagctgttgatagtggaatccctctcctcactaattttcaggtgaccaaactttttgctgaagctgtgcagaaatctcgcaaggtggactccaagagtcttttccactacaggcagtacagtgctggaaaagcagcatagagatgcagacaccccagccccattattaaatcaacctgagccacatgttatctaaaggaactgattcacaactttctcagagatgaatattgataactaaacttcatttcagtttactttgttatgccttaatattctgtgtcttttgcaattaaattgtcagtcacttcttcaaaaccttacagtccttcctaagttactcttcatgagatttcatccatttactaatactgtatttttggtggactaggcttgcctatgtgcttatgtgtagctttttactttttatggtgctgattaatggtgatcaaggtaggaaaagttgctgttctattttctgaactctttctatactttaagatactctatttttaaaacactatctgcaaactcaggacactttaacagggcagaatactctaaaaacttgataaaattaaatatagatttaatttatgaaccttccatcatgatgtttgtgtattgcttctttttggatcctcattctcacccatttggctaatccaggaatattgttatcccttcccattatattgaagttgagaaatgtgacagaggcatttagagtatggacttttcttttctttttctttttctttttttctttttgagatggagtcacactctccaggctggagtgcagtggcacaatctcggctcactgcaatttccgtctcccaagttcaagcgattctcctgctttagactatggatttctttaaggaatactggtttgcagttttgttttctggactatatcagcagatggtagacagtgtttatgtagatgtgttgttgtttttatcattggattttaacttggcccgagtgaaataatcagatttttgtcattcacactctcccccagttttggaataacttggaagtaaggttcattcccttaagacgatggattctgttgaactatggggtcccacactgcactattaattccacccactgtaagggcaaggacaccattccttctacatataagaaaaaagtctctccccaagggcagcctttgttacttttaaatattttctgttattacaagtgctctaattgtgaacttttaaataaaatactattaa

SEQ ID NO: 325937 - DNA, 5689 bp, Homo sapiens
agatcgctgtgcagtcagccttaaacactgactgcacccctcccagatttcttttacattaactaaaaagtcttatcacacaatctcataaaatttatgtaatttcatttaattttagccacaaatcatcaaaatgacgaggattttgacagctttcaaagtggtgaggacactgaagactggttttggctttaccaatgtgactgcacaccaaaaatggaaattttcaagacctggcatcaggctcctttctgtcaaggcacagacagcacacattgtcctggaagatggaactaagatgaaaggttactcctttggccatccatcctctgttgctggtgaagtggtttttaatactggcctgggagggtacccagaagctattactgaccctgcctacaaaggacagattctcacaatggccaaccctattattgggaatggtggagctcctgatactactgctctggatgaactgggacttagcaaatatttggagtctaatggaatcaaggtttcaggtttgctggtgctggattatagtaaagactacaaccactggctggctaccaagagtttagggcaatggctacaggaagaaaaggttcctgcaatttatggagtggacacaagaatgctgactaaaataattcgggataagggtaccatgcttgggaagattgaatttgaaggtcagcctgtggattttgtggatccaaataaacagaatttgattgctgaggtttcaaccaaggatgtcaaagtgtacggcaaaggaaaccccacaaaagtggtagctgtagactgtgggattaaaaacaatgtaatccgcctgctagtaaagcgaggagctgaagtgcacttagttccctggaaccatgatttcaccaagatggagtatgatgggattttgatcgcgggaggaccggggaacccagctcttgcagaaccactaattcagaatgtcagaaagattttggagagtgatcgcaaggagccattgtttggaatcagtacaggaaacttaataacaggattggctgctggtgccaaaacctacaagatgtccatggccaacagagggcagaatcagcctgttttgaatatcacaaacaaacaggctttcattactgctcagaatcatggctatgccttggacaacaccctccctgctggctggaaaccactttttgtgaatgtcaacgatcaaacaaatgaggggattatgcatgagagcaaacccttcttcgctgtgcagttccacccagaggtcaccccggggccaatagacactgagtacctgtttgattcctttttctcactgataaagaaaggaaaagctaccaccattacatcagtcttaccgaagccagcactagttgcatctcgggttgaggtttccaaagtccttattctaggatcaggaggtctgtccattggtcaggctggagaatttgattactcaggatctcaagctgtaaaagccatgaaggaagaaaatgtcaaaactgttctgatgaacccaaacattgcatcagtccagaccaatgaggtgggcttaaagcaagcggatactgtctactttcttcccatcacccctcagtttgtcacagaggtcatcaaggcagaacagccagatgggttaattctgggcatgggtggccagacagctctgaactgtggagtggaactattcaagagaggtgtgctcaaggaatatggtgtgaaagtcctgggaacttcagttgagtccattatggctacggaagacaggcagctgttttcagataaactaaatgagatcaatgaaaagattgctccaagttttgcagtggaatcgattgaggatgcactgaaggcagcagacaccattggctacccagtgatgatccgttccgcctatgcactgggtgggttaggctcaggcatctgtcccaacagagagactttgatggacctcagcacaaaggcctttgctatgaccaaccaaattctggtggagaagtcagtgacaggttggaaagaaatagaatatgaagtggttcgagatgctgatgacaattgtgtcactgtctgtaacatggaaaatgttgatgccatgggtgttcacacaggtgactcagttgttgtggctcctgcccagacactctccaatgccgagtttcagatgttgagacgtacttcaatcaatgttgttcgccacttgggcattgtgggtgaatgcaacattcagtttgcccttcatcctacctcaatggaatactgcatcattgaagtgaatgccagactgtcccgaagctctgctctggcctcaaaagccactggctacccattggcattcattgctgcaaagattgccctaggaatcccacttccagaaattaagaacgtcgtatccgggaagacatcagcctgttttgaacctagcctggattacatggtcaccaagattccccgctgggatcttgaccgttttcatggaacatctagccgaattggtagctctatgaaaagtgtaggagaggtcatggctattggtcgtacctttgaggagagtttccagaaagctttacggatgtgccacccatctatagaaggtttcactccccgtctcccaatgaacaaagaatggccatctaatttagatcttagaaaagagttgtctgaaccaagcagcacgcgtatctatgccattgccaaggccattgatgacaacatgtcccttgatgagattgagaagctcacatacattgacaagtggtttttgtataagatgcgtgatattttaaacatggaaaagacactgaaaggcctcaacagtgagtccatgacagaagaaaccctgaaaagggcaaaggagattgggttctcagataagcagatttcaaaatgccttgggctcactgaggcccagacaagggagctgaggttaaagaaaaacatccacccttgggttaaacagattgatacactggctgcagaatacccatcagtaacaaactatctctatgttacctacaatggtcaggagcatgatgtcaattttgatgaccatggaatgatggtgctaggctgtggtccatatcacattggcagcagtgtggaatttgattggtgtgctgtctctagtatccgcacactgcgtcaacttggcaagaagacggtggtggtgaattgcaatcctgagactgtgagcacagactttgatgagtgtgacaaactgtactttgaagagttgtccttggagagaatcctagacatctaccatcaggaggcatgtggtggctgcatcatatcagttggaggccagattccaaacaacctggcagttcctctatacaagaatggtgtcaagatcatgggcacaagccccctgcagatcgacagggctgaggatcgctccatcttctcagctgtcttggatgagctgaaggtggctcaggcaccttggaaagctgttaatactttgaatgaagcactggaatttgcaaagtctgtggactacccctgcttgttgaggccttcctatgttttgagtgggtctgctatgaatgtggtattctctgaggatgagatgaaaaaattcctagaagaggcgactagagtttctcaggagcacccagtggtgctgacaaaatttgttgaaggggcccgagaagtagaaatggacgctgttggcaaagatggaagggttatctctcatgccatctctgaacatgttgaagatgcaggtgtccactcgggagatgccactctgatgctgcccacacaaaccatcagccaaggggccattggtgaaggatgctacccggaagattgcaaaggcttttgccatctctggtccattcaacgtccaatttcttgtcaaaggaaatgatgtcttggtgattgagtgtaacttgagagcttctcgatccttcccctttgtttccaagactcttggggttgacttcattgatgtggccaccaaggtgatgattggagagaatgttgatgagaaacatcttccaacattggaccatcccataattcctgctgactatgttgcaattaaggctcccatgttttcctggccccggttgagggatgctgaccccattctgagatgtgagatggcttccactggagaggtggcttgctttggtgaaggtattcatacagccttcctaaaggcaatgctttccacaggatttaagataccccagaaaggcatcctgataggcatccagcaatcattccggccaagattccttggtgtggctgaacaattacacaatgaaggtttcaagctgtttgccacggaagccacatcagactggctcaacgccaacaatgtccctgccaccccagtggcatggccgtctcaagaaggacagaatcccagcctctcttccatcagaaaattgattagagatggcagcattgacctagtgattaaccttcccaacaacaacactaaatttgtccatgataattatgtgattcggaggacagctgttgatagtggaatccctctcctcactaattttcaggtgaccaaactttttgctgaagctgtgcagaaatctcgcaaggtggactccaagagtcttttccactacaggcagtacagtgctggaaaagcagcatagagatgcagacaccccagccccattattaaatcaacctgagccacatgttatctaaaggaactgattcacaactttctcagagatgaatattgataactaaacttcatttcagtttactttgttatgccttaatattctgtgtcttttgcaattaaattgtcagtcacttcttcaaaaccttacagtccttcctaagttactcttcatgagatttcatccatttactaatactgtatttttggtggactaggcttgcctatgtgcttatgtgtagctttttactttttatggtgctgattaatggtgatcaaggtaggaaaagttgctgttctattttctgaactctttctatactttaagatactctatttttaaaacactatctgcaaactcaggacactttaacagggcagaatactctaaaaacttcttctttttggatcctcattctcacccatttggctaatccaggaatattgttatcccttcccattatattgaagttgagaaatgtgacagaggcatttagagtatggacttttcttttctttttctttttctttttttctttttgagatggagtcacactctccaggctggagtgcagtggcacaatctcggctcactgcaatttccgtctcccaagttcaagcgattctcctgctttagactatggatttctttaaggaatactggtttgcagttttgttttctggactatatcagcagatggtagacagtgtttatgtagatgtgttgttgtttttatcattggattttaacttggcccgagtgaaataatcagatttttgtcattcacactctcccccagttttggaataacttggaagtaaggttcattcccttaagacgatggattctgttgaactatggggtcccacactgcactattaattccacccactgtaagggcaaggacaccattccttctacatataagaaaaaagtctctccccaagggcagcctttgttacttttaaatattttctgttattacaagtgctctaattgtgaacttttaaataaaatactattaa

SEQ ID NO: 325938 - DNA, 5686 bp, Homo sapiens
agatcgctgtgcagtcagccttaaacactgactgcacccctcccagatttcttttacattaactaaaaagtcttatcacacaatctcataaaatttatgtaatttcatttaattttagccacaaatcatcaaaatgacgaggattttgacagctttcaaagtggtgaggacactgaagactggttttggctttaccaatgtgactgcacaccaaaaatggaaattttcaagacctggcatcaggctcctttctgtcaaggcacagacagcacacattgtcctggaagatggaactaagatgaaaggttactcctttggccatccatcctctgttgctggtgaagtggtttttaatactggcctgggagggtacccagaagctattactgaccctgcctacaaaggacagattctcacaatggccaaccctattattgggaatggtggagctcctgatactactgctctggatgaactgggacttagcaaatatttggagtctaatggaatcaaggtttcaggtttgctggtgctggattatagtaaagactacaaccactggctggctaccaagagtttagggcaatggctacaggaagaaaaggttcctgcaatttatggagtggacacaagaatgctgactaaaataattcgggataagggtaccatgcttgggaagattgaatttgaaggtcagcctgtggattttgtggatccaaataaacagaatttgattgctgaggtttcaaccaaggatgtcaaagtgtacggcaaaggaaaccccacaaaagtggtagctgtagactgtgggattaaaaacaatgtaatccgcctgctagtaaagcgaggagctgaagtgcacttagttccctggaaccatgatttcaccaagatggagtatgatgggattttgatcgcgggaggaccggggaacccagctcttgcagaaccactaattcagaatgtcagaaagattttggagagtgatcgcaaggagccattgtttggaatcagtacaggaaacttaataacaggattggctgctggtgccaaaacctacaagatgtccatggccaacagagggcagaatcagcctgttttgaatatcacaaacaaacaggctttcattactgctcagaatcatggctatgccttggacaacaccctccctgctggctggaaaccactttttgtgaatgtcaacgatcaaacaaatgaggggattatgcatgagagcaaacccttcttcgctgtgcagttccacccagaggtcaccccggggccaatagacactgagtacctgtttgattcctttttctcactgataaagaaaggaaaagctaccaccattacatcagtcttaccgaagccagcactagttgcatctcgggttgaggtttccaaagtccttattctaggatcaggaggtctgtccattggtcaggctggagaatttgattactcaggatctcaagctgtaaaagccatgaaggaagaaaatgtcaaaactgttctgatgaacccaaacattgcatcagtccagaccaatgaggtgggcttaaagcaagcggatactgtctactttcttcccatcacccctcagtttgtcacagaggtcatcaaggcagaacagccagatgggttaattctgggcatgggtggccagacagctctgaactgtggagtggaactattcaagagaggtgtgctcaaggaatatggtgtgaaagtcctgggaacttcagttgagtccattatggctacggaagacaggcagctgttttcagataaactaaatgagatcaatgaaaagattgctccaagttttgcagtggaatcgattgaggatgcactgaaggcagcagacaccattggctacccagtgatgatccgttccgcctatgcactgggtgggttaggctcaggcatctgtcccaacagagagactttgatggacctcagcacaaaggcctttgctatgaccaaccaaattctggtggagaagtcagtgacaggttggaaagaaatagaatatgaagtggttcgagatgctgatgacaattgtgtcactgtctgtaacatggaaaatgttgatgccatgggtgttcacacaggtgactcagttgttgtggctcctgcccagacactctccaatgccgagtttcagatgttgagacgtacttcaatcaatgttgttcgccacttgggcattgtgggtgaatgcaacattcagtttgcccttcatcctacctcaatggaatactgcatcattgaagtgaatgccagactgtcccgaagctctgctctggcctcaaaagccactggctacccattggcattcattgctgcaaagattgccctaggaatcccacttccagaaattaagaacgtcgtatccgggaagacatcagcctgttttgaacctagcctggattacatggtcaccaagattccccgctgggatcttgaccgttttcatggaacatctagccgaattggtagctctatgaaaagtgtaggagaggtcatggctattggtcgtacctttgaggagagtttccagaaagctttacggatgtgccacccatctatagaaggtttcactccccgtctcccaatgaacaaagaatggccatctaatttagatcttagaaaagagttgtctgaaccaagcagcacgcgtatctatgccattgccaaggccattgatgacaacatgtcccttgatgagattgagaagctcacatacattgacaagtggtttttgtataagatgcgtgatattttaaacatggaaaagacactgaaaggcctcaacagtgagtccatgacagaagaaaccctgaaaagggcaaaggagattgggttctcagataagcagatttcaaaatgccttgggctcactgaggcccagacaagggagctgaggttaaagaaaaacatccacccttgggttaaacagattgatacactggctgcagaatacccatcagtaacaaactatctctatgttacctacaatggtcaggagcatgatgtcaattttgatgaccatggaatgatggtgctaggctgtggtccatatcacattggcagcagtgtggaatttgattggtgtgctgtctctagtatccgcacactgcgtcaacttggcaagaagacggtggtggtgaattgcaatcctgagactgtgagcacagactttgatgagtgtgacaaactgtactttgaagagttgtccttggagagaatcctagacatctaccatcaggaggcatgtggtggctgcatcatatcagttggaggccagattccaaacaacctggcagttcctctatacaagaatggtgtcaagatcatgggcacaagccccctgcagatcgacagggctgaggatcgctccatcttctcagctgtcttggatgagctgaaggtggctcaggcaccttggaaagctgttaatactttgaatgaagcactggaatttgcaaagtctgtggactacccctgcttgttgaggccttcctatgttttgagtgggtctgctatgaatgtggtattctctgaggatgagatgaaaaaattcctagaagaggcgactagagtttctcaggtagtgtccaatttctttgttatctctcatgccatctctgaacatgttgaagatgcaggtgtccactcgggagatgccactctgatgctgcccacacaaaccatcagccaaggggccattggtgaaggatgctacccggaagattgcaaaggcttttgccatctctggtccattcaacgtccaatttcttgtcaaaggaaatgatgtcttggtgattgagtgtaacttgagagcttctcgatccttcccctttgtttccaagactcttggggttgacttcattgatgtggccaccaaggtgatgattggagagaatgttgatgagaaacatcttccaacattggaccatcccataattcctgctgactatgttgcaattaaggctcccatgttttcctggccccggttgagggatgctgaccccattctgagatgtgagatggcttccactggagaggtggcttgctttggtgaaggtattcatacagccttcctaaaggcaatgctttccacaggatttaagataccccagaaaggcatcctgataggcatccagcaatcattccggccaagattccttggtgtggctgaacaattacacaatgaaggtttcaagctgtttgccacggaagccacatcagactggctcaacgccaacaatgtccctgccaccccagtggcatggccgtctcaagaaggacagaatcccagcctctcttccatcagaaaattgattagagatggcagcattgacctagtgattaaccttcccaacaacaacactaaatttgtccatgataattatgtgattcggaggacagctgttgatagtggaatccctctcctcactaattttcaggtgaccaaactttttgctgaagctgtgcagaaatctcgcaaggtggactccaagagtcttttccactacaggcagtacagtgctggaaaagcagcatagagatgcagacaccccagccccattattaaatcaacctgagccacatgttatctaaaggaactgattcacaactttctcagagatgaatattgataactaaacttcatttcagtttactttgttatgccttaatattctgtgtcttttgcaattaaattgtcagtcacttcttcaaaaccttacagtccttcctaagttactcttcatgagatttcatccatttactaatactgtatttttggtggactaggcttgcctatgtgcttatgtgtagctttttactttttatggtgctgattaatggtgatcaaggtaggaaaagttgctgttctattttctgaactctttctatactttaagatactctatttttaaaacactatctgcaaactcaggacactttaacagggcagaatactctaaaaacttgataaaattaaatatagatttaatttatgaaccttccatcatgatgtttgtgtattgcttctttttggatcctcattctcacccatttggctaatccaggaatattgttatcccttcccattatattgaagttgagaaatgtgacagaggcatttagagtatggacttttcttttctttttctttttctttttttctttttgagatggagtcacactctccaggctggagtgcagtggcacaatctcggctcactgcaatttccgtctcccaagttcaagcgattctcctgctttagactatggatttctttaaggaatactggtttgcagttttgttttctggactatatcagcagatggtagacagtgtttatgtagatgtgttgttgtttttatcattggattttaacttggcccgagtgaaataatcagatttttgtcattcacactctcccccagttttggaataacttggaagtaaggttcattcccttaagacgatggattctgttgaactatggggtcccacactgcactattaattccacccactgtaagggcaaggacaccattccttctacatataagaaaaaagtctctccccaagggcagcctttgttacttttaaatattttctgttattacaagtgctctaattgtgaacttttaaataaaatactattaa

SEQ ID NO: 325939 - DNA, 5691 bp, Homo sapiens
agatcgctgtgcagtcagccttaaacactgactgcacccctcccagatttcttttacattaactaaaaagtcttatcacacaatctcataaaatttatgtaatttcatttaattttagccacaaatcatcaaaatgacgaggattttgacagctttcaaagtggtgaggacactgaagactggttttggctttaccaatgtgactgcacaccaaaaatggaaattttcaagacctggcatcaggctcctttctgtcaaggcacagacagcacacattgtcctggaagatggaactaagatgaaaggttactcctttggccatccatcctctgttgctggtgaagtggtttttaatactggcctgggagggtacccagaagctattactgaccctgcctacaaaggacagattctcacaatggccaaccctattattgggaatggtggagctcctgatactactgctctggatgaactgggacttagcaaatatttggagtctaatggaatcaaggtttcaggtttgctggtgctggattatagtaaagactacaaccactggctggctaccaagagtttagggcaatggctacaggaagaaaaggttcctgcaatttatggagtggacacaagaatgctgactaaaataattcgggataagggtaccatgcttgggaagattgaatttgaaggtcagcctgtggattttgtggatccaaataaacagaatttgattgctgaggtttcaaccaaggatgtcaaagtgtacggcaaaggaaaccccacaaaagtggtagctgtagactgtgggattaaaaacaatgtaatccgcctgctagtaaagcgaggagctgaagtgcacttagttccctggaaccatgatttcaccaagatggagtatgatgggattttgatcgcgggaggaccggggaacccagctcttgcagaaccactaattcagaatgtcagaaagattttggagagtgatcgcaaggagccattgtttggaatcagtacaggaaacttaataacaggattggctgctggtgccaaaacctacaagatgtccatggccaacagagggcagaatcagcctgttttgaatatcacaaacaaacaggctttcattactgctcagaatcatggctatgccttggacaacaccctccctgctggctggaaaccactttttgtgaatgtcaacgatcaaacaaatgaggggattatgcatgagagcaaacccttcttcgctgtgcagttccacccagaggtcaccccggggccaatagacactgagtacctgtttgattcctttttctcactgataaagaaaggaaaagctaccaccattacatcagtcttaccgaagccagcactagttgcatctcgggttgaggtttccaaagtccttattctaggatcaggaggtctgtccattggtcaggctggagaatttgattactcaggatctcaagctgtaaaagccatgaaggaagaaaatgtcaaaactgttctgatgaacccaaacattgcatcagtccagaccaatgaggtgggcttaaagcaagcggatactgtctactttcttcccatcacccctcagtttgtcacagaggtcatcaaggcagaacagccagatgggttaattctgggcatgggtggccagacagctctgaactgtggagtggaactattcaagagaggtgtgctcaaggaatatggtgtgaaagtcctgggaacttcagttgagtccattatggctacggaagacaggcagctgttttcagataaactaaatgagatcaatgaaaagattgctccaagttttgcagtggaatcgattgaggatgcactgaaggcagcagacaccattggctacccagtgatgatccgttccgcctatgcactgggtgggttaggctcaggcatctgtcccaacagagagactttgatggacctcagcacaaaggcctttgctatgaccaaccaaattctggtggagaagtcagtgacaggttggaaagaaatagaatatgaagtggttcgagatgctgatgacaattgtgtcactgtctgtaacatggaaaatgttgatgccatgggtgttcacacaggtgactcagttgttgtggctcctgcccagacactctccaatgccgagtttcagatgttgagacgtacttcaatcaatgttgttcgccacttgggcattgtgggtgaatgcaacattcagtttgcccttcatcctacctcaatggaatactgcatcattgaagtgaatgccagactgtcccgaagctctgctctggcctcaaaagccactggctacccattggcattcattgctgcaaagattgccctaggaatcccacttccagaaattaagaacgtcgtatccgggaagacatcagcctgttttgaacctagcctggattacatggtcaccaagattccccgctgggatcttgaccgttttcatggaacatctagccgaattggtagctctatgaaaagtgtaggagaggtcatggctattggtcgtacctttgaggagagtttccagaaagctttacggatgtgccacccatctatagaaggtttcactccccgtctcccaatgaacaaagaatggccatctaatttagatcttagaaaagagttgtctgaaccaagcagcacgcgtatctatgccattgccaaggccattgatgacaacatgtcccttgatgagattgagaagctcacatacattgacaagtggtttttgtataagatgcgtgatattttaaacatggaaaagacactgaaaggcctcaacagtgagtccatgacagaagaaaccctgaaaagggcaaaggagattgggttctcagataagcagatttcaaaatgccttgggctcactgaggcccagacaagggagctgaggttaaagaaaaacatccacccttgggttaaacagattgatacactggctgcagaatacccatcagtaacaaactatctctatgttacctacaatggtcaggagcatgatgtcaattttgatgaccatggaatgatggtgctaggctgtggtccatatcacattggcagcagtgtggaatttgattggtgtgctgtctctagtatccgcacactgcgtcaacttggcaagaagacggtggtggtgaattgcaatcctgagactgtgagcacagactttgatgagtgtgacaaactgtactttgaagagttgtccttggagagaatcctagacatctaccatcaggaggcatgtggtggctgcatcatatcagttggaggccagattccaaacaacctggcagttcctctatacaagaatggtgtcaagatcatgggcacaagccccctgcagatcgacagggctgaggatcgctccatcttctcagctgtcttggatgagctgaaggtggctcaggcaccttggaaagctgttaatactttgaatgaagcactggaatttgcaaagtctgtggactacccctgcttgttgaggccttcctatgttttgagtgggtctgctatgaatgtggtattctctgaggatgagatgaaaaaattcctagaagaggcgactagagtttctcaggagcacccagtggtgctgacaaaatttgttgaaggggcccgagaagtagaaatggacgctgttggcaaagatggaagggttatctctcatgccatctctgaacatgttgaagatgcaggtgtccactcgggagatgccactctgatgctgcccacacaaaccatcagccaaggggccattggtgaaggatgctacccggaagattgcaaaggcttttgccatctctggtccattcaacgtccaatttcttgtcaaaggaaatgatgtcttggtgattgagtgtaacttgagagcttctcgatccttcccctttgtttccaagactcttggggttgacttcattgatgtggccaccaaggtgatgattggagagaatgttgatgagaaacatcttccaacattggaccatcccataattcctgctgactatgttgcaattaaggctcccatgttttcctggccccggttgagggatgctgaccccattctgagatgtgagatggcttccactggagaggtggcttgctttggtgaaggtattcatacagccttcctaaaggcaatgctttccacaggatttaagataccccagaaaggcatcctgataggcatccagcaatcattccggccaagattccttggtgtggctgaacaattacacaatgaaggtttcaagctgtttgccacggaagccacatcagactggctcaacgccaacaatgtccctgccaccccagtggcatggccgtctcaagaaggacagaatcccagcctctcttccatcagaaaattgattagagatggcagcattgacctagtgattaaccttcccaacaacaacactaaatttgtccatgataattatgtgattcggaggacagctgttgatagtggaatccctctcctcactaattttcaggtgaccaaactttttgctgaagctgtgcagaaatctcgcaaggtggactccaagagtcttttccactacaggcagtacagtgctggaaaagcagcatagagatgcagacaccccagccccattattaaatcaacctgagccacatgttatctaaaggaactgattcacaactttctcagagatgaatattgataactaaacttcatttcagtttactttgttatgccttaatattctgtgtcttttgcaattaaattgtcagtcacttcttcaaaaccttacagtccttcctaagttactcttcatgagatttcatccatttactaatactgtatttttggtggactaggcttgcctatgtgcttatgtgtagctttttactttttatggtgctgattaatggtgatcaaggtaggaaaagttgctgttctattttctgaactctttctatactttaagatactctatttttagataaaattaaatatagatttaatttatgaaccttccatcatgatgtttgtgtattgcttctttttggatcctcattctcacccatttggctaatccaggaatattgttatcccttcccattatattgaagttgagaaatgtgacagaggcatttagagtatggacttttcttttctttttctttttctttttttctttttgagatggagtcacactctccaggctggagtgcagtggcacaatctcggctcactgcaatttccgtctcccaagttcaagcgattctcctgctttagactatggatttctttaaggaatactggtttgcagttttgttttctggactatatcagcagatggtagacagtgtttatgtagatgtgttgttgtttttatcattggattttaacttggcccgagtgaaataatcagatttttgtcattcacactctcccccagttttggaataacttggaagtaaggttcattcccttaagacgatggattctgttgaactatggggtcccacactgcactattaattccacccactgtaagggcaaggacaccattccttctacatataagaaaaaagtctctccccaagggcagcctttgttacttttaaatattttctgttattacaagtgctctaattgtgaacttttaaataaaatactattaa

SEQ ID NO: 325940 - DNA, 2184 bp, Homo sapiens
ctttttttccccttccttttccagtgggtctgctatgaatgtggtattctctgaggatgagatgaaaaaattcctagaagaggcgactagagtttctcaggagcacccagtggtgctgacaaaatttgttgaaggggcccgagaagtagaaatggacgctgttggcaaagatggaagggttatctctcatgccatctctgaacatgttgaagatgcaggtgtccactcgggagatgccactctgatgctgcccacacaaaccatcagccaaggggccattgcattcaacgtccaatttcttgtcaaaggaaatgatgtcttggtgattgagtgtaacttgagagcttctcgatccttcccctttgtttccaagactcttggggttgacttcattgatgtggccaccaaggtgatgattggagagaatgttgatgagaaacatcttccaacattggaccatcccataattcctgctgactatgttgcaattaaggctcccatgttttcctggccccggttgagggatgctgaccccattctgagatgtgagatggcttccactggagaggtggcttgctttggtgaaggtattcatacagccttcctaaaggcaatgctttccacaggatttaagataccccagaaaggcatcctgataggcatccagcaatcattccggccaagattccttggtgtggctgaacaattacacaatgaaggtttcaagctgtttgccacggaagccacatcagactggctcaacgccaacaatgtccctgccaccccagtggcatggccgtctcaagaaggacagaatcccagcctctcttccatcagaaaattgattagagatggcagcattgacctagtgattaaccttcccaacaacaacactaaatttgtccatgataattatgtgattcggaggacagctgttgatagtggaatccctctcctcactaattttcaggtgaccaaactttttgctgaagctgtgcagaaatctcgcaaggtggactccaagagtcttttccactacaggcagtacagtgctggaaaagcagcatagagatgcagacaccccagccccattattaaatcaacctgagccacatgttatctaaaggaactgattcacaactttctcagagatgaatattgataactaaacttcatttcagtttactttgttatgccttaatattctgtgtcttttgcaattaaattgtcagtcacttcttcaaaaccttacagtccttcctaagttactcttcatgagatttcatccatttactaatactgtatttttggtggactaggcttgcctatgtgcttatgtgtagctttttactttttatggtgctgattaatggtgatcaaggtaggaaaagttgctgttctattttctgaactctttctatactttaagatactctatttttaaaacactatctgcaaactcaggacactttaacagggcagaatactctaaaaacttgataaaattaaatatagatttaatttatgaaccttccatcatgatgtttgtgtattgcttctttttggatcctcattctcacccatttggctaatccaggaatattgttatcccttcccattatattgaagttgagaaatgtgacagaggcatttagagtatggacttttcttttctttttctttttctttttttctttttgagatggagtcacactctccaggctggagtgcagtggcacaatctcggctcactgcaatttccgtctcccaagttcaagcgattctcctgctttagactatggatttctttaaggaatactggtttgcagttttgttttctggactatatcagcagatggtagacagtgtttatgtagatgtgttgttgtttttatcattggattttaacttggcccgagtgaaataatcagatttttgtcattcacactctcccccagttttggaataacttggaagtaaggttcattcccttaagacgatggattctgttgaactatggggtcccacactgcactattaattccacccactgtaagggcaaggacaccattccttctacatataagaaaaaagtctctccccaagggcagcctttgttacttttaaatattttctgttattacaagtgctctaattgtgaacttttaaataaaatactattaa

SEQ ID NO: 325941 - DNA, 5643 bp, Homo sapiens
agatcgctgtgcagtcagccttaaacactgactgcacccctcccagatttcttttacattaactaaaaagtcttatcacacaatctcataaaatttatgtaatttcatttaattttagccacaaatcatcaaaatgacgaggattttgacagctttcaaagtggtgaggacactgaagactggttttggctttaccaatgtgactgcacaccaaaaatggaaattttcaagacctggcatcaggctcctttctgtcaaggcacagacagcacacattgtcctggaagatggaactaagatgaaaggttactcctttggccatccatcctctgttgctggtgaagtggtttttaatactggcctgggagggtacccagaagctattactgaccctgcctacaaaggacagattctcacaatggccaaccctattattgggaatggtggagctcctgatactactgctctggatgaactgggacttagcaaatatttggagtctaatggaatcaaggtttcaggtttgctggtgctggattatagtaaagactacaaccactggctggctaccaagagtttagggcaatggctacaggaagaaaaggttcctgcaatttatggagtggacacaagaatgctgactaaaataattcgggataagggtaccatgcttgggaagattgaatttgaaggtcagcctgtggattttgtggatccaaataaacagaatttgattgctgaggtttcaaccaaggatgtcaaagtgtacggcaaaggaaaccccacaaaagtggtagctgtagactgtgggattaaaaacaatgtaatccgcctgctagtaaagcgaggagctgaagtgcacttagttccctggaaccatgatttcaccaagatggagtatgatgggattttgatcgcgggaggaccggggaacccagctcttgcagaaccactaattcagaatgtcagaaagattttggagagtgatcgcaaggagccattgtttggaatcagtacaggaaacttaataacaggattggctgctggtgccaaaacctacaagatgtccatggccaacagagggcagaatcagcctgttttgaatatcacaaacaaacaggctttcattactgctcagaatcatggctatgccttggacaacaccctccctgctggctggaaaccactttttgtgaatgtcaacgatcaaacaaatgaggggattatgcatgagagcaaacccttcttcgctgtgcagttccacccagaggtcaccccggggccaatagacactgagtacctgtttgattcctttttctcactgataaagaaaggaaaagctaccaccattacatcagtcttaccgaagccagcactagttgcatctcgggttgaggtttccaaagtccttattctaggatcaggaggtctgtccattggtcaggctggagaatttgattactcaggatctcaagctgtaaaagccatgaaggaagaaaatgtcaaaactgttctgatgaacccaaacattgcatcagtccagaccaatgaggtgggcttaaagcaagcggatactgtctactttcttcccatcacccctcagtttgtcacagaggtcatcaaggcagaacagccagatgggttaattctgggcatgggtggccagacagctctgaactgtggagtggaactattcaagagaggtgtgctcaaggaatatggtgtgaaagtcctgggaacttcagttgagtccattatggctacggaagacaggcagctgttttcagataaactaaatgagatcaatgaaaagattgctccaagttttgcagtggaatcgattgaggatgcactgaaggcagcagacaccattggctacccagtgatgatccgttccgcctatgcactgggtgggttaggctcaggcatctgtcccaacagagagactttgatggacctcagcacaaaggcctttgctatgaccaaccaaattctggtggagaagtcagtgacaggttggaaagaaatagaatatgaagtggttcgagatgctgatgacaattgtgtcactgtctgtaacatggaaaatgttgatgccatgggtgttcacacaggtgactcagttgttgtggctcctgcccagacactctccaatgccgagtttcagatgttgagacgtacttcaatcaatgttgttcgccacttgggcattgtgggtgaatgcaacattcagtttgcccttcatcctacctcaatggaatactgcatcattgaagtgaatgccagactgtcccgaagctctgctctggcctcaaaagccactggctacccattggcattcattgctgcaaagattgccctaggaatcccacttccagaaattaagaacgtcgtatccgggaagacatcagcctgttttgaacctagcctggattacatggtcaccaagattccccgctgggatcttgaccgttttcatggaacatctagccgaattggtagctctatgaaaagtgtaggagaggtcatggctattggtcgtacctttgaggagagtttccagaaagctttacggatgtgccacccatctatagaaggtttcactccccgtctcccaatgaacaaagaatggccatctaatttagatcttagaaaagagttgtctgaaccaagcagcacgcgtatctatgccattgccaaggccattgatgacaacatgtcccttgatgagattgagaagctcacatacattgacaagtggtttttgtataagatgcgtgatattttaaacatggaaaagacactgaaaggcctcaacagtgagtccatgacagaagaaaccctgaaaagggcaaaggagattgggttctcagataagcagatttcaaaatgccttgggctcactgaggcccagacaagggagctgaggttaaagaaaaacatccacccttgggttaaacagattgatacactggctgcagaatacccatcagtaacaaactatctctatgttacctacaatggtcaggagcatgatgtcaattttgatgaccatggaatgatggtgctaggctgtggtccatatcacattggcagcagtgtggaatttgattggtgtgctgtctctagtatccgcacactgcgtcaacttggcaagaagacggtggtggtgaattgcaatcctgagactgtgagcacagactttgatgagtgtgacaaactgtactttgaagagttgtccttggagagaatcctagacatctaccatcaggaggcatgtggtggctgcatcatatcagttggaggccagattccaaacaacctggcagttcctctatacaagaatggtgtcaagatcatgggcacaagccccctgcagatcgacagggctgaggatcgctccatcttctcagctgtcttggatgagctgaaggtggctcaggcaccttggaaagctgttaatactttgaatgaagcactggaatttgcaaagtctgtggactacccctgcttgttgaggccttcctatgttttgagtgggtctgctatgaatgtggtattctctgaggatgagatgaaaaaattcctagaagaggcgactagagtttctcaggagcacccagtggtgctgacaaaatttgttgaaggggcccgagaagtagaaatggacgctgttggcaaagatggaagggttatctctcatgccatctctgaacatgttgaagatgcaggtgtccactcgggagatgccactctgatgctgcccacacaaaccatcagccaaggggccattgcattcaacgtccaatttcttgtcaaaggaaatgatgtcttggtgattgagtgtaacttgagagcttctcgatccttcccctttgtttccaagactcttggggttgacttcattgatgtggccaccaaggtgatgattggagagaatgttgatgagaaacatcttccaacattggaccatcccataattcctgctgactatgttgcaattaaggctcccatgttttcctggccccggttgagggatgctgaccccattctgagatgtgagatggcttccactggagaggtggcttgctttggtgaaggtattcatacagccttcctaaaggcaatgctttccacaggatttaagataccccagaaaggcatcctgataggcatccagcaatcattccggccaagattccttggtgtggctgaacaattacacaatgaaggtttcaagctgtttgccacggaagccacatcagactggctcaacgccaacaatgtccctgccaccccagtggcatggccgtctcaagaaggacagaatcccagcctctcttccatcagaaataaatttgtccatgataattatgtgattcggaggacagctgttgatagtggaatccctctcctcactaattttcaggtgaccaaactttttgctgaagctgtgcagaaatctcgcaaggtggactccaagagtcttttccactacaggcagtacagtgctggaaaagcagcatagagatgcagacaccccagccccattattaaatcaacctgagccacatgttatctaaaggaactgattcacaactttctcagagatgaatattgataactaaacttcatttcagtttactttgttatgccttaatattctgtgtcttttgcaattaaattgtcagtcacttcttcaaaaccttacagtccttcctaagttactcttcatgagatttcatccatttactaatactgtatttttggtggactaggcttgcctatgtgcttatgtgtagctttttactttttatggtgctgattaatggtgatcaaggtaggaaaagttgctgttctattttctgaactctttctatactttaagatactctatttttaaaacactatctgcaaactcaggacactttaacagggcagaatactctaaaaacttgataaaattaaatatagatttaatttatgaaccttccatcatgatgtttgtgtattgcttctttttggatcctcattctcacccatttggctaatccaggaatattgttatcccttcccattatattgaagttgagaaatgtgacagaggcatttagagtatggacttttcttttctttttctttttctttttttctttttgagatggagtcacactctccaggctggagtgcagtggcacaatctcggctcactgcaatttccgtctcccaagttcaagcgattctcctgctttagactatggatttctttaaggaatactggtttgcagttttgttttctggactatatcagcagatggtagacagtgtttatgtagatgtgttgttgtttttatcattggattttaacttggcccgagtgaaataatcagatttttgtcattcacactctcccccagttttggaataacttggaagtaaggttcattcccttaagacgatggattctgttgaactatggggtcccacactgcactattaattccacccactgtaagggcaaggacaccattccttctacatataagaaaaaagtctctccccaagggcagcctttgttacttttaaatattttctgttattacaagtgctctaattgtgaacttttaaataaaatactattaa

SEQ ID NO: 325942 - DNA, 5645 bp, Homo sapiens
agatcgctgtgcagtcagccttaaacactgactgcacccctcccagatttcttttacattaactaaaaagtcttatcacacaatctcataaaatttatgtaatttcatttaattttagccacaaatcatcaaaatgacgaggattttgacagctttcaaagtggtgaggacactgaagactggttttggctttaccaatgtgactgcacaccaaaaatggaaattttcaagacctggcatcaggctcctttctgtcaaggcacagacagcacacattgtcctggaagatggaactaagatgaaaggttactcctttggccatccatcctctgttgctggtgaagtggtttttaatactggcctgggagggtacccagaagctattactgaccctgcctacaaaggacagattctcacaatggccaaccctattattgggaatggtggagctcctgatactactgctctggatgaactgggacttagcaaatatttggagtctaatggaatcaaggtttcaggtttgctggtgctggattatagtaaagactacaaccactggctggctaccaagagtttagggcaatggctacaggaagaaaaggttcctgcaatttatggagtggacacaagaatgctgactaaaataattcgggataagggtaccatgcttgggaagattgaatttgaaggtcagcctgtggattttgtggatccaaataaacagaatttgattgctgaggtttcaaccaaggatgtcaaagtgtacggcaaaggaaaccccacaaaagtggtagctgtagactgtgggattaaaaacaatgtaatccgcctgctagtaaagcgaggagctgaagtgcacttagttccctggaaccatgatttcaccaagatggagtatgatgggattttgatcgcgggaggaccggggaacccagctcttgcagaaccactaattcagaatgtcagaaagattttggagagtgatcgcaaggagccattgtttggaatcagtacaggaaacttaataacaggattggctgctggtgccaaaacctacaagatgtccatggccaacagagggcagaatcagcctgttttgaatatcacaaacaaacaggctttcattactgctcagaatcatggctatgccttggacaacaccctccctgctggctggaaaccactttttgtgaatgtcaacgatcaaacaaatgaggggattatgcatgagagcaaacccttcttcgctgtgcagttccacccagaggtcaccccggggccaatagacactgagtacctgtttgattcctttttctcactgataaagaaaggaaaagctaccaccattacatcagtcttaccgaagccagcactagttgcatctcgggttgaggtttccaaagtccttattctaggatcaggaggtctgtccattggtcaggctggagaatttgattactcaggatctcaagctgtaaaagccatgaaggaagaaaatgtcaaaactgttctgatgaacccaaacattgcatcagtccagaccaatgaggtgggcttaaagcaagcggatactgtctactttcttcccatcacccctcagtttgtcacagaggtcatcaaggcagaacagccagatgggttaattctgggcatgggtggccagacagctctgaactgtggagtggaactattcaagagaggtgtgctcaaggaatatggtgtgaaagtcctgggaacttcagttgagtccattatggctacggaagacaggcagctgttttcagataaactaaatgagatcaatgaaaagattgctccaagttttgcagtggaatcgattgaggatgcactgaaggcagcagacaccattggctacccagtgatgatccgttccgcctatgcactgggtgggttaggctcaggcatctgtcccaacagagagactttgatggacctcagcacaaaggcctttgctatgaccaaccaaattctggtggagaagtcagtgacaggttggaaagaaatagaatatgaagtggttcgagatgctgatgacaattgtgtcactgtctgtaacatggaaaatgttgatgccatgggtgttcacacaggtgactcagttgttgtggctcctgcccagacactctccaatgccgagtttcagatgttgagacgtacttcaatcaatgttgttcgccacttgggcattgtgggtgaatgcaacattcagtttgcccttcatcctacctcaatggaatactgcatcattgaagtgaatgccagactgtcccgaagctctgctctggcctcaaaagccactggctacccattggcattcattgctgcaaagattgccctaggaatcccacttccagaaattaagaacgtcgtatccgggaagacatcagcctgttttgaacctagcctggattacatggtcaccaagattccccgctgggatcttgaccgttttcatggaacatctagccgaattggtagctctatgaaaagtgtaggagaggtcatggctattggtcgtacctttgaggagagtttccagaaagctttacggatgtgccacccatctatagaaggtttcactccccgtctcccaatgaacaaagaatggccatctaatttagatcttagaaaagagttgtctgaaccaagcagcacgcgtatctatgccattgccaaggccattgatgacaacatgtcccttgatgagattgagaagctcacatacattgacaagtggtttttgtataagatgcgtgatattttaaacatggaaaagacactgaaaggcctcaacagtgagtccatgacagaagaaaccctgaaaagggcaaaggagattgggttctcagataagcagatttcaaaatgccttgggctcactgaggcccagacaagggagctgaggttaaagaaaaacatccacccttgggttaaacagattgatacactggctgcagaatacccatcagtaacaaactatctctatgttacctacaatggtcaggagcatgatgtcaattttgatgaccatggaatgatggtgctaggctgtggtccatatcacattggcagcagtgtggaatttgattggtgtgctgtctctagtatccgcacactgcgtcaacttggcaagaagacggtggtggtgaattgcaatcctgagactgtgagcacagactttgatgagtgtgacaaactgtactttgaagagttgtccttggagagaatcctagacatctaccatcaggaggcatgtggtggctgcatcatatcagttggaggccagattccaaacaacctggcagttcctctatacaagaatggtgtcaagatcatgggcacaagccccctgcagatcgacagggctgaggatcgctccatcttctcagctgtcttggatgagctgaaggtggctcaggcaccttggaaagctgttaatactttgaatgaagcactggaatttgcaaagtctgtggactacccctgcttgttgaggccttcctatgttttgagtgggtctgctatgaatgtggtattctctgaggatgagatgaaaaaattcctagaagaggcgactagagtttctcaggagcacccagtggtgctgacaaaatttgttgaaggggcccgagaagtagaaatggacgctgttggcaaagatggaagggttatctctcatgccatctctgaacatgttgaagatgcaggtgtccactcgggagatgccactctgatgctgcccacacaaaccatcagccaaggggccattgcattcaacgtccaatttcttgtcaaaggaaatgatgtcttggtgattgagtgtaacttgagagcttctcgatccttcccctttgtttccaagactcttggggttgacttcattgatgtggccaccaaggtgatgattggagagaatgttgatgagaaacatcttccaacattggaccatcccataattcctgctgactatgttgcaattaaggctcccatgttttcctggccccggttgagggatgctgaccccattctgagatgtgagatggcttccactggagaggtggcttgctttggtgaaggtattcatacagccttcctaaaggcaatgctttccacaggatttaagataccccagaaaggcatcctgataggcatccagcaatcattccggccaagattccttggtgtggctgaacaattacacaatgaaggtttcaagctgtttgccacggaagccacatcagactggctcaacgccaacaatgtccctgccaccccagtggcatggccgtctcaagaaggacagaatcccagcctctcttccatcagaaaattgattagagatggcagcattgacctagtgattaaccttcccaacaacaacactaaatttgtccatgataattatgtgattcggaggacagctgttgatagtggaatccctctcctcactaattttcaggtgaccaaactttttgctgaagctgtgcagaaatctcgcaaggtggactccaagagtcttttccactacaggcagtacagtgctgagccacatgttatctaaaggaactgattcacaactttctcagagatgaatattgataactaaacttcatttcagtttactttgttatgccttaatattctgtgtcttttgcaattaaattgtcagtcacttcttcaaaaccttacagtccttcctaagttactcttcatgagatttcatccatttactaatactgtatttttggtggactaggcttgcctatgtgcttatgtgtagctttttactttttatggtgctgattaatggtgatcaaggtaggaaaagttgctgttctattttctgaactctttctatactttaagatactctatttttaaaacactatctgcaaactcaggacactttaacagggcagaatactctaaaaacttgataaaattaaatatagatttaatttatgaaccttccatcatgatgtttgtgtattgcttctttttggatcctcattctcacccatttggctaatccaggaatattgttatcccttcccattatattgaagttgagaaatgtgacagaggcatttagagtatggacttttcttttctttttctttttctttttttctttttgagatggagtcacactctccaggctggagtgcagtggcacaatctcggctcactgcaatttccgtctcccaagttcaagcgattctcctgctttagactatggatttctttaaggaatactggtttgcagttttgttttctggactatatcagcagatggtagacagtgtttatgtagatgtgttgttgtttttatcattggattttaacttggcccgagtgaaataatcagatttttgtcattcacactctcccccagttttggaataacttggaagtaaggttcattcccttaagacgatggattctgttgaactatggggtcccacactgcactattaattccacccactgtaagggcaaggacaccattccttctacatataagaaaaaagtctctccccaagggcagcctttgttacttttaaatattttctgttattacaagtgctctaattgtgaacttttaaataaaatactattaa

SEQ ID NO: 325943 - DNA, 1406 bp, Homo sapiens
agatcgctgtgcagtcagccttaaacactgactgcacccctcccagatttcttttacattaactaaaaagtcttatcacacaatctcataaaatttatgtaatttcatttaattttagccacaaatcatcaaaatgacgaggattttgacagctttcaaagtggtgaggacactgaagactggttttggctttaccaatgtgactgcacaccaaaaatggaaattttcaagacctggcatcaggctcctttctgtcaaggcacagacagcacacattgtcctggaagatggaaatgcagacaccccagccccattattaaatcaacctgagccacatgttatctaaaggaactgattcacaactttctcagagatgaatattgataactaaacttcatttcagtttactttgttatgccttaatattctgtgtcttttgcaattaaattgtcagtcacttcttcaaaaccttacagtccttcctaagttactcttcatgagatttcatccatttactaatactgtatttttggtggactaggcttgcctatgtgcttatgtgtagctttttactttttatggtgctgattaatggtgatcaaggtaggaaaagttgctgttctattttctgaactctttctatactttaagatactctatttttaaaacactatctgcaaactcaggacactttaacagggcagaatactctaaaaacttgataaaattaaatatagatttaatttatgaaccttccatcatgatgtttgtgtattgcttctttttggatcctcattctcacccatttggctaatccaggaatattgttatcccttcccattatattgaagttgagaaatgtgacagaggcatttagagtatggacttttcttttctttttctttttctttttttctttttgagatggagtcacactctccaggctggagtgcagtggcacaatctcggctcactgcaatttccgtctcccaagttcaagcgattctcctgctttagactatggatttctttaaggaatactggtttgcagttttgttttctggactatatcagcagatggtagacagtgtttatgtagatgtgttgttgtttttatcattggattttaacttggcccgagtgaaataatcagatttttgtcattcacactctcccccagttttggaataacttggaagtaaggttcattcccttaagacgatggattctgttgaactatggggtcccacactgcactattaattccacccactgtaagggcaaggacaccattccttctacatataagaaaaaagtctctccccaagggcagcctttgttacttttaaatattttctgttattacaagtgctctaattgtgaacttttaaataaaatactattaa

SEQ ID NO: 325944 - DNA, 4022 bp, Homo sapiens
  misc_feature (3838)..(3838): n is a, c, g, or t
  misc_feature (3962)..(3962): n is a, c, g, or t
agatcgctgtgcagtcagccttaaacactgactgcacccctcccagatttcttttacattaactaaaaagtcttatcacacaatctcataaaatttatgtaatttcatttaattttagccacaaatcatcaaaatgacgaggattttgacagctttcaaagtggtgaggacactgaagactggttttggctttaccaatgtgactgcacaccaaaaatggaaattttcaagacctggcatcaggctcctttctgtcaaggcacagacagcacacattgtcctggaagatggaactaagatgaaaggttactcctttggccatccatcctctgttgctggtgaagtggtttttaatactggcctgggagggtacccagaagctattactgaccctgcctacaaaggacagattctcacaatggccaaccctattattgggaatggtggagctcctgatactactgctctggatgaactgggacttagcaaatatttggagtctaatggaatcaaggtttcaggtttgctggtgctggattatagtaaagactacaaccactggctggctaccaagagtttagggcaatggctacaggaagaaaaggttcctgcaatttatggagtggacacaagaatgctgactaaaataattcgggataagggtaccatgcttgggaagattgaatttgaaggtcagcctgtggattttgtggatccaaataaacagaatttgattgctgaggtttcaaccaaggatgtcaaagtgtacggcaaaggaaaccccacaaaagtggtagctgtagactgtgggattaaaaacaatgtaatccgcctgctagtaaagcgaggagctgaagtgcacttagttccctggaaccatgatttcaccaagatggagtatgatgggattttgatcgcgggaggaccggggaacccagctcttgcagaaccactaattcagaatgtcagaaagattttggagagtgatcgcaaggagccattgtttggaatcagtacaggaaacttaataacaggattggctgctggtgccaaaacctacaagatgtccatggccaacagagggcagaatcagcctgttttgaatatcacaaacaaacaggctttcattactgctcagaatcatggctatgccttggacaacaccctccctgctggctggaaaccactttttgtgaatgtcaacgatcaaacaaatgaggggattatgcatgagagcaaacccttcttcgctgtgcagttccacccagaggtcaccccggggccaatagacactgagtacctgtttgattcctttttctcactgataaagaaaggaaaagctaccaccattacatcagtcttaccgaagccagcactagttgcatctcgggttgaggtttccaaagtccttattctaggatcaggaggtctgtccattggtcaggctggagaatttgattactcaggatctcaagctgtaaaagccatgaaggaagaaaatgtcaaaactgttctgatgaacccaaacattgcatcagtccagaccaatgaggtgggcttaaagcaagcggatactgtctactttcttcccatcacccctcagtttgtcacagaggtcatcaaggcagaacagccagatgggttaattctgggcatgggtggccagacagctctgaactgtggagtggaactattcaagagaggtgtgctcaaggaatatggtgtgaaagtcctgggaacttcagttgagtccattatggctacggaagacaggcagctgttttcagataaactaaatgagatcaatgaaaagattgctccaagttttgcagtggaatcgattgaggatgcactgaaggcagcagacaccattggctacccagtgatgatccgttccgcctatgcactgggtgggttaggctcaggcatctgtcccaacagagagactttgatggacctcagcacaaaggcctttgctatgaccaaccaaattctggtggagaagtcagtgacaggttggaaagaaatagaatatgaagtggttcgagatgctgatgacaattgtgtcactgtctgtaacatggaaaatgttgatgccatgggtgttcacacaggtgactcagttgttgtggctcctgcccagacactctccaatgccgagtttcagatgttgagacgtacttcaatcaatgttgttcgccacttgggcattgtgggtgaatgcaacattcagtttgcccttcatcctacctcaatggaatactgcatcattgaagtgaatgccagactgtcccgaagctctgctctggcctcaaaagccactggctacccattggcattcattgctgcaaagattgccctaggaatcccacttccagaaattaagaacgtcgtatccgggaagacatcagcctgttttgaacctagcctggattacatggtcaccaagattccccgctgggatcttgaccgttttcatggaacatctagccgaattggtagctctatgaaaagtgtaggagaggtcatggctattggtcgtacctttgaggagagtttccagaaagctttacggatgtgccacccatctatagaaggtttcactccccgtctcccaatgaacaaagaatggccatctaatttagatcttagaaaagagttgtctgaaccaagcagcacgcgtatctatgccattgccaaggccattgatgacaacatgtcccttgatgagattgagaagctcacatacattgacaagtggtttttgtataagatgcgtgatattttaaacatggaaaagacactgaaaggcctcaacagtgagtccatgacagaagaaaccctgaaaagggcaaaggagattgggttctcagataagcagatttcaaaatgccttgggctcactgaggcccagacaagggagctgaggttaaagaaaaacatccacccttgggttaaacagattgatacactggctgcagaatacccatcagtaacaaactatctctatgttacctacaatggtcaggagcatgatgtcaattttgatgaccatggaatgatggtgctaggctgtggtccatatcacattggcagcagtgtggaatttgattggtgtgctgtctctagtatccgcacactgcgtcaacttggcaagaagacggtggtggtgaattgcaatcctgagactgtgagcacagactttgatgagtgtgacaaactgtactttgaagagttgtccttggagagaatcctagacatctaccatcaggaggcatgtggtggctgcatcatatcagttggaggccagattccaaacaacctggcagttcctctatacaagaatggtgtcaagatcatgggcacaagccccctgcagatcgacagggctgaggatcgctccatcttctcagctgtcttggatgagctgaaggtggctcaggcaccttggaaagctgttaatactttgaatgaagcactggaatttgcaaagtctgtggactacccctgcttgttgaggccttcctatgttttgagtgggtctgctatgaatgtggtattctctgaggatgagatgaaaaaattcctagaagaggcgactagagtttctcaggagcacccagtggtgctgacaaaatttgttgaaggggcccgagaagtagaaatggacgctgttggcaaagatggaagggttatctctcatgccatctctgaacatgttgaagatgcaggtgtccactcgggagatgccactctgatgctgcccacacaaaccatcagccaaggggccattgtaacgtcaattcttgcaaggaatgatgcttgggatgagtgactngaagctctcgacctcccattgttcaagactctgcgtgacttatgtgggcacaagtgtgatgaagatgtgtgtaacacttcacatgacatcatatctgtgcatgtgcataagtcatgttctgccngtgagatctgccatctaatgaatgctcatgaagtgctgttgtgagatatcgctctaagat

SEQ ID NO: 325945 - DNA, 598 bp, Homo sapiens
aacctctttttaaaaaaatcttattttagtaaaaagcctcccgtgggatagaacctgttttcttgattcctaactcattactctttcattataccacatgtgtctctatccaacgtagtcaaagaaccttaaaacaaatggtggtcctgcctgatggactaacaggatgatcatgttttagtacaacatgactactcaacatggcccttcagaaaaatgtgttgagtgcctactctgtgccaggaacatttggctcaaaacatggatttgcatattattgcttatgaagttcaccaatgtgatttaacttacttaacatcctgggttaaaagcaatagaagtgtagcagaagattgatgttcagaatttctcatttttttactctgagaaagaacctgggtattaagagtcctatgcctaactgtagcaacaatttactgtgttctgacaatacagtcaccctgggtcagagaaaagaaagagtggagaaattatttactgctcaagaagatagatgaggccaagtttgtaacttgaaaacaatatgctggatttaatctcctccaatttcactgtcactacaatttttttcttatag

SEQ ID NO: 325946 - DNA, 384 bp, Homo sapiens
ggcacgaggagaaattaaagacatccaaatttaaggtactgtgccttttagaaagttttcaaaaactaagatatgctctttagcacactatacgattatgctttttaattcaggtggtgaaggatgctacccggaagattgcaaaggcttttgccatctctggtccattcaacgtccaatttcttgtcaaaggaaatgatgtcttggtaagaaatgccaaggtgcctgagaggacaccaccactgtgttacgtcatgttggtttgcatctctctggtaatcttctctgtgaacaccagacaaagagcaactgagacccctggatctgtttgtgtctgagtgtggaatgatgcatagcatataatgtctaccttatttgaaggcc

SEQ ID NO: 325947 - DNA, 780 bp, Homo sapiens
caacacttgcttttcagaatgagatgagggaataatagaacatttctagattcactctccccacataagttggtttacctgattgccagactctcttggtgtggtctgttctgccagtgtgctcagcttttaaaatgttgagtccttgttcttgttgacagattgaggatgcactgaaggcagcagacaccattggctacccagtgatgatccgttccgcctatgcactgggtgggttaggctcaggcatctgtcccaacagagagactttgatggacctcagcacaaaggtatgtatttttgtagacaatattcttaccaaccaaaaaaactggcttgatagaccttttcaactagagaaagttatgtagatgagaaattacattttctttattaaatcatgatcatgttctccaaaagcgtattccaaaagatgacacttttgcgagagcatgcagtgcaactcttcatgccaggatgcaatgataaaccacatggttcaaggtaaaccagtggtcactttacctcaaattccacttttatagtacaatctattgacttcaaggagatgaacttaattcaactccttcttcctttgtttcaaaatctactctcaaatatttaaaatgctaaaatatgttttagtggttaaggaaaaataggacataatgtctcatttttaattttttagaaataatgtggctggcatgggtgacatccagaaagtgaaacaaagcacattgagtagtttgactttactcaaaattaaggtgtctaaaa

SEQ ID NO: 325948 - DNA, 684 bp, Homo sapiens
caaagatcgctgtgcagtcagccttaaacactgactgcacccctcccagatttcttttacattaactaaaaagtcttatcacacaatctcataaaatttatgtaatttcatttaattttagccacaaatcatcaaaatgacgaggattttgacagctttcaaagtggtgaggacactgaagactggttttggctttaccaatgtgactgcacaccaaaaatggaaattttcaagacctggcatcaggctcctttctgtcaaggtaatacccatattgattgtttctgataaaatactatggggtatagtttagcagtgaagcaaaggtgtcccttacaaggcaaatacagttttgaatgtagctctgaagtactaatgtattaatgtttcctttactgtggaacctactgacttagcaaatgctaatttttatcttatctgagtaacatgacagtaatttttacccaacataaagaatgatgacaattcttgtgaacatgtaaaatgtaagtacactgcttgaaaaagaaacatcttttctttcatagatagctttctgtgactagatactattgcttacagtttggatttaaaaaatggagctgcttatatgtgtgtgagccacattatggtacacagtgtgttaaggtctgttctataaatagggcttactgaaaagttctc

SEQ ID NO: 325949 - DNA, 790 bp, Homo sapiens
ctttaaggaatggttagtcaagagaaagtctagcaaaattatactttggcaaagaaacatgttattaaattcatcattcttgtgtctcttttccagcgaggagctgaagtgcacttagttccctggaaccatgatttcaccaagatggagtatgatgggattttgatcgcgggaggaccggggaacccagctcttgcagaaccactaattcagaatgtcagaaaggtgcaatgaaccttgaattcatgtgtatctgtgtgggaggtgggggcttccgctctataccctcaaagggctgtgatacattttatttattcaggcatttttcaatgctggtatttgtgacttctgaggcagtgtcagtagagatattctgtaggggaaccaatgaggagagaatatcagagaaaatagggtttttcttcaggcaaagtaacttggggatcatgtccttgagttaaaagaactggagtccaatggccaaatgtattttgctttacagttttaaaccgacaactcatggttccttatcatgaccttgggacccataagacctgcaggtctctaaagaaatattaaattagatttagtttagtttgaatgtaaagtacatcttaatgaattataatgctacaaatttgtcaattatgtccttttttatattcttctttaattcagttactattctctttaccttcttaagaaaaaaggatacctcatttttgttcattcagaagcaacattttttggaactgtactaattggttaataaaaattctccctgatttag

SEQ ID NO: 325950 - DNA, 5697 bp, Homo sapiens
agatcgctgtgcagtcagccttaaacactgactgcacccctcccagatttcttttacattaactaaaaagtcttatcacacaatctcataaaatttatgtaatttcatttaattttagccacaaatcatcaaaatgacgaggattttgacagctttcaaagtggtgaggacactgaagactggttttggctttaccaatgtgactgcacaccaaaaatggaaattttcaagacctggcatcaggctcctttctgtcaaggcacagacagcacacattgtcctggaagatggaactaagatgaaaggttactcctttggccatccatcctctgttgctggtgaagtggtttttaatactggcctgggagggtacccagaagctattactgaccctgcctacaaaggacagattctcacaatggccaaccctattattgggaatggtggagctcctgatactactgctctggatgaactgggacttagcaaatatttggagtctaatggaatcaaggtttcaggtttgctggtgctggattatagtaaagactacaaccactggctggctaccaagagtttagggcaatggctacaggaagaaaaggttcctgcaatttatggagtggacacaagaatgctgactaaaataattcgggataagggtaccatgcttgggaagattgaatttgaaggtcagcctgtggattttgtggatccaaataaacagaatttgattgctgaggtttcaaccaaggatgtcaaagtgtacggcaaaggaaaccccacaaaagtggtagctgtagactgtgggattaaaaacaatgtaatccgcctgctagtaaagcgaggagctgaagtgcacttagttccctggaaccatgatttcaccaagatggagtatgatgggattttgatcgcgggaggaccggggaacccagctcttgcagaaccactaattcagaatgtcagaaagattttggagagtgatcgcaaggagccattgtttggaatcagtacaggaaacttaataacaggattggctgctggtgccaaaacctacaagatgtccatggccaacagagggcagaatcagcctgttttgaatatcacaaacaaacaggctttcattactgctcagaatcatggctatgccttggacaacaccctccctgctggctggaaaccactttttgtgaatgtcaacgatcaaacaaatgaggggattatgcatgagagcaaacccttcttcgctgtgcagttccacccagaggtcaccccggggccaatagacactgagtacctgtttgattcctttttctcactgataaagaaaggaaaagctaccaccattacatcagtcttaccgaagccagcactagttgcatctcgggttgaggtttccaaagtccttattctaggatcaggaggtctgtccattggtcaggctggagaatttgattactcaggatctcaagctgtaaaagccatgaaggaagaaaatgtcaaaactgttctgatgaacccaaacattgcatcagtccagaccaatgaggtgggcttaaagcaagcggatactgtctactttcttcccatcacccctcagtttgtcacagaggtcatcaaggcagaacagccagatgggttaattctgggcatgggtggccagacagctctgaactgtggagtggaactattcaagagaggtgtgctcaaggaatatggtgtgaaagtcctgggaacttcagttgagtccattatggctacggaagacaggcagctgttttcagataaactaaatgagatcaatgaaaagattgctccaagttttgcagtggaatcgattgaggatgcactgaaggcagcagacaccattggctacccagtgatgatccgttccgcctatgcactgggtgggttaggctcaggcatctgtcccaacagagagactttgatggacctcagcacaaaggcctttgctatgaccaaccaaattctggtggagaagtcagtgacaggttggaaagaaatagaatatgaagtggttcgagatgctgatgacaattgtgtcactgtctgtaacatggaaaatgttgatgccatgggtgttcacacaggtgactcagttgttgtggctcctgcccagacactctccaatgccgagtttcagatgttgagacgtacttcaatcaatgttgttcgccacttgggcattgtgggtgaatgcaacattcagtttgcccttcatcctacctcaatggaatactgcatcattgaagtgaatgccagactgtcccgaagctctgctctggcctcaaaagccactggctacccattggcattcattgctgcaaagattgccctaggaatcccacttccagaaattaagaacgtcgtatccgggaagacatcagcctgttttgaacctagcctggattacatggtcaccaagattccccgctgggatcttgaccgttttcatggaacatctagccgaattggtagctctatgaaaagtgtaggagaggtcatggctattggtcgtacctttgaggagagtttccagaaagctttacggatgtgccacccatctatagaaggtttcactccccgtctcccaatgaacaaagaatggccatctaatttagatcttagaaaagagttgtctgaaccaagcagcacgcgtatctatgccattgccaaggccattgatgacaacatgtcccttgatgagattgagaagctcacatacattgacaagtggtttttgtataagatgcgtgatattttaaacatggaaaagacactgaaaggcctcaacagtgagtccatgacagaagaaaccctgaaaagggcaaaggagattgggttctcagataagcagatttcaaaatgccttgggctcactgaggcccagacaagggagctgaggttaaagaaaaacatccacccttgggttaaacagattgatacactggctgcagaatacccatcagtaacaaactatctctatgttacctacaatggtcaggagcatgatgtcaattttgatgaccatggaatgatggtgctaggctgtggtccatatcacattggcagcagtgtggaatttgattggtgtgctgtctctagtatccgcacactgcgtcaacttggcaagaagacggtggtggtgaattgcaatcctgagactgtgagcacagactttgatgagtgtgacaaactgtactttgaagagttgtccttggagagaatcctagacatctaccatcaggaggcatgtggtggctgcatcatatcagttggaggccagattccaaacaacctggcagttcctctatacaagaatggtgtcaagatcatgggcacaagccccctgcagatcgacagggctgaggatcgctccatcttctcagctgtcttggatgagctgaaggtggctcaggcaccttggaaagctgttaatactttgaatgaagcactggaatttgcaaagtctgtggactacccctgcttgttgaggccttcctatgttttgagtgggtctgctatgaatgtggtattctctgaggatgagatgaaaaaattcctagaagaggcgactagagtttctcaggagcacccagtggtgctgacaaaatttgttgaaggggcccgagaagtagaaatggacgctgttggcaaagatggaagggttatctctcatgccatctctgaacatgttgaagatgcaggtgtccactcgggagatgccactctgatgctgcccacacaaaccatcagccaaggggccattgcattcaacgtccaatttcttgtcaaaggaaatgatgtcttggtgattgagtgtaacttgagagcttctcgatccttcccctttgtttccaagactcttggggttgacttcattgatgtggccaccaaggtgatgattggagagaatgttgatgagaaacatcttccaacattggaccatcccataattcctgctgactatgttgcaattaaggctcccatgttttcctggccccggttgagggatgctgaccccattctgagatgtgagatggcttccactggagaggtggcttgctttggtgaaggtattcatacagccttcctaaaggcaatgctttccacaggatttaagataccccagaaaggcatcctgataggcatccagcaatcattccggccaagattccttggtgtggctgaacaattacacaatgaaggtttcaagctgtttgccacggaagccacatcagactggctcaacgccaacaatgtccctgccaccccagtggcatggccgtctcaagaaggacagaatcccagcctctcttccatcagaaaattgattagagatggcagcattgacctagtgattaaccttcccaacaacaacactaaatttgtccatgataattatgtgattcggaggacagctgttgatagtggaatccctctcctcactaattttcaggtgaccaaactttttgctgaagctgtgcagaaatctcgcaaggtggactccaagagtcttttccactacaggcagtacagtgctggaaaagcagcatagagatgcagacaccccagccccattattaaatcaacctgagccacatgttatctaaaggaactgattcacaactttctcagagatgaatattgataactaaacttcatttcagtttactttgttatgccttaatattctgtgtcttttgcaattaaattgtcagtcacttcttcaaaaccttacagtccttcctaagttactcttcatgagatttcatccatttactaatactgtatttttggtggactaggcttgcctatgtgcttatgtgtagctttttactttttatggtgctgattaatggtgatcaaggtaggaaaagttgctgttctattttctgaactctttctatactttaagatactctatttttaaaacactatctgcaaactcaggacactttaacagggcagaatactctaaaaacttgataaaattaaatatagatttaatttatgaaccttccatcatgatgtttgtgtattgcttctttttggatcctcattctcacccatttggctaatccaggaatattgttatcccttcccattatattgaagttgagaaatgtgacagaggcatttagagtatggacttttcttttctttttctttttctttttttctttttgagatggagtcacactctccaggctggagtgcagtggcacaatctcggctcactgcaatttccgtctcccaagttcaagcgattctcctgctttagactatggatttctttaaggaatactggtttgcagttttgttttctggactatatcagcagatggtagacagtgtttatgtagatgtgttgttgtttttatcattggattttaacttggcccgagtgaaataatcagatttttgtcattcacactctcccccagttttggaataacttggaagtaaggttcattcccttaagacgatggattctgttgaactatggggtcccacactgcactattaattccacccactgtaagggcaaggacaccattccttctacatataagaaaaaagtctctccccaagggcagcctttgttacttttaaatattttctgttattacaagtgctctaattgtgaacttttaaataaaatactattaa

SEQ ID NO: 325951 - DNA, 5693 bp, Homo sapiens
agatcgctgtgcagtcagccttaaacactgactgcacccctcccagatttcttttacattaactaaaaagtcttatcacacaatctcataaaatttatgtaatttcatttaattttagccacaaatcatcaaaatgacgaggattttgacagctttcaaagtggtgaggacactgaagactggttttggctttaccaatgtgactgcacaccaaaaatggaaattttcaagacctggcatcaggctcctttctgtcaaggcacagacagcacacattgtcctggaagatggaactaagatgaaaggttactcctttggccatccatcctctgttgctggtgaagtggtttttaatactggcctgggagggtacccagaagctattactgaccctgcctacaaaggacagattctcacaatggccaaccctattattgggaatggtggagctcctgatactactgctctggatgaactgggacttagcaaatatttggagtctaatggaatcaaggtttcaggtttgctggtgctggattatagtaaagactacaaccactggctggctaccaagagtttagggcaatggctacaggaagaaaaggttcctgcaatttatggagtggacacaagaatgctgactaaaataattcgggataagggtaccatgcttgggaagattgaatttgaaggtcagcctgtggattttgtggatccaaataaacagaatttgattgctgaggtttcaaccaaggatgtcaaagtgtacggcaaaggaaaccccacaaaagtggtagctgtagactgtgggattaaaaacaatgtaatccgcctgctagtaaagcgaggagctgaagtgcacttagttccctggaaccatgatttcaccaagatggagtatgatgggattttgatcgcgggaggaccggggaacccagctcttgcagaaccactaattcagaatgtcagaaagattttggagagtgatcgcaaggagccattgtttggaatcagtacaggaaacttaataacaggattggctgctggtgccaaaacctacaagatgtccatggccaacagagggcagaatcagcctgttttgaatatcacaaacaaacaggctttcattactgctcagaatcatggctatgccttggacaacaccctccctgctggctggaaaccactttttgtgaatgtcaacgatcaaacaaatgaggggattatgcatgagagcaaacccttcttcgctgtgcagttccacccagaggtcaccccggggccaatagacactgagtacctgtttgattcctttttctcactgataaagaaaggaaaagctaccaccattacatcagtcttaccgaagccagcactagttgcatctcgggttgaggtttccaaagtccttattctaggatcaggaggtctgtccattggtcaggctggagaatttgattactcaggatctcaagctgtaaaagccatgaaggaagaaaatgtcaaaactgttctgatgaacccaaacattgcatcagtccagaccaatgaggtgggcttaaagcaagcggatactgtctactttcttcccatcacccctcagtttgtcacagaggtcatcaaggcagaacagccagatgggttaattctgggcatgggtggccagacagctctgaactgtggagtggaactattcaagagaggtgtgctcaaggaatatggtgtgaaagtcctgggaacttcagttgagtccattatggctacggaagacaggcagctgttttcagataaactaaatgagatcaatgaaaagattgctccaagttttgcagtggaatcgattgaggatgcactgaaggcagcagacaccattggctacccagtgatgatccgttccgcctatgcactgggtgggttaggctcaggcatctgtcccaacagagagactttgatggacctcagcacaaaggcctttgctatgaccaaccaaattctggtggagaagtcagtgacaggttggaaagaaatagaatatgaagtggttcgagatgctgatgacaattgtgtcactgtctgtaacatggaaaatgttgatgccatgggtgttcacacaggtgactcagttgttgtggctcctgcccagacactctccaatgccgagtttcagatgttgagacgtacttcaatcaatgttgttcgccacttgggcattgtgggtgaatgcaacattcagtttgcccttcatcctacctcaatggaatactgcatcattgaagtgaatgccagactgtcccgaagctctgctctggcctcaaaagccactggctacccattggcattcattgctgcaaagattgccctaggaatcccacttccagaaattaagaacgtcgtatccgggaagacatcagcctgttttgaacctagcctggattacatggtcaccaagattccccgctgggatcttgaccgttttcatggaacatctagccgaattggtagctctatgaaaagtgtaggagaggtcatggctattggtcgtacctttgaggagagtttccagaaagctttacggatgtgccacccatctatagaaggtttcactccccgtctcccaatgaacaaagaatggccatctaatttagatcttagaaaagagttgtctgaaccaagcagcacgcgtatctatgccattgccaaggccattgatgacaacatgtcccttgatgagattgagaagctcacatacattgacaagtggtttttgtataagatgcgtgatattttaaacatggaaaagacactgaaaggcctcaacagtgagtccatgacagaagaaaccctgaaaagggcaaaggagattgggttctcagataagcagatttcaaaatgccttgggctcactgaggcccagacaagggagctgaggttaaagaaaaacatccacccttgggttaaacagattgatacactggctgcagaatacccatcagtaacaaactatctctatgttacctacaatggtcaggagcatgatgtcaattttgatgaccatggaatgatggtgctaggctgtggtccatatcacattggcagcagtgtggaatttgattggtgtgctgtctctagtatccgcacactgcgtcaacttggcaagaagacggtggtggtgaattgcaatcctgagactgtgagcacagactttgatgagtgtgacaaactgtactttgaagagttgtccttggagagaatcctagacatctaccatcaggaggcatgtggtggctgcatcatatcagttggaggccagattccaaacaacctggcagttcctctatacaagaatggtgtcaagatcatgggcacaagccccctgcagatcgacagggctgaggatcgctccatcttctcagctgtcttggatgagctgaaggtggctcaggcaccttggaaagctgttaatactttgaatgaagcactggaatttgcaaagtctgtggactacccctgcttgttgaggccttcctatgttttgagtgggtctgctatgaatgtggtattctctgaggatgagatgaaaaaattcctagaagaggcgactagagtttctcaggagcacccagtggtgctgacaaaatttgttgaaggggcccgagaagtagaaatggacgctgttggcaaagatggaagggttatctctcatgccatctctgaacatgttgaagatgcaggtgtccactcgggagatgccactctgatgctgcccacacaaaccatcagccaaggggccattggtgaaggatgctacccggaagattgcaaaggcttttgccatctctggtccattcaacgtccaatttcttgtcaaaggaaatgatgtcttggtgattgagtgtaacttgagagcttctcgatccttcccctttgtttccaagactcttggggttgacttcattgatgtggccaccaaggtgatgattggagagaatgttgatgagaaacatcttccaacattggaccatcccataattcctgctgactatgttgcaattaaggctcccatgttttcctggccccggttgagggatgctgaccccattctgagatgtgagatggcttccactggagaggtggcttgctttggtgaaggtattcatacagccttcctaaaggcaatgctttccacaggatttaagataccccagaaaggcatcctgataggcatccagcaatcattccggccaagattccttggtgtggctgaacaattacacaatgaaggtttcaagctgtttgccacggaagccacatcagactggctcaacgccaacaatgtccctgccaccccagtggcatggccgtctcaagaaggacagaatcccagcctctcttccatcagaaaattgattagagatggcagcattgacctagtgattaaccttcccaacaacaacactaaatttgtccatgataattatgtgattcggaggacagctgttgatagtggaatccctctcctcactaattttcaggtgaccaaactttttgctgaagctgtgcagaaatctcgcaaggtggactccaagagtcttttccactacaggcagtacagtgctggaaaagcagcatagagatgcagacaccccagccccattattaaatcaacctgagccacatgttatctaaaggaactgattcacaactttctcagagatgaatattgataactaaacttcatttcagtttactttgttatgccttaatattctgtgtcttttgcaattaaattgtcagtcacttcttcaaaactgtatttttggtggactaggcttgcctatgtgcttatgtgtagctttttactttttatggtgctgattaatggtgatcaaggtaggaaaagttgctgttctattttctgaactctttctatactttaagatactctatttttaaaacactatctgcaaactcaggacactttaacagggcagaatactctaaaaacttgataaaattaaatatagatttaatttatgaaccttccatcatgatgtttgtgtattgcttctttttggatcctcattctcacccatttggctaatccaggaatattgttatcccttcccattatattgaagttgagaaatgtgacagaggcatttagagtatggacttttcttttctttttctttttctttttttctttttgagatggagtcacactctccaggctggagtgcagtggcacaatctcggctcactgcaatttccgtctcccaagttcaagcgattctcctgctttagactatggatttctttaaggaatactggtttgcagttttgttttctggactatatcagcagatggtagacagtgtttatgtagatgtgttgttgtttttatcattggattttaacttggcccgagtgaaataatcagatttttgtcattcacactctcccccagttttggaataacttggaagtaaggttcattcccttaagacgatggattctgttgaactatggggtcccacactgcactattaattccacccactgtaagggcaaggacaccattccttctacatataagaaaaaagtctctccccaagggcagcctttgttacttttaaatattttctgttattacaagtgctctaattgtgaacttttaaataaaatactattaa

SEQ ID NO: 325952 - DNA, 2017 bp, Homo sapiens
ggcacgaggagaaattaaagacatccaaatttaaggtactgtgccttttagaaagttttcaaaaagtgaaggatgctacccggaagattgcaaaggcttttgccatctctggtccattcaacgtccaatttcttgtcaaaggaaatgatgtcttggtgattgagtgtaacttgagagcttctcgatccttcccctttgtttccaagactcttggggttgacttcattgatgtggccaccaaggtgatgattggagagaatgttgatgagaaacatcttccaacattggaccatcccataattcctgctgactatgttgcaattaaggctcccatgttttcctggccccggttgagggatgctgaccccattctgagatgtgagatggcttccactggagaggtggcttgctttggtgaaggtattcatacagccttcctaaaggcaatgctttccacaggatttaagataccccagaaaggcatcctgataggcatccagcaatcattccggccaagattccttggtgtggctgaacaattacacaatgaaggtttcaagctgtttgccacggaagccacatcagactggctcaacgccaacaatgtccctgccaccccagtggcatggccgtctcaagaaggacagaatcccagcctctcttccatcagaaaattgattagagatggcagcattgacctagtgattaaccttcccaacaacaacactaaatttgtccatgataattatgtgattcggaggacagctgttgatagtggaatccctctcctcactaattttcaggtgaccaaactttttgctgaagctgtgcagaaatctcgcaaggtggactccaagagtcttttccactacaggcagtacagtgctggaaaagcagcatagagatgcagacaccccagccccattattaaatcaacctgagccacatgttatctaaaggaactgattcacaactttctcagagatgaatattgataactaaacttcatttcagtttactttgttatgccttaatattctgtgtcttttgcaattaaattgtcagtcacttcttcaaaaccttacagtccttcctaagttactcttcatgagatttcatccatttactaatactgtatttttggtggactaggcttgcctatgtgcttatgtgtagctttttactttttatggtgctgattaatggtgatcaaggtaggaaaagttgctgttctattttctgaactctttctatactttaagatactctatttttaaaacactatctgcaaactcaggacactttaacagggcagaatactctaaaaacttgataaaattaaatatagatttaatttatgaaccttccatcatgatgtttgtgtattgcttctttttggatcctcattctcacccatttggctaatccaggaatattgttatcccttcccattatattgaagttgagaaatgtgacagaggcatttagagtatggacttttcttttctttttctttttctttttttctttttgagatggagtcacactctccaggctggagtgcagtggcacaatctcggctcactgcaatttccgtctcccaagttcaagcgattctcctgctttagactatggatttctttaaggaatactggtttgcagttttgttttctggactatatcagcagatggtagacagtgtttatgtagatgtgttgttgtttttatcattggattttaacttggcccgagtgaaataatcagatttttgtcattcacactctcccccagttttggaataacttggaagtaaggttcattcccttaagacgatggattctgttgaactatggggtcccacactgcactattaattccacccactgtaagggcaaggacaccattccttctacatataagaaaaaagtctctccccaagggcagcctttgttacttttaaatattttctgttattacaagtgctctaattgtgaacttttaaataaaatactattaa

SEQ ID NO: 325953 - DNA, 4313 bp, Homo sapiens
  misc_feature (4185)..(4185): n is a, c, g, or t
  misc_feature (4197)..(4197): n is a, c, g, or t
agatcgctgtgcagtcagccttaaacactgactgcacccctcccagatttcttttacattaactaaaaagtcttatcacacaatctcataaaatttatgtaatttcatttaattttagccacaaatcatcaaaatgacgaggattttgacagctttcaaagtggtgaggacactgaagactggttttggctttaccaatgtgactgcacaccaaaaatggaaattttcaagacctggcatcaggctcctttctgtcaaggcacagacagcacacattgtcctggaagatggaactaagatgaaaggttactcctttggccatccatcctctgttgctggtgaagtggtttttaatactggcctgggagggtacccagaagctattactgaccctgcctacaaaggacagattctcacaatggccaaccctattattgggaatggtggagctcctgatactactgctctggatgaactgggacttagcaaatatttggagtctaatggaatcaaggtttcaggtttgctggtgctggattatagtaaagactacaaccactggctggctaccaagagtttagggcaatggctacaggaagaaaaggttcctgcaatttatggagtggacacaagaatgctgactaaaataattcgggataagggtaccatgcttgggaagattgaatttgaaggtcagcctgtggattttgtggatccaaataaacagaatttgattgctgaggtttcaaccaaggatgtcaaagtgtacggcaaaggaaaccccacaaaagtggtagctgtagactgtgggattaaaaacaatgtaatccgcctgctagtaaagcgaggagctgaagtgcacttagttccctggaaccatgatttcaccaagatggagtatgatgggattttgatcgcgggaggaccggggaacccagctcttgcagaaccactaattcagaatgtcagaaagattttggagagtgatcgcaaggagccattgtttggaatcagtacaggaaacttaataacaggattggctgctggtgccaaaacctacaagatgtccatggccaacagagggcagaatcagcctgttttgaatatcacaaacaaacaggctttcattactgctcagaatcatggctatgccttggacaacaccctccctgctggctggaaaccactttttgtgaatgtcaacgatcaaacaaatgaggggattatgcatgagagcaaacccttcttcgctgtgcagttccacccagaggtcaccccggggccaatagacactgagtacctgtttgattcctttttctcactgataaagaaaggaaaagctaccaccattacatcagtcttaccgaagccagcactagttgcatctcgggttgaggtttccaaagtccttattctaggatcaggaggtctgtccattggtcaggctggagaatttgattactcaggatctcaagctgtaaaagccatgaaggaagaaaatgtcaaaactgttctgatgaacccaaacattgcatcagtccagaccaatgaggtgggcttaaagcaagcggatactgtctactttcttcccatcacccctcagtttgtcacagaggtcatcaaggcagaacagccagatgggttaattctgggcatgggtggccagacagctctgaactgtggagtggaactattcaagagaggtgtgctcaaggaatatggtgtgaaagtcctgggaacttcagttgagtccattatggctacggaagacaggcagctgttttcagataaactaaatgagatcaatgaaaagattgctccaagttttgcagtggaatcgattgaggatgcactgaaggcagcagacaccattggctacccagtgatgatccgttccgcctatgcactgggtgggttaggctcaggcatctgtcccaacagagagactttgatggacctcagcacaaaggcctttgctatgaccaaccaaattctggtggagaagtcagtgacaggttggaaagaaatagaatatgaagtggttcgagatgctgatgacaattgtgtcactgtctgtaacatggaaaatgttgatgccatgggtgttcacacaggtgactcagttgttgtggctcctgcccagacactctccaatgccgagtttcagatgttgagacgtacttcaatcaatgttgttcgccacttgggcattgtgggtgaatgcaacattcagtttgcccttcatcctacctcaatggaatactgcatcattgaagtgaatgccagactgtcccgaagctctgctctggcctcaaaagccactggctacccattggcattcattgctgcaaagattgccctaggaatcccacttccagaaattaagaacgtcgtatccgggaagacatcagcctgttttgaacctagcctggattacatggtcaccaagattccccgctgggatcttgaccgttttcatggaacatctagccgaattggtagctctatgaaaagtgtaggagaggtcatggctattggtcgtacctttgaggagagtttccagaaagctttacggatgtgccacccatctatagaaggtttcactccccgtctcccaatgaacaaagaatggccatctaatttagatcttagaaaagagttgtctgaaccaagcagcacgcgtatctatgccattgccaaggccattgatgacaacatgtcccttgatgagattgagaagctcacatacattgacaagtggtttttgtataagatgcgtgatattttaaacatggaaaagacactgaaaggcctcaacagtgagtccatgacagaagaaaccctgaaaagggcaaaggagattgggttctcagataagcagatttcaaaatgccttgggctcactgaggcccagacaagggagctgaggttaaagaaaaacatccacccttgggttaaacagattgatacactggctgcagaatacccatcagtaacaaactatctctatgttacctacaatggtcaggagcatgatgtcaattttgatgaccatggaatgatggtgctaggctgtggtccatatcacattggcagcagtgtggaatttgattggtgtgctgtctctagtatccgcacactgcgtcaacttggcaagaagacggtggtggtgaattgcaatcctgagactgtgagcacagactttgatgagtgtgacaaactgtactttgaagagttgtccttggagagaatcctagacatctaccatcaggaggcatgtggtggctgcatcatatcagttggaggccagattccaaacaacctggcagttcctctatacaagaatggtgtcaagatcatgggcacaagccccctgcagatcgacagggctgaggatcgctccatcttctcagctgtcttggatgagctgaaggtggctcaggcaccttggaaagctgttaatactttgaatgaagcactggaatttgcaaagtctgtggactacccctgcttgttgaggccttcctatgttttgagtgggtctgctatgaatgtggtattctctgaggatgagatgaaaaaattcctagaagaggcgactagagtttctcaggagcacccagtggtgctgacaaaatttgttgaaggggcccgagaagtagaaatggacgctgttggcaaagatggaagggttatctctcatgccatctctgaacatgttgaagatgcaggtgtccactcgggagatgccactctgatgctgcccacacaaaccatcagccaaggggccattgcattcaacgtccaatttcttgtcaaaggaaatgatgtcttggtgattgagtgtaacttgagagcttctcgatccttcccctttgtttccaagactcttggggttgacttcattgatgtggccaccaaggtgatgattggagagaatgttgatgagaaacatcttccaacattggaccatcccataattcctgctgactatgttgcaattaaggctcccatgttttcctggccccggttgagggatgctgaccccattctgagatgtgagatggcttccactggagaggtggcttgctttggtgaaggtattcatacagccttcctaaaggcaatgctttccacaggatttaagataccccagaaaggcatcctgataggcatccagcaatnattccgccagantccttggggggctgaacaatacacatgaaggttaaagtggttgcacggagccaattctgtttaacccaccaatgtctgcacccagggcatggcctttaggaaggagccccctcttt

SEQ ID NO: 325954 - DNA, 1037 bp, Homo sapiens
gcggccgcagtggaaggagcaggcgcttgagctcgagcgacggcgctggcggagacgccggctgctcctcccctccccgccggtgagtgagcgcccccgccccggacgctggcggcggtcgcggccccctcacggccctccgcggtgggtggggacagtcgtgagggagcgtggcctggcggcgcagcggacgcgggcctggcctcccgctcgcggcctgtcggggctgggacctgccgtcgcccccgttcgaggttgaagccccgggcctaggactcgacccccagcatcccacggggcctctttcctttcccggctcattccgctgtcattttgacctggggttcccctccagcccctcgcctcgttcccttcccagcatcccagggccgaggtgagggaggggcgtgtgagaagtcgggccgaggcccgagggactgtttaggagccggttcccgtcggaatctggggttttaggagccctcgatcgccatggcgtcccagaagttagccaccaggactcagccatttccacctgaaaccagttttgcacctattgttttgattttgaactgtctttcgaggggaggagggagcccggcgtactggggagaatatgtggtgggaggtgggatgtgaggaggagctggctgggcttggtctcggcctcaggatgccccctgttaacccctgtaggataggggaaagaggtgcagcgagttgcaccttccctaaagggccagagattcgtttatagcttgcgaatctctgctttttcagcctcggtaaaggggtatcatttgtggttggtttggttcgtcccttaacaacattcttggtgaggaatccccaggtgaatctgccacggagtgaagcagcccacttgagctgttggctacccccggcccccgcaacgcccgttggcttttgtgacacgttacacgttagtgttggtagagcctagccgtcagaggtacctgtaccataagcatctctacgaaaggtgtgaattcctaaattagcttattctgttctta

SEQ ID NO: 325955 - DNA, 435 bp, Homo sapiens
gcggccgcagtggaaggagcaggcgcttgagctcgagcgacggcgctggcggagacgccggctgctcctcccctccccgccggtattaatctctggagaagacacatccacagttagcactttcttcagatgctgacgctcggtgaacagttgcctttggtcacaagatttagaagacacagtgtccatcctcccagattggatctctttttcatatggatcttctgtttctatgtctttttaaaaaataactttttgggaaaccttttggattacaactgttcatcctcacctatgcaaagaaagggaagctattgctgggattttgaggagcttttcctaaaaggattgtacaccttagaagtgcttaaggaagagtgatgaaggcaagtatccaactctttgtagtcagtgaaatttaacttggttcatgtc

SEQ ID NO: 325956 - DNA, 486 bp, Homo sapiens
gcggccgcagtggaaggagcaggcgcttgagctcgagcgacggcgctggcggagacgccggctgctcctcccctccccgccggtattaatctctggagaagacacatccacagttagcactttcttcagatgctgacgctcggtgaacagttgcctttggtcacaagatttagaagacacagtgtccatcctcccagattggatctctttttcatatggatcttctgtttctatgtctttttaaaaaataactttttgggaaaccttttggattacaactgttcatcctcacctatgcaaagaaagggaagctattgctgggattttgaggaggcagtccgttgccactgggcagtatagatatgttgtccagcctgccatcactggactgtagttaaggtggatgtcttgtccagtctgctgccactgggctgtatgtaaggaggttcttctgtccaccccaccgctactggactctcttccctg

SEQ ID NO: 325957 - DNA, 596 bp, Homo sapiens
gcggccgcagtggaaggagcaggcgcttgagctcgagcgacggcgctggcggagacgccggctgctcctcccctccccgccgcttttcctaaaaggattgtacaccttagaagtgcttaaggaagagtgatgaagctctgaatcgtgtcctgcagcagattcgagtgccacccaagatgaagagagggacaagcttgcatagtaggcggggcaagccagaggccccaaagggaagtccccaaatcaacaggaagtctggtcaggagatgacagctgttatgcagtcaggccgacccaggtcttcatccacaactgatgcacctaccggctctgctatgatggaaatagcttgtgctgctgctgctgctgctgctgcatgtctaccaggagaggagggaactgcggagcggatcgaacggttggaagtaagcagccttgcccaaacatccagtgcagtggcctccagtaccgatggcagcatccacacagactctgtggatggaacaccagaccctcagcgcacaaaggctgccattgctcacctgcagcagaagatcctgaagctcacagaacaaatcaagattgcacaaacagcc

SEQ ID NO: 325958 - DNA, 1706 bp, Homo sapiens
gcggccgcagtggaaggagcaggcgcttgagctcgagcgacggcgctggcggagacgccggctgctcctcccctccccgccggtattaatctctggagaagacacatccacagttagcactttcttcagatgctgacgctcggtgaacagttgcctttggtcacaagatttagaagacacagtgtccatcctcccagattggatctctttttcatatggatcttctgtttctatgtctttttaaaaaataactttttgggaaaccttttggattacaactgttcatcctcacctatgcaaagaaagggaagctattgctgggattttgaggagatggtcctagaacaattggagattcatacgcacacaaagaacctcaacccttacctcacaccagacacaaaagctaccttcaaataaatcataggcctaacttgaagagctaaaaccatgcaactccagaaagtttttgtcagaaagaaaatacaggagaaaatcttagtgaccttggggtaggcaaagatttcttaagacacaaaaagcatgaagtataaaggggaaaaaatcgctaaattggatttcatccaagttaaaaacttttaatctttgaaagatacctttaagaaaatgaaaaagtacgccttgggctgggagaaaatatttgcagaacgtgtgtctgacagaggatgtgtatctagaagatataaagaattgtaactcaagaattgaaagacaaccccataagaaaagggggaaacaatttgaataaagttcatcaaagaatataaatggcaaataagcacatgaaaagatgcccaaagtcgtaagtcattagggaaatataaatttaaaccataatgagataccactgcatactccctagaatggctgtaatgaataggattagtcacatggtgacaagaatggaggatcatctggaactctcatacactgacgataggaatgtgaaatggatcaactactttggaagacaattgggcagtttctttcaaagtaaatgtgaagatgccatacgattcatccattccatttctaattattcaagagaaatgaaactgtatatccacaaaaaagacttgtacacaaacattcacagcagctattatttattggtaatagctaaaaactgtaaacagctcccatatccatcaagtgtatggataaacaaatttggtgtatttatacaatggaatactactcggcaataaaaagaacagttgatactctcaacaacctagatggacctcaaaataattcggtttaatgaatgaagccaaacttaagaagagtacattgtatgtacttggagaactaacttcttgcaatagatttttaagcactattaggagcatatgacttaaacagtttttaaaagtcagggagtaagtatgcttaaataaaatacaatctgtgaaacaaatctctgaattattatcacttcactggacactctaacttgaccatatttctgactttaatgtaactcactcttattccgtagtcacatgtttgcttgctcattggttcacattacatttattcagcatctgcttgagccaaggcactgtaactacatgttttttttagttacctacttttgtaaggtcctgtttctttggctacatctgattacagtaaacataggaagtttaataaaacaattttcatgaccgaaaaaaaaaaat

SEQ ID NO: 325959 - DNA, 1455 bp, Homo sapiens
gcggccgcagtggaaggagcaggcgcttgagctcgagcgacggcgctggcggagacgccggctgctcctcccctccccgccgatggtcctagaacaattggagattcatacgcacacaaagaacctcaacccttacctcacaccagacacaaaagctaccttcaaataaatcataggcctaacttgaagagctaaaaccatgcaactccagaaagtttttgtcagaaagaaaatacaggagaaaatcttagtgaccttggggtaggcaaagatttcttaagacacaaaaagcatgaagtataaaggggaaaaaatcgctaaattggatttcatccaagttaaaaacttttaatctttgaaagatacctttaagaaaatgaaaaagtacgccttgggctgggagaaaatatttgcagaacgtgtgtctgacagaggatgtgtatctagaagatataaagaattgtaactcaagaattgaaagacaaccccataagaaaagggggaaacaatttgaataaagttcatcaaagaatataaatggcaaataagcacatgaaaagatgcccaaagtcgtaagtcattagggaaatataaatttaaaccataatgagataccactgcatactccctagaatggctgtaatgaataggattagtcacatggtgacaagaatggaggatcatctggaactctcatacactgacgataggaatgtgaaatggatcaactactttggaagacaattgggcagtttctttcaaagtaaatgtgaagatgccatacgattcatccattccatttctaattattcaagagaaatgaaactgtatatccacaaaaaagacttgtacacaaacattcacagcagctattatttattggtaatagctaaaaactgtaaacagctcccatatccatcaagtgtatggataaacaaatttggtgtatttatacaatggaatactactcggcaataaaaagaacagttgatactctcaacaacctagatggacctcaaaataattcggtttaatgaatgaagccaaacttaagaagagtacattgtatgtacttggagaactaacttcttgcaatagatttttaagcactattaggagcatatgacttaaacagtttttaaaagtcagggagtaagtatgcttaaataaaatacaatctgtgaaacaaatctctgaattattatcacttcactggacactctaacttgaccatatttctgactttaatgtaactcactcttattccgtagtcacatgtttgcttgctcattggttcacattacatttattcagcatctgcttgagccaaggcactgtaactacatgttttttttagttacctacttttgtaaggtcctgtttctttggctacatctgattacagtaaacataggaagtttaataaaacaattttcatgaccgaaaaaaaaaaat

SEQ ID NO: 325960 - DNA, 524 bp, Homo sapiens
gcggccgcagtggaaggagcaggcgcttgagctcgagcgacggcgctggcggagacgccggctgctcctcccctccccgccggtattaatctctggagaagacacatccacagttagcactttcttcagatgctgacgctcggtgaacagttgcctttggtcacaagatttagaagacacagtgtccatcctcccagattggatctctttttcatatggatcttctgtttctatgtctttttaaaaaataactttttgggaaaccttttggattacaactgttcatcctcacctatgcaaagaaagggaagctattgctgggattttgaggaggtaggatgaattggacaaggatgagactcgtgtaggtgaggacagttggaaggatcatgatgtcgtaatcttggagttaggtgaaacagcttttcctaaaaggattgtacaccttagaagtgcttaaggaagagtgatgaaggcaagtatccaactctttgtagtcagtgaaatttaacttggttcatgtc

SEQ ID NO: 325961 - DNA, 421 bp, Homo sapiens
gcggccgcagtggaaggagcaggcgcttgagctcgagcgacggcgctggcggagacgccggctgctcctcccctccccgccggtattaatctctggagaagacacatccacagttagcactttcttcagatgctgacgctcggtgaacagttgcctttggtcacaagatttagaagacacagtgtccatcctcccagattggatctctttttcatatggatcttctgtttctatgtctttttaaaaaataactttttgggaaaccttttggattacaactgttcatcctcacctatgcaaagaaagggaagctattgctgggattttgaggaggtatgtcgttttttcttctactgcaaaatcacatcacccaggcactcagaacagtataaaataattatactttcctctctataactca

SEQ ID NO: 325962 - DNA, 466 bp, Homo sapiens
atgatggaaatagcttgtgctgctgctgctgctgctgctgcatgtctaccaggagaggagggaactgcggagcgggtaagtttgtaagattttgtttttctgttaacttactgtttttcatacctaggactctccagactttcctttggtaactaaaaagatatctcagcaaataccttaaagttgtggtaaaagaatttttccccttttcaaatgggtaaataataattatagctaatgaatgaatgcttagaattatattcctatttccttcctaacatagtgctatattttattttatcctttcgttaaaaccttaagtatatttcatgtattctttctgtatatttgagggtcagttttatggtagagcaataaagatgctttgtttcttattgttttgattttgcacatggagatggctttcttacattaatgaatgtagtgaataaagttctagaatctg

SEQ ID NO: 325963 - DNA, 571 bp, Homo sapiens
ggaaatataaagaaggaagagaataggtgactgttgaagcgattacaggaggatttgatctgtgttctctatttgtaatgttgaagaagaaggctatcattgcaagtatgaaaaataacatggatgaaagcatggagatacttgaatcgtacatttgtgtttctgtgtttgtgagactagcccgccctacccatttgctgaccttttggagacaagcttagttttgagtaaggtcattttaagatatgtagagtggactttgagaggtagaattgaaacaaaggaaatgaagaagtgtttttttttttttaactcataggtaggatgaattggacaaggatgagactcgtgtaggtgaggacagttggaaggatcatgatgtcgtaatcttggagttaggtgaaacaggtatcaaaaaataacttttcctgtcctatagtgagaataaacatttataaaaatattgttgataaagaatttgtttttctttagtatttgtttttcaaaagtatttcatttgtttttcaaaagtatttcaagtttcaaacaggaactttaaaaaatctgtagc

SEQ ID NO: 325964 - DNA, 519 bp, Homo sapiens
gcggccgcagtggaaggagcaggcgcttgagctcgagcgacggcgctggcggagacgccggctgctcctcccctccccgccggtattaatctctggagaagacacatccacagttagcactttcttcagatgctgacgctcggtgaacagttgcctttggtcacaagatttagaagacacagtgtccatcctcccagattggatctctttttcatatggatcttctgtttctatgtctttttaaaaaataactttttgggaaaccttttggattacaactgttcatcctcacctatgcaaagaaagggaagctattgctgggattttgaggagatcgaacggttggaagtaagcagccttgcccaaacatccagtgcagtggcctccagtaccgatggcagcatccacacagactctgtggatggaacaccagaccctcagcgcacaaaggctgccattgctcacctgcagcagaagatcctgaagctcacagaacaaatcaagattgcacaaacagcc

SEQ ID NO: 325965 - DNA, 271 bp, Homo sapiens
ggaggttgcagtgagccgagattgcaccacggcactctagtctgggcgacaaagcaaaactctgtctcaaaaaaaaaaaaaaaaaaagaagaagaagaaacagatgtatcctcccttcatggccatttacctcccttacctgtgtttctcaaatccaataccatcaccaggtacacaagcaggaaacccaaactctacttcctgtccaacagtgtcatcaacataatctgaaggttgtgccttccaagggggggggggggggggggaattc

SEQ ID NO: 325966 - DNA, 980 bp, Homo sapiens
ggaggttgcagtgagccgagattgcaccacggcactctagtctgggcgacaaagcaaaactctgtctcaaaaaaaaaaaaaaaaaaagaagaagaagaaacagatgtatcctcccttcatggccatttacctcccttacctgtgtttctcaaatccaataccatcaccaggtacacaagcaggaaacccaaactctacttcctgtccaacagtgtcatcaacataatctgaaggttgtgccttccaaatgtgagccatgactcaatcatttcagtccacacagtagttaccatatattagatacctccaatatcaacgcttccccagatatttgcatctatgtgtccagctgcccatttaatagctccactaagtagtatctaatacatttcagaatcttaatatgggtgtgatattgtgaaatatatatttggtcatctccttttctggcatgcaactcctaaaattcatgaaattctcaaatttataagtgactttgaatggcaatgagttgactgatggttggaaacccctagataacttcagaatggagaccggtcagggaaaagagactatgtcaggattcgaggtctggaaatttcagccccataccccaatctccagaaaggggagagggggccaaaggttaagctgatcagcattggccaatgatttaattaatcatgcctatgtaataaagcctccataaaaccccataaagacagggtctggggagcttccaaatagccaaacacatggaagttcctggatggtggtgtgcctgaagatcataaaagctctgggtcgcttccccttatgcatctcttcatctgtaacctttgtaataaatactctttaaaataaactggcaaattaaagcatctcctgaggttctgtgactggctctagcaatttaatggaagccgaggaaggggtcatgggaacctgatttttatcaagtcagtcaaaggacaggtaaa

SEQ ID NO: 325967 - DNA, 628 bp, Homo sapiens
ggaggttgcagtgagccgagattgcaccacggcactctagtctgggcgacaaagcaaaactctgtctcaaaaaaaaaaaaaaaaaaagaagaagaagaaacagatgtatcctcccttcatggccatttacctcccttacctgtgtttctcaaatccaataccatcaccaggtacacaagcaggaaacccaaactctacttcctgtccaacagtgtcatcaacataatctgaaggttgtgccttccaaatgtgagccatgactcaatcatttcagtccacacagtagttaccatatattagatacctccaatatcaacgcttccccagatatttgcatctatgtgtccagctgcccatttaatagctccactaagtagtatctaatacatttcagaatcttaatatgggtgtgatattgtgaaatatatatttggtcatctccttttctggcatgcaactcctaaaattcatgaaattctcaaatttataagtgactttgaatggcaatgagttgactgatggttggaaacccctagataacttcagaatggagaccggtcagggaaaagagactatgtcaggattcgaggtctggaaatttcaggggggggggggggggggggaattc

SEQ ID NO: 325968 - DNA, 291 bp, Homo sapiens
ttgcaagtcatcaaagcttaagtcaatctgtggtgtgtctaacgggtactttgaagtgtatcaactaagctaaaatgctactagagataatacaccaaagttattctgagaagtaatgataagctctagccaaagccacactgtttgcttgcatctttcagtgtgtgacaacagatagagcttaaaataattttacaaggacaatggcatttgctaaatgcttgctaccaagtctttgaaatttctcattttctgttattcacttactctttacacattgggaagtaattg

SEQ ID NO: 325969 - DNA, 1505 bp, Homo sapiens
aggggcttctgatggcatcgcccagaaaatgctggaaccagaactggtcagagactttgaagggcacagcctggcgggctactccccaagggtctcaggtctctgcccacctgactaccctgcagcaaacgcttctctgtaacctgacttctcccttcagacctcagcctacaaccatcctcttcatgccaggaaccaactgcttctcagcctcggcttagggtcttaagttcaccagaagggatcggggtttgcgttgatattataaggaatcttcccagaaggagctgcccttcatccatccacaagaatacattgagttcatttagttcttgaccaggtaagaaaagaataaaggagaacaaatattaaatactcttttctaattgatgccttactactgttttgaagctgagccgaaatcaaattgatgtttacattttctatcaagtacacatgagctgtgggagtctagcatattcttgtccaaaagagagagactttcaaatgaattcctattcctcttggtcccctccacctattttggaggtctgcatgtggagttgtatgctattttccaaggtacctcatttaaaaaaaaaaaaaaaaaaaaactgcctctcatttgttcccttaaaacgtctctctctctcataaaactaagttatcattgaaatattaaacgatctgaagcgtcttttttttttcaaataaatgtcaaagatggtaatagtttgtaaatcagtaaatcctctgtccatctgcccattgtccatggtcctgataatagagccaagatggattttcacatgtaaggtgttagtccattaatccagccattaaaagtagttgggagattgaagattagatggtttctggagcaaccgaatttgcagctgccacaaaactagataaatagccacaactggagttattttttgatctcataaaccccaggaattacacacagaatggattgaaaagcagacaagcatcttgtgctattgcagagacttttctacccaggaagtgttgaatttttaaaagaaacttgatattggtgataaaggtatgaatgaacaactctcttacttgccctcgatgtttcaagatgcctggtgaaaccgagaggccacatggcatgtccaaggagacatgctttctgggttctatatgaatagagatggttttagcctgcaattgaaaaaaaaaaaaaaaaacggttgaagccttgctaactttttcccagagcattctgggttgatatttcacagtcaaacgttttggcatggaaaaaaaaaaaaaggcattttaaactcttagtgaattcaaagctctaaatccaaacaatggtgaacacatgtacataacatttcatgttttcagagatacgtatgcttatttaagtgcctttcatgttttaatcaatgtttgcagaatttatcttaaacctgagatgaattaaaaaatttttctccttcaataaaaactgctaatggcaaaaa

SEQ ID NO: 325970 - DNA, 729 bp, Homo sapiens
ctcaaggccaagaattcggcacgaaggaggagccctgaccgggacaggcacagagacttggaagagagaaatagacgctctagtgggcatcgagacagagagagagattctagagatagagagtctcgtagagagaaggaagaagcccgaggaaaggaaaagcctgaggtgacagacagggcaggtggtaacaaaaccgttgaacctcccattagccaagtgggaaatgtagacactgcttcagaacttgagaagggggtgtctgaggctgcagtcctaaagccttctgaagagttacctgctgaggctacctcatccgttgaacccgaaaaggattctggctcagcagcagaggctcctcgttagagactggaatttgtgaaaatgtgacagtgacacttcctggagtgtagagcttgaggtgtacagatgctgtattatatccgctcccgctgtactgcagccccgcgccagctggtggggaactgtaagcaatttgattgcttcccttctatttaaaaatagccacaaaataacaaaaaatactgaaaatatgaataaatattaccctttttgctgtaactttttaaaagttttgactttaaaaagtttacaaatcgtaattagaagtgctctctatttttttttttttttttaatttaagacaaggtaacggtgaaagctcctcaaaacaatagggatgtttttaataaactctattttcgtaac

SEQ ID NO: 325971 - DNA, 331 bp, Homo sapiens
gtgtttctcaaatgtatttggagtgggaagacagcttctaatgaaagctacaggagattttgacatactctttgaaaattggtattaccattactattttatttcccagtttattctggcctctacctgtattagatactttaaaaatgtctttgcaattgcttgccttaggttgttactaggcctcacactgggtttgtgacagagtggcaaactatgaaatttgaagattgtgggttgaattttattttgctttaagcgccacagaacacagctgaaactggagtgccatcttcggtggtgtttacatttttatttttgtcgtctttta

SEQ ID NO: 325972 - DNA, 221 bp, Homo sapiens
ttggggaatcacccccaaagagagatttgggtttaaaaccccccccaaaggattttatttttaaaaacccccggggtgaacccccacctcctataactccaccagtatccattcctcctcctcacactccaccaataagcatcccaaactgtaagcatgtttttttctttgtgtttgcttatcctcttggagctgggtgtaggaggataagcaaaaaaaaa

SEQ ID NO: 325973 - DNA, 4150 bp, Homo sapiens
cgcgcggcgtggactcgggccgctgccgccatcccgctggagagagggagagagaggcccgcccgctcgccggccgggccagtgtgagccagtgcgtgagggcgcggggggccgtgtcagcgagacgcagagcgcagccgccaccaccaaacggacatgttgaagaccagcgctgccgccgcctccttttcctcatcctgcgaacgggactgagagggggcccgccacctctccgcctctgcctcggccgcccgcctcgccgcttcgggcgcagcctcttcctgcccgggcctcggactccgccgctcgtcgcctccccccggccaccaggcccggctggtttcccagccccgctccgccgcggcgcgaggtctatgtgaccggcgggcccggagcagccgccgccgcagcgcgaacatggacgccgtcaacgccttcaaccaggagctcttttcgcttatggatatgaaacctcccatctctagagccaagatgattctcatcactaaagctgctattaaagctattaagctttataagcatgtagttcaaatagtagaaaagttcatcaaaaagtgtaaaccagaatacaaggttccgggattatatgtaattgactcaattgtgcgacagtctcgtcatcagtttggaactgataaagatgtttttgggccaagattctctaaaaacataactgccacattccaatatttatatctttgtccatctgaagataagagtaaaatagttcgtgtgctgaacctttggcaaaaaaatggagtgttcaaaattgaaattattcaacctcttttggacatggcagcgggaaccagtaatgcagccccagtagcagaaaatgttaccaataatgaaggctcacctccacctccagtaaaagtttcttctgaacctcccacacaagccactccaaactccgtcccagctgtaccacagttgcccagctctgatgcttttgctgctgtggctcagctgtttcagacaactcaaggccaacagcttcagcagatccttcagacttttcaacagcctccaaaaccacagtctcctgcccttgacaatgctgtgatggctcaggttcaggctatcacagctcagttaaagacaactcctacacaaccatctgaacaaaaagctgctttccccccacctgaacagaaaactgcatttgacaagaagttgcttgatagatttgactatgatgatgagccagaagctgtggaagaatcaaagaaagaggataccactgccgtcaccacgacagcacctgctgccgcagtaccccctgcacccaccgccaccgtgcctgctgctgctgcacccgctgctgcctctcctcctcctccacaggcaccatttggctttcctggagatggcatgcagcagccagcatacacacagcatcaaaatatggatcagtttcagccacgaatgatgggaatacaacaggatccaatgcaccatcaggttccacttcctcctaatggacaaatgccaggatttggacttcttcctacacctccatttcctcccatggctcagcctgtgattcctccaactccaccagtgcagcagcctttccaagcttcttttcaggcacaaaatgaaccacttacacagaagccgcatcagcaggaaatggaagtagaacaaccttgtattcaagaggttaagcgacatatgtctgataacagaaagtcaagatctaggtcagcatccaggtcaccaaaaaggaggcgatctagatctggttctagatctcgaaggtctcggcatcgacgttctcgatctcggtccagggatagacgccgacattctccccgatctcgatctcaagaaagacgggatcgagaaaaagagagagaacgtcgacaaaaaggcctccctcaagtgaaaccggaaactgcaagtgtttgcagtactaccctctgggtggggcagctggacaaaagaactactcagcaggatgttgccagtctcttggaagagtttggtccaattgaatcaattaatatgattcctcccaggggttgtgcctatattgttatggttcataggcaagatgcctatcgtgccctgcagaaactgagccgaggaaactataaagtgaaccagaaatccataaagattgcctgggccttaaacaaaggaataaaggcagattataagcagtattgggatgtagaacttggtgttacttatattccatgggacaaagtcaagcctgaggaactggagagtttttgtgaaggaggaatgttggacagtgacacacttaacccagattggaaaggaattcctaagaagcctgaaaatgaagttgctcaaaatggaggtgctgaaacctcacacacagaaccagtatcacccatacctaaaccattacctgtgcctgtccctcctattcctgttcctgcacctataacagtgccacctccacaggtcccaccacatcaaccgggtccacctgtagttggtgctctccagccgcctgctttcacgcctcctctgggaataccgcctccaggctttggtcctggtgttcctcctccccctcctcctccaccatttttgcgcccaggattcaacccaatgcatttaccaccaggttttctgcctcctggacccccacctcctataactccaccagtatccattcctcctcctcacactccaccaataagcatcccaaactggggctagaggaaacgccgagtctggtgacagcgtgaaaatgtatggctctgccgtgccacctgctgcacccacgaatctgcccacccctcctgtaacccagcctgtttcacttcttggcactcaaggagttgcccctggtcctgtaattggacttcaggcaccatctactggtcttcttggcgcccggcccggtctcatcccactccagcgccctccaggaatgcccccacctcacttacagcggttccctttgatgccgccccgtcccatgccaccgcacatgatgcacagaggcccaccgccaggaccagggggctttgcgatgcctccacctcatggaatgaaaggtcccttcccaccgcatggcccctttgttaggcctggtggaatgccagggctcgggggcccagggccaggcccagggggtcctgaagacagagacggaaggcaacagccgccgcagcagccacagcagcagccacagccgcaggcgccccagcaaccacagcagcagcagcagcagcagccaccaccatcacaacagcctccaccaacacagcagcagccacagcagtttagaaatgataacaggcagcagttcaattcaggtagagaccaagaaaggtttggaagaagatcttttggaaatagggtggaaaatgaccgggaacggtatgggaaccgtaatgatgatagagataatagtaaccgtgacaggagagagtggggaaggaggagccctgaccgggacaggcacagagacttggaagagagaaatagacgctctagtgggcatcgagacagagagagagattctagagatagagagtctcgtagagagaaggaagaagcccgaggaaaggaaaagcctgaggtgacagacagggcaggtggtaacaaaaccgttgaacctcccattagccaagtgggaaatgtagacactgcttcagaacttgagaagggggtgtctgaggctgcagtcctaaagccttctgaagagttacctgctgaggctacctcatccgttgaacccgaaaaggattctggctcagcagcagaggctcctcgttagagactggaatttgtgaaaatgtgacagtgacacttcctggagtgtagagcttgaggtgtacagatgctgtattatatccgctcccgctgtactgcagccccgcgccagctggtggggaactgtaagcaatttgattgcttcccttctatttaaaaatagccacaaaataacaaaaaatactgaaaatatgaataaatattaccctttttgctgtaactttttaaaagttttgactttaaaaagtttacaaatcgtaattagaagtgctctctatttttttttttttttttaatttaagacaaggtaacggtgaaagctcctcaaaacaatagggatgtttttaataaactctattttcgtaac

SEQ ID NO: 325974 - DNA, 2405 bp, Homo sapiens
cgctggattgcactgcaaaaagattttgtctgatgttaagtaattacaaggcacccctagacttggaaaagtagtccccagtatactactaggctattcagggaacttcagcctttccctgttaaactttttccttttctctaagttttatgttggctgggttgggtgagagttggtaaggagaagatgccagtgaaatttccatcctaggacaaagtgagaattaaagggtaaccagttctgtagtgagaataaggctttgaatgagatccaagcctagctggtccagattgctcccttggtgcccgagtcggaatggatagaatgatagagaataataccctcaagacttacgaccttgctttgttttctttttatattttcactaatggtgaaatagattgcctgggccttaaacaaaggaataaaggcagattataagcagtattgggatgtagaacttggtgttacttatattccatgggacaaagtcaagcctgaggaactggagagtttttgtgaaggaggaatgttggacagtgacacacttaacccagattggaaaggaattcctaagaagcctgaaaatgaagttgctcaaaatggaggtgctgaaacctcacacacagaaccagtatcacccatacctaaaccattacctgtgcctgtccctcctattcctgttcctgcacctataacagtgccacctccacaggtcccaccacatcaaccgggtccacctgtagttggtgctctccagccgcctgctttcacgcctcctctgggaataccgcctccaggctttggtcctggtgttcctcctccccctcctcctccaccatttttgcgcccaggattcaacccaatgcatttaccaccaggttttctgcctcctggacccccacctcctataactccaccagtatccattcctcctcctcacactccaccaataagcatcccaaactggggctagaggaaacgccgagtctggtgacagcgtgaaaatgtatggctctgccgtgccacctgctgcacccacgaatctgcccacccctcctgtaacccagcctgtttcacttcttggcactcaaggagttgcccctggtcctgtaattggacttcaggcaccatctactggtcttcttggcgcccggcccggtctcatcccactccagcgccctccaggaatgcccccacctcacttacagcggttccctttgatgccgccccgtcccatgccaccgcacatgatgcacagaggcccaccgccaggaccagggggctttgcgatgcctccacctcatggaatgaaaggtcccttcccaccgcatggcccctttgttaggcctggtggaatgccagggctcgggggcccagggccaggcccagggggtcctgaagacagagacggaaggcaacagccgccgcagcagccacagcagcagccacagccgcaggcgccccagcaaccacagcagcagcagcagcagcagccaccaccatcacaacagcctccaccaacacagcagcagccacagcagtttagaaatgataacaggcagcagttcaattcaggtagagaccaagaaaggtttggaagaagatcttttggaaatagggtggaaaatgaccgggaacggtatgggaaccgtaatgatgatagagataatagtaaccgtgacaggagagagtggggaaggaggagccctgaccgggacaggcacagagacttggaagagagaaatagacgctctagtgggcatcgagacagagagagagattctagagatagagagtctcgtagagagaaggaagaagcccgaggaaaggaaaagcctgaggtgacagacagggcaggtggtaacaaaaccgttgaacctcccattagccaagtgggaaatgtagacactgcttcagaacttgagaagggggtgtctgaggctgcagtcctaaagccttctgaagagttacctgctgaggctacctcatccgttgaacccgaaaaggattctggctcagcagcagaggctcctcgttagagactggaatttgtgaaaatgtgacagtgacacttcctggagtgtagagcttgaggtgtacagatgctgtattatatccgctcccgctgtactgcagccccgcgccagctggtggggaactgtaagcaatttgattgcttcccttctatttaaaaatagccacaaaataacaaaaaatactgaaaatatgaataaatattaccctttttgctgtaactttttaaaagttttgactttaaaaagtttacaaatcgtaattagaagtgctctctatttttttttttttttttaatttaagacaaggtaacggtgaaagctcctcaaaacaatagggatgtttttaataaactctattttcgtaac

SEQ ID NO: 325975 - DNA, 3955 bp, Homo sapiens
cgcgcggcgtggactcgggccgctgccgccatcccgctggagagagggagagagaggcccgcccgctcgccggccgggccagtgtgagccagtgcgtgagggcgcggggggccgtgtcagcgagacgcagagcgcagccgccaccaccaaacggacatgttgaagaccagcgctgccgccgcctccttttcctcatcctgcgaacgggactgagagggggcccgccacctctccgcctctgcctcggccgcccgcctcgccgcttcgggcgcagcctcttcctgcccgggcctcggactccgccgctcgtcgcctccccccggccaccaggcccggctggtttcccagccccgctccgccgcggcgcgaggtctatgtgaccggcgggcccggagcagccgccgccgcagcgcgaacatggacgccgtcaacgccttcaaccaggagctcttttcgcttatggatatgaaacctcccatctctagagccaagatgattctcatcactaaagctgctattaaagctattaagctttataagcatgtagttcaaatagtagaaaagttcatcaaaaagtgtaaaccagaatacaaggttccgggattatatgtaattgactcaattgtgcgacagtctcgtcatcagtttggaactgataaagatgtttttgggccaagattctctaaaaacataactgccacattccaatatttatatctttgtccatctgaagataagagtaaaatagttcgtgtgctgaacctttggcaaaaaaatggagtgttcaaaattgaaattattcaacctcttttggacatggcagcgggaaccagtaatgcagccccagtagcagaaaatgttaccaataatgaaggctcacctccacctccagtaaaagtttcttctgaacctcccacacaagccactccaaactccgtcccagctgtaccacagttgcccagctctgatgcttttgctgctgtggctcagctgtttcagacaactcaaggccaacagcttcagcagatccttcagacttttcaacagcctccaaaaccacagtctcctgcccttgacaatgctgtgatggctcaggttcaggctatcacagctcagttaaagacaactcctacacaaccatctgaacaaaaagctgctttccccccacctgaacagaaaactgcatttgacaagaagttgcttgatagatttgactatgatgatgagccagaagctgtggaagaatcaaagaaagaggataccactgccgtcaccacgacagcacctgctgccgcagtaccccctgcacccaccgccaccgtgcctgctgctgctgcacccgctgctgcctctcctcctcctccacaggcaccatttggctttcctggagatggcatgcagcagccagcatacacacagcatcaaaatatggatcagtttcagccacgaatgatgggaatacaacaggatccaatgcaccatcaggttccacttcctcctaatggacaaatgccaggatttggacttcttcctacacctccatttcctcccatggctcagcctgtgattcctccaactccaccagtgcagcagcctttccaagcttcttttcaggcacaaaatgaaccacttacacagaagccgcatcagcaggaaatggaagtagaacaaccttgtattcaagaggttaagcgacatatgtctgataacagaaagtcaagatctaggtcagcatccaggtcaccaaaaaggaggcgatctagatctggttctagatctcgaaggtctcggcatcgacgttctcgatctcggtccagggatagacgccgacattctccccgatctcgatctcaagaaagacgggatcgagaaaaagagagagaacgtcgacaaaaaggcctccctcaagtgaaaccggaaactgcaagtgtttgcagtactaccctctgggtggggcagctggacaaaagaactactcagcaggatgttgccagtctcttggaagagtttggtccaattgaatcaattaatatgattcctcccaggggttgtgcctatattgttatggttcataggcaagatgcctatcgtgccctgcagaaactgagccgaggaaactataaagtgaaccagaaatccataaagattgcctgggccttaaacaaaggaataaaggcagattataagcagtattgggatgtagaacttggtgttacttatattccatgggacaaagtcaagcctgaggaactggagagtttttgtgaaggaggaatgttggacagtgacacacttaacccagattggaaaggaattcctaagaagcctgaaaatgaagttgctcaaaatggaggtgctgaaacctcacacacagaaccagtatcacccatacctaaaccattacctgtgcctgtccctcctattcctgttcctgcacctataacagtgccacctccacaggtcccaccacatcaaccgggtccacctgtagttggtgctctccagccgcctgctttcacgcctcctctgggaataccgcctccaggctttggtcctggtgttcctcctccccctcctcctccaccatttttgcgcccaggattcaacccaatgcatttaccaccaggttttctgcctcctggacccccacctcctataactccaccagtatccattcctcctcctcacactccaccaataagcatcccaaactctactatcgctggtataaatgaagacactacaaaagacttatctattggaaatcccattccaacagtggtgtctggggctagaggaaacgccgagtctggtgacagcgtgaaaatgtatggctctgccgtgccacctgctgcacccacgaatctgcccacccctcctgtaacccagcctgtttcacttcttggtaagttatttttttttatcattagttttccttgccccacccccccccacccccccacccatccccaagttagatttttttaaaaaaacaatgttaattttggtaaaattatttccaagactggcttttttggttgttttgtttgtttgtttgtttttgaggaagatcttcctcttaaagtcaaatatgtgtacttgatctttaccaagagagaatctcaaagacaaaatcatgtttgtctgtcttgaataaaagtttggatcttcacatccttatttggtatagaaaaatgattaaaagtaatctctgtgcaaaggaattggtacagagttcgtaattcacttaaccttagtctcttcccagcttttaggagatacttctttaacggcataggtttttctctgtctggaccaattattatctatctgaaacccctggacttgggtagcgttctttgtgggctagcaaagaaatcatctttgatacattccaataaaatggctttgttttctaagtaacagttgcgcagcctgaggtaccactttcccactcactctcagtttacttggctggagtttatctgttgtactttttacccacaacttcaatactgtgatcaagggcgatgtgacttagatcttttacatctttaagcaggcttactcttgcctgcttaagttatgaataaatacatcacatgcttgttacagtagaccatcttttaaattaacaaattgttgtatttgaagtggtattgccaaatataattaacacttgaatcccctaactggaagttaatatcttgagagtattacagtgttctagtcctgtgagcccatagtatttttcaaaggtatatgcatatgcctgtttgctttcataatctgagttgttttaggaaagaacctattgattacctctgagatgtaggactgtgagacattggtttgtaatggaggacttttacttttcacctatgctattcagtactgttggaattttttattttttgcatgtactatatttataataaaaaaacaatttgttttt

SEQ ID NO: 325976 - DNA, 2109 bp, Homo sapiens
ctttgaatgagaatccctgggattcttatcccagcaaacctgtcttgttgctattggggctagaggaaacgccgagtctggtgacagcgtgaaaatgtatggctctgccgtgccacctgctgcacccacgaatctgcccacccctcctgtaacccagcctgtttcacttcttggcactcaaggagttgcccctggtcctgtaattggacttcaggcaccatctactggtcttcttggcgcccggcccggtctcatcccactccagcgccctccaggaatgcccccacctcacttacagcggttccctttgatgccgccccgtcccatgccaccgcacatgatgcacagaggcccaccgccaggaccagggggctttgcgatgcctccacctcatggaatgaaaggtcccttcccaccgcatggcccctttgttaggcctggtggaatgccagggctcgggggcccagggccaggcccagggggtcctgaagacagagacggaaggcaacagccgccgcagcagccacagcagcagccacagccgcaggcgccccagcaaccacagcagcagcagcagcagcagccaccaccatcacaacagcctccaccaacacagcagcagccacagcagtttagaaatgataacaggcagcagttcaattcaggtagagaccaagaaaggtttggaagaagatcttttggaaatagggtggaaaatgaccgggaacggtatgggaaccgtaatgatgatagagataatagtaaccgtgacaggagagagtggggaaggaggagccctgaccgggacaggcacagagacttggaagagagaaatagacgctctagtgggcatcgagacagagagagagattctagagatagagagtctcgtagagagaaggaagaagcccgaggaaaggaaaagcctgaggtgacagacagggcaggtggtaacaaaaccgttgaacctcccattagccaagtgggaaatgtagacactgcttcagaacttgagaagggggtgtctgaggctgcagtcctaaagccttctgaagagttacctgctgaggctacctcatccgttgaacccgaaaaggattctggctcagcagcagaggctcctcgttagagactggaatttgtgaaaatgtgacagtgacacttcctggagtgtagagcttgaggtgtacagatgctgtattatatccgctcccgctgtactgcagccccgcgccagctggtggggaactgtaagcaatttgattgcttcccttctatttaaaaatagccacaaaataacaaaaaatactgaaaatatgaataaatattaccctttttgctgtaactttttaaaagttttgactttaaaaagtttacaaatcgtaattagaagtgctctctatttttttttttttttttaatttaagacaaggtaacggtgaaagctcctcaaaacaatagggatgtttttaataaactctattttcgtaacaaactttaatgtgtgctattcttcctacactgcattaaggtggaaaaggattgttcaccgtcaaagtttgagctgttaatactgtattggagtctaaattagacttatttgatgaaaatagacattttatgtagttattctcactttcatatgtaatacttttgatttttagtgctcagtcataaggtaaaggttagttgttttaatgtcaattgaaaagctgtgtttgcaattcaatcgaggttttctttttttttccattggctttgtggtatatgttgccctaatttgtaaggagattttgctgggtgaaaagttggatcccagtgttacacgttgtactataaattatcggactgcctgggtattacgttagaaggttgcgtgtgtgtgtgtgtgtgtctgtggttttttttttttccaaccatcccattgaatttttcaaaagggtaaaagaatcaaggttaacatttgcaacctaagagctttttgttgtgtttgaggacttcagtgcagcctactactgtttccttatataagccttgcctgttgcctttcttcaccagcgttttaattcccctgcggggcagaggtaaacgaacttttcccccacatat

SEQ ID NO: 325977 - DNA, 2784 bp, Homo sapiens
cgcgcggcgtggactcgggccgctgccgccatcccgctggagagagggagagagaggcccgcccgctcgccggccgggccagtgtgagccagtgcgtgagggcgcggggggccgtgtcagcgagacgcagagcgcagccgccaccaccaaacggacatgttgaagaccagcgctgccgccgcctccttttcctcatcctgcgaacgggactgagagggggcccgccacctctccgcctctgcctcggccgcccgcctcgccgcttcgggcgcagcctcttcctgcccgggcctcggactccgccgctcgtcgcctccccccggccaccaggcccggctggtttcccagccccgctccgccgcggcgcgaggtctatgtgaccggcgggcccggagcagccgccgccgcagcgcgaacatggacgccgtcaacgccttcaaccaggagctcttttcgcttatggatatgaaacctcccatctctagagccaagatgattctcatcactaaagctgctattaaagctattaagctttataagcatgtagttcaaatagtagaaaagttcatcaaaaagtgtaaaccagaatacaaggttccgggattatatgtaattgactcaattgtgcgacagtctcgtcatcagtttggaactgataaagatgtttttgggccaagattctctaaaaacataactgccacattccaatatttatatctttgtccatctgaagataagagtaaaatagttcgtgtgctgaacctttggcaaaaaaatggagtgttcaaaattgaaattattcaacctcttttggacatggcagcgggaaccagtaatgcagccccagtagcagaaaatgttaccaataatgaaggctcacctccacctccagtaaaagtttcttctgaacctcccacacaagccactccaaactccgtcccagctgtaccacagttgcccagctctgatgcttttgctgctgtggctcagctgtttcagacaactcaaggccaacagcttcagcagatccttcagacttttcaacagcctccaaaaccacagtctcctgcccttgacaatgctgtgatggctcaggttcaggctatcacagctcagttaaagacaactcctacacaaccatctgaacaaaaagctgctttccccccacctgaacagaaaactgcatttgacaagaagttgcttgatagatttgactatgatgatgagccagaagctgtggaagaatcaaagaaagaggataccactgccgtcaccacgacagcacctgctgccgcagtaccccctgcacccaccgccaccgtgcctgctgctgctgcacccgctgctgcctctcctcctcctccacaggcaccatttggctttcctggagatggcatgcagcagccagcatacacacagcatcaaaatatggatcagtttcagccacgaatgatgggaatacaacaggatccaatgcaccatcaggttccacttcctcctaatggacaaatgccaggatttggacttcttcctacacctccatttcctcccatggctcagcctgtgattcctccaactccaccagtgcagcagcctttccaagcttcttttcaggcacaaaatgaaccacttacacagaagccgcatcagcaggaaatggaagtagaacaaccttgtattcaagaggttaagcgacatatgtctgataacagaaagtcaagatctaggtcagcatccaggtcaccaaaaaggaggcgatctagatctggttctagatctcgaaggtctcggcatcgacgttctcgatctcggtccagggatagacgccgacattctccccgatctcgatctcaagaaagacgggatcgagaaaaagagagagaacgtcgacaaaaaggcctccctcaagtgaaaccggaaactgcaagtgtttgcagtactaccctctgggtggggcagctggacaaaagaactactcagcaggatgttgccagtctcttggaagagtttggtccaattgaatcaattaatatgattcctcccaggggttgtgcctatattgttatggttcataggcaagatgcctatcgtgccctgcagaaactgagccgaggaaactataaagtgaaccagaaatccataaagattgcctgggccttaaacaaaggaataaaggcagattataagcagtattgggatgtagaacttggtgttacttatattccatgggacaaagtcaagcctgaggaactggagagtttttgtgaaggaggaatgttggacagtgacacacttaacccagattggaaaggaattcctaagaagcctgaaaatgaagttgctcaaaatggaggtgctgaaacctcacacacagaaccagtatcacccatacctaaaccattacctgtgcctgtccctcctattcctgttcctgcacctataacagtgccacctccacaggtcccaccacatcaaccgggtccacctgtagttggtgctctccagccgcctgctttcacgcctcctctgggaataccgcctccaggctttggtcctggtgttcctcctccccctcctcctccaccatttttgcgcccaggattcaacccaatgcatttaccaccaggttttctgcctcctggacccccacctcctataactccaccagtatccattcctcctcctcacactccaccaataagcatcccaaactgtaagcatgtttttttctttgtgtttgcttatcctcttggagctgggtgtaggaggataagcaaaaaaaaa

SEQ ID NO: 325978 - DNA, 844 bp, Homo sapiens
catctacaaaaaaaccagttttttccaacttttatgtatatctttcactatcccagttctctttctggaagtactaatgcagttttctagaatttttaaaatgtatgtgagatttactatttaaacttgtggtgttgtaatatagttcatgaatattttgtgtaatgattttttaatgtaagctacagtgctgctcattatcaaatgtgaatctctttatgattgtaattttattttaagtttgcagtactaccctctgggtggggcagctggacaaaagaactactcagcaggatgttgccagtctcttggaagagtttggtccaattgaatcaattaatgtgagtgtttattcagttttttaagtacgatggacaggtgtgattaatgtcattttatgaaatggaggacctgagaccaaagttacaatttgcccaggtttatagatgtgactagaatttaggtgttcagagtccacgtttagaattatctgtatttaacatttcttagaattctttgtatttaacatttcttggataaccaagtttaatttcaaacatttctaggtaagtctttatataacaaagcttggaggactcagttgagaccaaacttgaattgccaacttagaaatgaatttaaccttacattatatagcatggggtgagggatgggattgttggaactgcttacttggtgttgtatcttgttgcttttcaattttgttatcttttataatattaaaatgttttggagcagatgattcctcccaggggttgtgcctatattgttatggttcataggcaagatgcctatcgtgccctgcagaaactgagccgaggaa

SEQ ID NO: 325979 - DNA, 233 bp, Homo sapiens
  misc_feature (9)..(9): n is a, c, g, or t
ttgactctngaggatccgtgatgttatccccaacacagcagcagccacagcagtttagaaatgataacaggcagcagttcaattcaggtagagaccaagaaaggtttggaagaagatcttttggaaatagggtggaaaatgaccgggaacggtatgggaaccgtaatgatgatagagataatagtaaccgtgacaggagagagtggggagtgttgggcgataacatcacgggt

SEQ ID NO: 325980 - DNA, 3574 bp, Homo sapiens
cacaatggtatgattttttgcacatgaaacagtcagagtttatgtgtattgaaggaatttttctataagaaggaaacttgagtttacatcttggaaggtatgattttctttccataattcctatttataataaaggtctgctcttctggtagttgttacagtataaactctagtgccacaatctctatattttatactttgttaaattggataaaatgttattttagcaaagaagcttaattaggaaaacttgtaggttaactttttttttaggccttaatgcccttttcttttttaggctcacctccacctccagtaaaagtttcttctgaacctcccacacaagccactccaaactccgtcccagctgtaccacagttgcccagctctgatgcttttgctgctgtggctcagctgtttcagacaactcaaggccaacagcttcagcagatccttcagacttttcaacagcctccaaaaccacagtctcctgcccttgacaatgctgtgatggctcaggttcaggctatcacagctcagttaaagacaactcctacacaaccatctgaacaaaaagctgctttccccccacctgaacagaaaactgcatttgacaagaagttgcttgatagatttgactatgatgatgagccagaagctgtggaagaatcaaagaaagaggataccactgccgtcaccacgacagcacctgctgccgcagtaccccctgcacccaccgccaccgtgcctgctgctgctgcacccgctgctgcctctcctcctcctccacaggcaccatttggctttcctggagatggcatgcagcagccagcatacacacagcatcaaaatatggatcagtttcagccacgaatgatgggaatacaacaggatccaatgcaccatcaggttccacttcctcctaatggacaaatgccaggatttggacttcttcctacacctccatttcctcccatggctcagcctgtgattcctccaactccaccagtgcagcagcctttccaagcttcttttcaggcacaaaatgaaccacttacacagaagccgcatcagcaggaaatggaagtagaacaaccttgtattcaagaggttaagcgacatatgtctgataacagaaagtcaagatctaggtcagcatccaggtcaccaaaaaggaggcgatctagatctggttctagatctcgaaggtctcggcatcgacgttctcgatctcggtccagggatagacgccgacattctccccgatctcgatctcaagaaagacgggatcgagaaaaagagagagaacgtcgacaaaaaggcctccctcaagtgaaaccggaaactgcaagtgtttgcagtactaccctctgggtggggcagctggacaaaagaactactcagcaggatgttgccagtctcttggaagagtttggtccaattgaatcaattaatatgattcctcccaggggttgtgcctatattgttatggttcataggcaagatgcctatcgtgccctgcagaaactgagccgaggaaactataaagtgaaccagaaatccataaagattgcctgggccttaaacaaaggaataaaggcagattataagcagtattgggatgtagaacttggtgttacttatattccatgggacaaagtcaagcctgaggaactggagagtttttgtgaaggaggaatgttggacagtgacacacttaacccagattggaaaggaattcctaagaagcctgaaaatgaagttgctcaaaatggaggtgctgaaacctcacacacagaaccagtatcacccatacctaaaccattacctgtgcctgtccctcctattcctgttcctgcacctataacagtgccacctccacaggtcccaccacatcaaccgggtccacctgtagttggtgctctccagccgcctgctttcacgcctcctctgggaataccgcctccaggctttggtcctggtgttcctcctccccctcctcctccaccatttttgcgcccaggattcaacccaatgcatttaccaccaggttttctgcctcctggacccccacctcctataactccaccagtatccattcctcctcctcacactccaccaataagcatcccaaactggggctagaggaaacgccgagtctggtgacagcgtgaaaatgtatggctctgccgtgccacctgctgcacccacgaatctgcccacccctcctgtaacccagcctgtttcacttcttggcactcaaggagttgcccctggtcctgtaattggacttcaggcaccatctactggtcttcttggcgcccggcccggtctcatcccactccagcgccctccaggaatgcccccacctcacttacagcggttccctttgatgccgccccgtcccatgccaccgcacatgatgcacagaggcccaccgccaggaccagggggctttgcgatgcctccacctcatggaatgaaaggtcccttcccaccgcatggcccctttgttaggcctggtggaatgccagggctcgggggcccagggccaggcccagggggtcctgaagacagagacggaaggcaacagccgccgcagcagccacagcagcagccacagccgcaggcgccccagcaaccacagcagcagcagcagcagcagccaccaccatcacaacagcctccaccaacacagcagcagccacagcagtttagaaatgataacaggcagcagttcaattcaggtagagaccaagaaaggtttggaagaagatcttttggaaatagggtggaaaatgaccgggaacggtatgggaaccgtaatgatgatagagataatagtaaccgtgacaggagagagtggggaaggaggagccctgaccgggacaggcacagagacttggaagagagaaatagacgctctagtgggcatcgagacagagagagagattctagagatagagagtctcgtagagagaaggaagaagcccgaggaaaggaaaagcctgaggtgacagacagggcaggtggtaacaaaaccgttgaacctcccattagccaagtgggaaatgtagacactgcttcagaacttgagaagggggtgtctgaggctgcagtcctaaagccttctgaagagttacctgctgaggctacctcatccgttgaacccgaaaaggattctggctcagcagcagaggctcctcgttagagactggaatttgtgaaaatgtgacagtgacacttcctggagtgtagagcttgaggtgtacagatgctgtattatatccgctcccgctgtactgcagccccgcgccagctggtggggaactgtaagcaatttgattgcttcccttctatttaaaaatagccacaaaataacaaaaaatactgaaaatatgaataaatattaccctttttgctgtaactttttaaaagttttgactttaaaaagtttacaaatcgtaattagaagtgctctctatttttttttttttttttaatttaagacaaggtaacggtgaaagctcctcaaaacaatagggatgtttttaataaactctattttcgtaac

SEQ ID NO: 325981 - DNA, 4841 bp, Homo sapiens
cgcgcggcgtggactcgggccgctgccgccatcccgctggagagagggagagagaggcccgcccgctcgccggccgggccagtgtgagccagtgcgtgagggcgcggggggccgtgtcagcgagacgcagagcgcagccgccaccaccaaacggacatgttgaagaccagcgctgccgccgcctccttttcctcatcctgcgaacgggactgagagggggcccgccacctctccgcctctgcctcggccgcccgcctcgccgcttcgggcgcagcctcttcctgcccgggcctcggactccgccgctcgtcgcctccccccggccaccaggcccggctggtttcccagccccgctccgccgcggcgcgaggtctatgtgaccggcgggcccggagcagccgccgccgcagcgcgaacatggacgccgtcaacgccttcaaccaggagctcttttcgcttatggatatgaaacctcccatctctagagccaagatgattctcatcactaaagctgctattaaagctattaagctttataagcatgtagttcaaatagtagaaaagttcatcaaaaagtgtaaaccagaatacaaggttccgggattatatgtaattgactcaattgtgcgacagtctcgtcatcagtttggaactgataaagatgtttttgggccaagattctctaaaaacataactgccacattccaatatttatatctttgtccatctgaagataagagtaaaatagttcgtgtgctgaacctttggcaaaaaaatggagtgttcaaaattgaaattattcaacctcttttggacatggcagcgggaaccagtaatgcagccccagtagcagaaaatgttaccaataatgaaggctcacctccacctccagtaaaagtttcttctgaacctcccacacaagccactccaaactccgtcccagctgtaccacagttgcccagctctgatgcttttgctgctgtggctcagctgtttcagacaactcaaggccaacagcttcagcagatccttcagacttttcaacagcctccaaaaccacagtctcctgcccttgacaatgctgtgatggctcaggttcaggctatcacagctcagttaaagacaactcctacacaaccatctgaacaaaaagctgctttccccccacctgaacagaaaactgcatttgacaagaagttgcttgatagatttgactatgatgatgagccagaagctgtggaagaatcaaagaaagaggataccactgccgtcaccacgacagcacctgctgccgcagtaccccctgcacccaccgccaccgtgcctgctgctgctgcacccgctgctgcctctcctcctcctccacaggcaccatttggctttcctggagatggcatgcagcagccagcatacacacagcatcaaaatatggatcagtttcagccacgaatgatgggaatacaacaggatccaatgcaccatcaggttccacttcctcctaatggacaaatgccaggatttggacttcttcctacacctccatttcctcccatggctcagcctgtgattcctccaactccaccagtgcagcagcctttccaagcttcttttcaggcacaaaatgaaccacttacacagaagccgcatcagcaggaaatggaagtagaacaaccttgtattcaagaggttaagcgacatatgtctgataacagaaagtcaagatctaggtcagcatccaggtcaccaaaaaggaggcgatctagatctggttctagatctcgaaggtctcggcatcgacgttctcgatctcggtccagggatagacgccgacattctccccgatctcgatctcaagaaagacgggatcgagaaaaagagagagaacgtcgacaaaaaggcctccctcaagtgaaaccggaaactgcaagtgtttgcagtactaccctctgggtggggcagctggacaaaagaactactcagcaggatgttgccagtctcttggaagagtttggtccaattgaatcaattaatatgattcctcccaggggttgtgcctatattgttatggttcataggcaagatgcctatcgtgccctgcagaaactgagccgaggaaactataaagtgaaccagaaatccataaagattgcctgggccttaaacaaaggaataaaggcagattataagcagtattgggatgtagaacttggtgttacttatattccatgggacaaagtcaagcctgaggaactggagagtttttgtgaaggaggaatgttggacagtgacacacttaacccagattggaaaggaattcctaagaagcctgaaaatgaagttgctcaaaatggaggtgctgaaacctcacacacagaaccagtatcacccatacctaaaccattacctgtgcctgtccctcctattcctgttcctgcacctataacagtgccacctccacaggtcccaccacatcaaccgggtccacctgtagttggtgctctccagccgcctgctttcacgcctcctctgggaataccgcctccaggctttggtcctggtgttcctcctccccctcctcctccaccatttttgcgcccaggattcaacccaatgcatttaccaccaggttttctgcctcctggacccccacctcctataactccaccagtatccattcctcctcctcacactccaccaataagcatcccaaactctactatcgctggtataaatgaagacactacaaaagacttatctattggaaatcccattccaacagtggtgtctggggctagaggaaacgccgagtctggtgacagcgtgaaaatgtatggctctgccgtgccacctgctgcacccacgaatctgcccacccctcctgtaacccagcctgtttcacttcttggcactcaaggagttgcccctggtcctgtaattggacttcaggcaccatctactggtcttcttggcgcccggcccggtctcatcccactccagcgccctccaggaatgcccccacctcacttacagcggttccctttgatgccgccccgtcccatgccaccgcacatgatgcacagaggcccaccgccaggaccagggggctttgcgatgcctccacctcatggaatgaaaggtcccttcccaccgcatggcccctttgttaggcctggtggaatgccagggctcgggggcccagggccaggcccagggggtcctgaagacagagacggaaggcaacagccgccgcagcagccacagcagcagccacagccgcaggcgccccagcaaccacagcagcagcagcagcagcagccaccaccatcacaacagcctccaccaacacagcagcagccacagcagtttagaaatgataacaggcagcagttcaattcaggtagagaccaagaaaggtttggaagaagatcttttggaaatagggtggaaaatgaccgggaacggtatgggaaccgtaatgatgatagagataatagtaaccgtgacaggagagagtggggaaggaggagccctgaccgggacaggcacagagacttggaagagagaaatagacgctctagtgggcatcgagacagagagagagattctagagatagagagtctcgtagagagaaggaagaagcccgaggaaaggaaaagcctgaggtgacagacagggcaggtggtaacaaaaccgttgaacctcccattagccaagtgggaaatgtagacactgcttcagaacttgagaagggggtgtctgaggctgcagtcctaaagccttctgaagagttacctgctgaggctacctcatccgttgaacccgaaaaggattctggctcagcagcagaggctcctcgttagagactggaatttgtgaaaatgtgacagtgacacttcctggagtgtagagcttgaggtgtacagatgctgtattatatccgctcccgctgtactgcagccccgcgccagctggtggggaactgtaagcaatttgattgcttcccttctatttaaaaatagccacaaaataacaaaaaatactgaaaatatgaataaatattaccctttttgctgtaactttttaaaagttttgactttaaaaagtttacaaatcgtaattagaagtgctctctatttttttttttttttttaatttaagacaaggtaacggtgaaagctcctcaaaacaatagggatgtttttaataaactctattttcgtaacaaactttaatgtgtgctattcttcctacactgcattaaggtggaaaaggattgttcaccgtcaaagtttgagctgttaatactgtattggagtctaaattagacttatttgatgaaaatagacattttatgtagttattctcactttcatatgtaatacttttgatttttagtgctcagtcataaggtaaaggttagttgttttaatgtcaattgaaaagctgtgtttgcaattcaatcgaggttttctttttttttccattggctttgtggtatatgttgccctaatttgtaaggagattttgctgggtgaaaagttggatcccagtgttacacgttgtactataaattatcggactgcctgggtattacgttagaaggttgcgtgtgtgtgtgtgtgtgtctgtggttttttttttttccaaccatcccattgaatttttcaaaagggtaaaagaatcaaggttaacatttgcaacctaagagctttttgttgtgtttgaggacttcagtgcagcctactactgtttccttatataagccttgcctgttgcctttcttcaccagcgttttaattcccctgcggggcagaggtaaacgaacttttcccccacatat

SEQ ID NO: 325982 - DNA, 4765 bp, Homo sapiens
cgcgcggcgtggactcgggccgctgccgccatcccgctggagagagggagagagaggcccgcccgctcgccggccgggccagtgtgagccagtgcgtgagggcgcggggggccgtgtcagcgagacgcagagcgcagccgccaccaccaaacggacatgttgaagaccagcgctgccgccgcctccttttcctcatcctgcgaacgggactgagagggggcccgccacctctccgcctctgcctcggccgcccgcctcgccgcttcgggcgcagcctcttcctgcccgggcctcggactccgccgctcgtcgcctccccccggccaccaggcccggctggtttcccagccccgctccgccgcggcgcgaggtctatgtgaccggcgggcccggagcagccgccgccgcagcgcgaacatggacgccgtcaacgccttcaaccaggagctcttttcgcttatggatatgaaacctcccatctctagagccaagatgattctcatcactaaagctgctattaaagctattaagctttataagcatgtagttcaaatagtagaaaagttcatcaaaaagtgtaaaccagaatacaaggttccgggattatatgtaattgactcaattgtgcgacagtctcgtcatcagtttggaactgataaagatgtttttgggccaagattctctaaaaacataactgccacattccaatatttatatctttgtccatctgaagataagagtaaaatagttcgtgtgctgaacctttggcaaaaaaatggagtgttcaaaattgaaattattcaacctcttttggacatggcagcgggaaccagtaatgcagccccagtagcagaaaatgttaccaataatgaaggctcacctccacctccagtaaaagtttcttctgaacctcccacacaagccactccaaactccgtcccagctgtaccacagttgcccagctctgatgcttttgctgctgtggctcagctgtttcagacaactcaaggccaacagcttcagcagatccttcagacttttcaacagcctccaaaaccacagtctcctgcccttgacaatgctgtgatggctcaggttcaggctatcacagctcagttaaagacaactcctacacaaccatctgaacaaaaagctgctttccccccacctgaacagaaaactgcatttgacaagaagttgcttgatagatttgactatgatgatgagccagaagctgtggaagaatcaaagaaagaggataccactgccgtcaccacgacagcacctgctgccgcagtaccccctgcacccaccgccaccgtgcctgctgctgctgcacccgctgctgcctctcctcctcctccacaggcaccatttggctttcctggagatggcatgcagcagccagcatacacacagcatcaaaatatggatcagtttcagccacgaatgatgggaatacaacaggatccaatgcaccatcaggttccacttcctcctaatggacaaatgccaggatttggacttcttcctacacctccatttcctcccatggctcagcctgtgattcctccaactccaccagtgcagcagcctttccaagcttcttttcaggcacaaaatgaaccacttacacagaagccgcatcagcaggaaatggaagtagaacaaccttgtattcaagaggttaagcgacatatgtctgataacagaaagtcaagatctaggtcagcatccaggtcaccaaaaaggaggcgatctagatctggttctagatctcgaaggtctcggcatcgacgttctcgatctcggtccagggatagacgccgacattctccccgatctcgatctcaagaaagacgggatcgagaaaaagagagagaacgtcgacaaaaaggcctccctcaagtgaaaccggaaactgcaagtgtttgcagtactaccctctgggtggggcagctggacaaaagaactactcagcaggatgttgccagtctcttggaagagtttggtccaattgaatcaattaatatgattcctcccaggggttgtgcctatattgttatggttcataggcaagatgcctatcgtgccctgcagaaactgagccgaggaaactataaagtgaaccagaaatccataaagattgcctgggccttaaacaaaggaataaaggcagattataagcagtattgggatgtagaacttggtgttacttatattccatgggacaaagtcaagcctgaggaactggagagtttttgtgaaggaggaatgttggacagtgacacacttaacccagattggaaaggaattcctaagaagcctgaaaatgaagttgctcaaaatggaggtgctgaaacctcacacacagaaccagtatcacccatacctaaaccattacctgtgcctgtccctcctattcctgttcctgcacctataacagtgccacctccacaggtcccaccacatcaaccgggtccacctgtagttggtgctctccagccgcctgctttcacgcctcctctgggaataccgcctccaggctttggtcctggtgttcctcctccccctcctcctccaccatttttgcgcccaggattcaacccaatgcatttaccaccaggttttctgcctcctggacccccacctcctataactccaccagtatccattcctcctcctcacactccaccaataagcatcccaaactctactatcgctggtataaatgaagacactacaaaagacttatctattggaaatcccattccaacagtggtgtctggggctagaggaaacgccgagtctggtgacagcgtgaaaatgtatggctctgccgtgccacctgctgcacccacgaatctgcccacccctcctgtaacccagcctgtttcacttcttggcactcaaggagttgcccctggtcctgtaattggacttcaggcaccatctactggtcttcttggcgcccggcccggtctcatcccactccagcgccctccaggaatgcccccacctcacttacagcggttccctttgatgccgccccgtcccatgccaccgcacatgatgcacagaggcccaccgccaggaccagggggctttgcgatgcctccacctcatggaatgaaaggtcccttcccaccgcatggcccctttgttaggcctggtggaatgccagggctcgggggcccagggccaggcccagggggtcctgaagacagagacggaaggcaacagccgccgcagcagccacagcagcagccacagccgcaggcgccccagcaaccacagcagcagcagcagcagcagccaccaccatcacaacagcctccaccaacacagcagcagccacagcagtttagaaatgataacaggcagcagttcaattcaggtagagaccaagaaaggtttggaagaagatcttttggaaatagggtggaaaatgaccgggaacggtatgggaaccgtaatgatgatagagaaatagacgctctagtgggcatcgagacagagagagagattctagagatagagagtctcgtagagagaaggaagaagcccgaggaaaggaaaagcctgaggtgacagacagggcaggtggtaacaaaaccgttgaacctcccattagccaagtgggaaatgtagacactgcttcagaacttgagaagggggtgtctgaggctgcagtcctaaagccttctgaagagttacctgctgaggctacctcatccgttgaacccgaaaaggattctggctcagcagcagaggctcctcgttagagactggaatttgtgaaaatgtgacagtgacacttcctggagtgtagagcttgaggtgtacagatgctgtattatatccgctcccgctgtactgcagccccgcgccagctggtggggaactgtaagcaatttgattgcttcccttctatttaaaaatagccacaaaataacaaaaaatactgaaaatatgaataaatattaccctttttgctgtaactttttaaaagttttgactttaaaaagtttacaaatcgtaattagaagtgctctctatttttttttttttttttaatttaagacaaggtaacggtgaaagctcctcaaaacaatagggatgtttttaataaactctattttcgtaacaaactttaatgtgtgctattcttcctacactgcattaaggtggaaaaggattgttcaccgtcaaagtttgagctgttaatactgtattggagtctaaattagacttatttgatgaaaatagacattttatgtagttattctcactttcatatgtaatacttttgatttttagtgctcagtcataaggtaaaggttagttgttttaatgtcaattgaaaagctgtgtttgcaattcaatcgaggttttctttttttttccattggctttgtggtatatgttgccctaatttgtaaggagattttgctgggtgaaaagttggatcccagtgttacacgttgtactataaattatcggactgcctgggtattacgttagaaggttgcgtgtgtgtgtgtgtgtgtctgtggttttttttttttccaaccatcccattgaatttttcaaaagggtaaaagaatcaaggttaacatttgcaacctaagagctttttgttgtgtttgaggacttcagtgcagcctactactgtttccttatataagccttgcctgttgcctttcttcaccagcgttttaattcccctgcggggcagaggtaaacgaacttttcccccacatat

SEQ ID NO: 325983 - DNA, 1346 bp, Homo sapiens
ctcaaggccaagaattcggcacgaaggaggagccctgaccgggacaggcacagagacttggaagagagaaatagacgctctagtgggcatcgagacagagagagagattctagagatagagagtctcgtagagagaaggaagaagcccgaggaaaggaaaagcctgaggtgacagacagggcaggtggtaacaaaaccgttgaacctcccattagccaagtgggaaatgtagacactgcttcagaacttgagaagggggtgtctgaggctgcagtcctaaagccttctgaagagttacctgctgaggctacctcatccgttgaacccgaaaaggattctggctcagcagcagaggctcctcgttagagactggaatttgtgaaaatgtgacagtgacacttcctggagtgtagagcttgaggtgtacagatgctgtattatatccgctcccgctgtactgcagccccgcgccagctggtggggaactgtaagcaatttgattgcttcccttctatttaaaaatagccacaaaataacaaaaaatactgaaaatatgaataaatattaccctttttgctgtaactttttaaaagttttgactttaaaaagtttacaaatcgtaattagaagtgctctctatttttttttttttttttaatttaagacaaggtaacggtgaaagctcctcaaaacaatagggatgtttttaataaactctattttcgtaacaaactttaatgtgtgctattcttcctacactgcattaaggtggaaaaggattgttcaccgtcaaagtttgagctgttaatactgtattggagtctaaattagacttatttgatgaaaatagacattttatgtagttattctcactttcatatgtaatacttttgatttttagtgctcagtcataaggtaaaggttagttgttttaatgtcaattgaaaagctgtgtttgcaattcaatcgaggttttctttttttttccattggctttgtggtatatgttgccctaatttgtaaggagattttgctgggtgaaaagttggatcccagtgttacacgttgtactataaattatcggactgcctgggtattacgttagaaggttgcgtgtgtgtgtgtgtgtgtctgtggttttttttttttccaaccatcccattgaatttttcaaaagggtaaaagaatcaaggttaacatttgcaacctaagagctttttgttgtgtttgaggacttcagtgcagcctactactgtttccttatataagccttgcctgttgcctttcttcaccagcgttttaattcccctgcggggcagaggtaaacgaacttttcccccacatat

SEQ ID NO: 325984 - DNA, 1440 bp, Homo sapiens
cgcgcggcgtggactcgggccgctgccgccatcccgctggagagagggagagagaggcccgcccgctcgccggccgggccagtgtgagccagtgcgtgagggcgcggggggccgtgtcagcgagacgcagagcgcagccgccaccaccaaacggacatgttgaagaccagcgctgccgccgcctccttttcctcatcctgcgaacgggactgagagggggcccgccacctctccgcctctgcctcggccgcccgcctcgccgcttcgggcgcagcctcttcctgcccgggcctcggactccgccgctcgtcgcctccccccggccaccaggcccggctggtttcccagccccgctccgccgcggcgcgaggtctatgtgaccggcgggcccggagcagccgccgccgcagcgcgaacatggacgccgtcaacgccttcaaccaggagctcttttcgcttatggatatgaaacctcccatctctagagccaagatgattctcatcactaaagctgctattaaagctattaagctttataagcatgtagttcaaatagtagaaaagttcatcaaaaagtgtaaaccagaatacaaggttccgggattatatgtaattgactcaattgtgcgacagtctcgtcatcagtttggaactgataaagatgtttttgggccaagattctctaaaaacataactgccacattccaatatttatatctttgtccatctgaagataagagtaaaatagttcgtgtgctgaacctttggcaaaaaaatggagtgttcaaaattgaaattattcaacctcttttggacatggcagcgggaaccagtaatgcagccccagtagcagaaaatgttaccaataatgaaggctcacctccacctccagtaaaagtttcttctgaacctcccacacaagccactccaaactccgtcccagctgtaccacagttgcccagctctgatgcttttgctgctgtggctcagctgtttcagacaactcaaggccaacagcttcagcagatccttcagacttttcaacagcctccaaaaccacagtctcctgcccttgacaatgctgtgatggctcaggttcaggctatcacagctcagttaaagacaactcctacacaaccatctgaacaaaaagctgctttccccccacctgaacagaaaactgcatttgacaaggtatatttctctcacataacccaccccaccatttatatcactcaacttgagttatggaaattatcacttctgtatcccttctgtggattgttcattatgtcgttttgtaatttgagagattttccccctcaacaagaaaacatcgattattttccctggttttaaatgtgatatgtgctcagtgcaaaaatttccagggtttgaagctgaatttactagtgtaaaattaaaaaagtgaaaaaaaaa

SEQ ID NO: 325985 - DNA, 1636 bp, Homo sapiens
gcttccggcggaagcggcctcaacaagggaaactttattgttcccgtggggcagtcgaggatgtcggtgaattacgcggcggggctgtcgccgtacgcggacaagggcaagtgcggcctcccggagatcttcgaccccccggaggagctggagcggaaggtgtgggaactggcgaggctggtctggcagtcttccaatgtggtgttccacacgggtgccggcatcagcactgcctctggcatccccgacttcaggggtccccacggagtctggaccatggaggagcgaggtctggcccccaagttcgacaccacctttgagagcgcgcggcccacgcagacccacatggcgctggtgcagctggagcgcgtgggcctcctccgcttcctggtcagccagaacgtggacgggctccatgtgcgctcaggcttccccagggacaaactggcagagctccacgggaacatgtttgtggaagaatgtgccaagtgtaagacgcagtacgtccgagacacagtcgtgggcaccatgggcctgaaggccacgggccggctctgcaccgtggctaaggcaagggggctgcgagcctgcaggggagagctgagggacaccatcctagactgggaggactccctgcccgaccgggacctggcactcgccgatgaggccagcaggaacgccgacctgtccatcacgctgggtacatcgctgcagatccggcccagcgggaacctgccgctggctaccaagcgccggggaggccgcctggtcatcgtcaacctgcagcccaccaagcacgaccgccatgctgacctccgcatccatggctacgttgacgaggtcatgacccggctcatgaagcacctggggctggagatccccgcctgggacggcccccgtgtgctggagagggcgctgccacccctgccccgcccgcccacccccaagctggagcccaaggaggaatctcccacccggatcaacggctctatccccgccggccccaagcaggagccctgcgcccagcacaacggctcagagcccgccagccccaaacgggagcggcccaccagccctgccccccacagaccccccaaaagggtgaaggccaaggcggtccccagctgaccagggtgcttggggagggtggggctttttgtagaaactgtggattctttttctctcgtggtctcactttgttacttgtttctgtccccgggagcctcagggctctgagagctgtgctccaggccaggggttacacctgccctccgtggtccctccctgggctccaggggcctctggtgcggttccgggaagaagccacaccccagaggtgacagctgagcccctgccacaccccagcctctgacttgctgtgttgtccagaggtgaggctgggccctccctggtctccagcttaaacaggagtgaactccctctgtccccagggcctcccttctgggccccctacagcccaccctacccctcctccatgggccctgcaggaggggagacccaccttgaagtgggggatcagtagaggcttgcactgcctttggggctggagggagacgtgggtccaccaggcttctggaaaagtcctcaatgcaataaaaacaatttctttcttgca

SEQ ID NO: 325986 - DNA, 1043 bp, Homo sapiens
gtgaaccggcccccagggctggctcgggatgttggcaggagcagggcatcaggctcagcccacgctccccggctccaggaacgccgacctgtccatcacgctgggtacatcgctgcagatccggcccagcgggaacctgccgctggctaccaagcgccggggaggccgcctggtcatcgtcaacctgcagcccaccaagcacgtaggtgtctgagcctacccctgcccagggccaccatgcaccctctgtcccccacgcctgacccgtcccgccccccggcaggaccgccatgctgacctccgcacccatgtgagcatcgtcgggctcattgcagcagcagtgttggttgaatagaataagtcatttttgccttcgtgtgaattcatctctctctctctgcctctccctctctctgtctctctccaattctgtctctgacttgctttgtctttaactctttatctctctgtctgtgtcttgttctatccccctctccctgttcttgcaactcaccctctatttctgtttctgattccctctctctgtctccctgtctctctctgtctcctgattttctctctctccaactttctctctatacctctctgattctccctctgtctctttttctgttcccctctccccgtccatctctcccggcctgccaccttcaggggtccccacggagtctggaccatggaggagcgaggtctggcccccaagttcgacaccacctttgagagcgcgcggcccacgcagacccacatggcgctggtgcagctggagcgcgtgggcctcctccgcttcctggtcagccagaacgtggacgggctccatgtgcgctcaggcttccccagggcctcccttctgggccccctacagcccaccctacccctcctccatgggccctgcaggaggggagacccaccttgaagtgggggatcagtagaggcttgcactgcctttggggctggagggagacgtgggtccaccaggcttctggaaaagtcctcaatgcaataaaaacaatttctttcttgca

SEQ ID NO: 325987 - DNA, 1618 bp, Homo sapiens
cgcgccgggggacgccaacacgcccaactctgtggtcaccctgtcggggctgatcggggagagaggggatgtagttccaggaagaggggacgacaggcgcaaagggagatcttcgaccccccggaggagctggagcggaaggtgtgggaactggcgaggctggtctggcagtcttccaatgtggtgttccacacgggtgccggcatcagcactgcctctggcatccccgacttcaggggtccccacggagtctggaccatggaggagcgaggtctggcccccaagttcgacaccacctttgagagcgcgcggcccacgcagacccacatggcgctggtgcagctggagcgcgtgggcctcctccgcttcctggtcagccagaacgtggacgggctccatgtgcgctcaggcttccccagggacaaactggcagagctccacgggaacatgtttgtggaagaatgtgccaagtgtaagacgcagtacgtccgagacacagtcgtgggcaccatgggcctgaaggccacgggccggctctgcaccgtggctaaggcaagggggctgcgagcctgcaggggagagctgagggacaccatcctagactgggaggactccctgcccgaccgggacctggcactcgccgatgaggccagcaggaacgccgacctgtccatcacgctgggtacatcgctgcagatccggcccagcgggaacctgccgctggctaccaagcgccggggaggccgcctggtcatcgtcaacctgcagcccaccaagcacgaccgccatgctgacctccgcatccatggctacgttgacgaggtcatgacccggctcatgaagcacctggggctggagatccccgcctgggacggcccccgtgtgctggagagggcgctgccacccctgccccgcccgcccacccccaagctggagcccaaggaggaatctcccacccggatcaacggctctatccccgccggccccaagcaggagccctgcgcccagcacaacggctcagagcccgccagccccaaacgggagcggcccaccagccctgccccccacagaccccccaaaagggtgaaggccaaggcggtccccagctgaccagggtgcttggggagggtggggctttttgtagaaactgtggattctttttctctcgtggtctcactttgttacttgtttctgtccccgggagcctcagggctctgagagctgtgctccaggccaggggttacacctgccctccgtggtccctccctgggctccaggggcctctggtgcggttccgggaagaagccacaccccagaggtgacagctgagcccctgccacaccccagcctctgacttgctgtgttgtccagaggtgaggctgggccctccctggtctccagcttaaacaggagtgaactccctctgtccccagggcctcccttctgggccccctacagcccaccctacccctcctccatgggccctgcaggaggggagacccaccttgaagtgggggatcagtagaggcttgcactgcctttggggctggagggagacgtgggtccaccaggcttctggaaaagtcctcaatgcaataaaaacaatttctttcttgca

SEQ ID NO: 325988 - DNA, 2165 bp, Homo sapiens
tctcctcttccataacctgctgtggctccccattgccaggcagtgtagagttctgaataccttgtgctggaagctgaagcccttcctgccccagccctgaatcacctctccaacttcagcccctcctgctcctgctgcagcccccaaaacacttgcattttctcctaaactcatgggctcttcccagcacccaggcctttgtttaccccttctgtctgatcttccctctcacccttcaagaaactgcttagcctcctccaggaagcccttccacgtgccccagggcccccacctccacggggcttccccaggcccaggtacctcctctgatccaggcttgactcttggggccagaggatctgtgtccacctgtctcccccaagatcaagggcttctggagggcagggcttgggcccatgtgagcatcgtcgggctcattgcagcagcagtgttggttgaatagaataagtcatttttgccttcgtgtgaattcatctctctctctctgcctctccctctctctgtctctctccaattctgtctctgacttgctttgtctttaactctttatctctctgtctgtgtcttgttctatccccctctccctgttcttgcaactcaccctctatttctgtttctgattccctctctctgtctccctgtctctctctgtctcctgattttctctctctccaactttctctctatacctctctgattctccctctgtctctttttctgttcccctctccccgtccatctctcccggcctgccaccttcaggggtccccacggagtctggaccatggaggagcgaggtctggcccccaagttcgacaccacctttgagagcgcgcggcccacgcagacccacatggcgctggtgcagctggagcgcgtgggcctcctccgcttcctggtcagccagaacgtggacgggctccatgtgcgctcaggcttccccagggacaaactggcagagctccacgggaacatgtttgtggaagaatgtgccaagtgtaagacgcagtacgtccgagacacagtcgtgggcaccatgggcctgaaggccacgggccggctctgcaccgtggctaaggcaagggggctgcgagcctgcaggggagagctgagggacaccatcctagactgggaggactccctgcccgaccgggacctggcactcgccgatgaggccagcaggaacgccgacctgtccatcacgctgggtacatcgctgcagatccggcccagcgggaacctgccgctggctaccaagcgccggggaggccgcctggtcatcgtcaacctgcagcccaccaagcacgaccgccatgctgacctccgcatccatggctacgttgacgaggtcatgacccggctcatgaagcacctggggctggagatccccgcctgggacggcccccgtgtgctggagagggcgctgccacccctgccccgcccgcccacccccaagctggagcccaaggaggaatctcccacccggatcaacggctctatccccgccggccccaagcaggagccctgcgcccagcacaacggctcagagcccgccagccccaaacgggagcggcccaccagccctgccccccacagaccccccaaaagggtgaaggccaaggcggtccccagctgaccagggtgcttggggagggtggggctttttgtagaaactgtggattctttttctctcgtggtctcactttgttacttgtttctgtccccgggagcctcagggctctgagagctgtgctccaggccaggggttacacctgccctccgtggtccctccctgggctccaggggcctctggtgcggttccgggaagaagccacaccccagaggtgacagctgagcccctgccacaccccagcctctgacttgctgtgttgtccagaggtgaggctgggccctccctggtctccagcttaaacaggagtgaactccctctgtccccagggcctcccttctgggccccctacagcccaccctacccctcctccatgggccctgcaggaggggagacccaccttgaagtgggggatcagtagaggcttgcactgcctttggggctggagggagacgtgggtccaccaggcttctggaaaagtcctcaatgcaataaaaacaatttctttcttgca

SEQ ID NO: 325989 - DNA, 1508 bp, Homo sapiens
gcttccggcggaagcggcctcaacaagggaaactttattgttcccgtggggcagtcgaggatgtcggtgaattacgcggcggggctgtcgccgtacgcggacaagggcaagtgcggcctcccggaggggtccccacggagtctggaccatggaggagcgaggtctggcccccaagttcgacaccacctttgagagcgcgcggcccacgcagacccacatggcgctggtgcagctggagcgcgtgggcctcctccgcttcctggtcagccagaacgtggacgggctccatgtgcgctcaggcttccccagggacaaactggcagagctccacgggaacatgtttgtggaagaatgtgccaagtgtaagacgcagtacgtccgagacacagtcgtgggcaccatgggcctgaaggccacgggccggctctgcaccgtggctaaggcaagggggctgcgagcctgcaggggagagctgagggacaccatcctagactgggaggactccctgcccgaccgggacctggcactcgccgatgaggccagcaggaacgccgacctgtccatcacgctgggtacatcgctgcagatccggcccagcgggaacctgccgctggctaccaagcgccggggaggccgcctggtcatcgtcaacctgcagcccaccaagcacgaccgccatgctgacctccgcatccatggctacgttgacgaggtcatgacccggctcatgaagcacctggggctggagatccccgcctgggacggcccccgtgtgctggagagggcgctgccacccctgccccgcccgcccacccccaagctggagcccaaggaggaatctcccacccggatcaacggctctatccccgccggccccaagcaggagccctgcgcccagcacaacggctcagagcccgccagccccaaacgggagcggcccaccagccctgccccccacagaccccccaaaagggtgaaggccaaggcggtccccagctgaccagggtgcttggggagggtggggctttttgtagaaactgtggattctttttctctcgtggtctcactttgttacttgtttctgtccccgggagcctcagggctctgagagctgtgctccaggccaggggttacacctgccctccgtggtccctccctgggctccaggggcctctggtgcggttccgggaagaagccacaccccagaggtgacagctgagcccctgccacaccccagcctctgacttgctgtgttgtccagaggtgaggctgggccctccctggtctccagcttaaacaggagtgaactccctctgtccccagggcctcccttctgggccccctacagcccaccctacccctcctccatgggccctgcaggaggggagacccaccttgaagtgggggatcagtagaggcttgcactgcctttggggctggagggagacgtgggtccaccaggcttctggaaaagtcctcaatgcaataaaaacaatttctttcttgca

SEQ ID NO: 325990 - DNA, 1745 bp, Homo sapiens
tatttttagtagaggcggggtttcaccatgttggccagtctgctcttgaactcttgatctcaagtgatccacccaccttggcttcccaaagtgctgggattataggcgtgagccaccatacccggcctttgctttgtctttaactctttatctctctgtctgtgtcttgttctatccccctctccctgttcttgcaactcaccctctatttctgtttctgattccctctctctgtctccctgtctctctctgtctcctgattttctctctctccaactttctctctatacctctctgattctccctctgtctctttttctgttcccctctccccgtccatctctcccggcctgccaccttcaggggtccccacggagtctggaccatggaggagcgaggtctggcccccaagttcgacaccacctttgagagcgcgcggcccacgcagacccacatggcgctggtgcagctggagcgcgtgggcctcctccgcttcctggtcagccagaacgtggacgggctccatgtgcgctcaggcttccccagggacaaactggcagagctccacgggaacatgtttgtggaagaatgtgccaagtgtaagacgcagtacgtccgagacacagtcgtgggcaccatgggcctgaaggccacgggccggctctgcaccgtggctaaggcaagggggctgcgagcctgcaggggagagctgagggacaccatcctagactgggaggactccctgcccgaccgggacctggcactcgccgatgaggccagcaggaacgccgacctgtccatcacgctgggtacatcgctgcagatccggcccagcgggaacctgccgctggctaccaagcgccggggaggccgcctggtcatcgtcaacctgcagcccaccaagcacgaccgccatgctgacctccgcatccatggctacgttgacgaggtcatgacccggctcatgaagcacctggggctggagatccccgcctgggacggcccccgtgtgctggagagggcgctgccacccctgccccgcccgcccacccccaagctggagcccaaggaggaatctcccacccggatcaacggctctatccccgccggccccaagcaggagccctgcgcccagcacaacggctcagagcccgccagccccaaacgggagcggcccaccagccctgccccccacagaccccccaaaagggtgaaggccaaggcggtccccagctgaccagggtgcttggggagggtggggctttttgtagaaactgtggattctttttctctcgtggtctcactttgttacttgtttctgtccccgggagcctcagggctctgagagctgtgctccaggccaggggttacacctgccctccgtggtccctccctgggctccaggggcctctggtgcggttccgggaagaagccacaccccagaggtgacagctgagcccctgccacaccccagcctctgacttgctgtgttgtccagaggtgaggctgggccctccctggtctccagcttaaacaggagtgaactccctctgtccccagggcctcccttctgggccccctacagcccaccctacccctcctccatgggccctgcaggaggggagacccaccttgaagtgggggatcagtagaggcttgcactgcctttggggctggagggagacgtgggtccaccaggcttctggaaaagtcctcaatgcaataaaaacaatttctttcttgca

SEQ ID NO: 325991 - DNA, 1453 bp, Homo sapiens
gcttccggcggaagcggcctcaacaagggaaactttattgttcccgtggggcagtcgaggatgtcggtgaattacgcggcggggctgtcgccgtacgcggacaagggcaagtgcggcctcccggagatcttcgaccccccggaggagctggagcggaaggtgtgggaactggcgaggctggtctggcagtcttccaatgtggtgttccacacgggtgccggcatcagcactgcctctggcatccccgacttcagggacaaactggcagagctccacgggaacatgtttgtggaagaatgtgccaagtgtaagacgcagtacgtccgagacacagtcgtgggcaccatgggcctgaaggccacgggccggctctgcaccgtggctaaggcaagggggctgcgagcctgcaggggagagctgagggacaccatcctagactgggaggactccctgcccgaccgggacctggcactcgccgatgaggccagcaggaacgccgacctgtccatcacgctgggtacatcgctgcagatccggcccagcgggaacctgccgctggctaccaagcgccggggaggccgcctggtcatcgtcaacctgcagcccaccaagcacgaccgccatgctgacctccgcatccatggctacgttgacgaggtcatgacccggctcatgaagcacctggggctggagatccccgcctgggacggcccccgtgtgctggagagggcgctgccacccctgccccgcccgcccacccccaagctggagcccaaggaggaatctcccacccggatcaacggctctatccccgccggccccaagcaggagccctgcgcccagcacaacggctcagagcccgccagccccaaacgggagcggcccaccagccctgccccccacagaccccccaaaagggtgaaggccaaggcggtccccagctgaccagggtgcttggggagggtggggctttttgtagaaactgtggattctttttctctcgtggtctcactttgttacttgtttctgtccccgggagcctcagggctctgagagctgtgctccaggccaggggttacacctgccctccgtggtccctccctgggctccaggggcctctggtgcggttccgggaagaagccacaccccagaggtgacagctgagcccctgccacaccccagcctctgacttgctgtgttgtccagaggtgaggctgggccctccctggtctccagcttaaacaggagtgaactccctctgtccccagggcctcccttctgggccccctacagcccaccctacccctcctccatgggccctgcaggaggggagacccaccttgaagtgggggatcagtagaggcttgcactgcctttggggctggagggagacgtgggtccaccaggcttctggaaaagtcctcaatgcaataaaaacaatttctttcttgca

SEQ ID NO: 325992 - DNA, 2117 bp, Homo sapiens
gcttccggcggaagcggcctcaacaagggaaactttattgttcccgtggggcagtcgaggatgtcggtgaattacgcggcggggctgtcgccgtacgcggacaagggcaagtgcggcctcccggaggggtccccacggagtctggaccatggaggagcgaggtctggcccccaagttcgacaccacctttgagagcgcgcggcccacgcagacccacatggcgctggtgcagctggagcgcgtgggcctcctccgcttcctggtcagccagaacgtggacgggctccatgtgcgctcaggcttccccagggacaaactggcagagctccacgggaacatgtttgtggaagaatgtgccaagtgtaagacgcagtacgtccgagacacagtcgtgggcaccatgggcctgaaggccacgggccggctctgcaccgtggctaaggcaagggggctgcgagcctgcaggtgagccacccccacccatgccctgggctccaggggaggctgcgaggcccctgaggactctcctcagcttcctcattgcaggggagagctgagggacaccatcctagactgggaggactccctgcccgaccgggacctggcactcgccgatgaggccagcaggtctgaccccccacccccagggagcccatggtggggcggggcgggacgacagcagaaacacagccagctccagcatgggacagtggctgaggctcacaggcagtgaggggaggcttcctggagcaggtgggccaggccaggggctgcacacacgcactcacacacactcgtcacctcatggctctgggtgggtgctacacaaggaaaccaaggcttccgccaggtgtctcctctatccagtgctgcccagccgggaggtgaccgagccagggtcccaccctaggtgtccaagctcttaccacactgtgatactccccggaagtgtctaagggcccgcccagatcaatgaccccgccaacggaccgcagaggagggcagggcgggatcccaaaggctgactcgggagtggggctggccttgaccgccccggtgagcacagatggcctaggtgtgaaccggcccccagggctggctcgggatgttggcaggagcagggcatcaggctcagcccacgctccccggccccaggaacgccgacctgtccatcacgctgggtacatcgctgcagatccggcccagcgggaacctgccgctggctaccaagcgccggggaggccgcctggtcatcgtcaacctgcagcccaccaagcacgaccgccatgctgacctccgcatccatggctacgttgacgaggtcatgacccggctcatgaagcacctggggctggagatccccgcctgggacggcccccgtgtgctggagagggcgctgccacccctgccccgcccgcccacccccaagctggagcccaaggaggaatctcccacccggatcaacggctctatccccgccggccccaagcaggagccctgcgcccagcacaacggctcagagcccgccagccccaaacgggagcggcccaccagccctgccccccacagaccccccaaaagggtgaaggccaaggcggtccccagctgaccagggtgcttggggagggtggggctttttgtagaaactgtggattctttttctctcgtggtctcactttgttacttgtttctgtccccgggagcctcagggctctgagagctgtgctccaggccaggggttacacctgccctccgtggtccctccctgggctccaggggcctctggtgcggttccgggaagaagccacaccccagaggtgacagctgagcccctgccacaccccagcctctgacttgctgtgttgtccagaggtgaggctgggccctccctggtctccagcttaaacaggagtgaactccctctgtccccagggcctcccttctgggccccctacagcccaccctacccctcctccatgggccctgcaggaggggagacccaccttgaagtgggggatcagtagaggcttgcactgcctttggggctggagggagacgtgggtccaccaggcttctggaaaagtcctcaatgcaataaaaacaatttctttcttgca

SEQ ID NO: 325993 - DNA, 1578 bp, Homo sapiens
cgcgccgggggacgccaacacgcccaactctgtggtcaccctgtcggggctgatcggggagagaggggatgtagttccaggaagaggggacgacaggcgcaaagggagatcttcgaccccccggaggagctggagcggaaggtgtgggaactggcgaggctggtctggcagtcttccaatgtggtgttccacacgggtgccggcatcagcactgcctctggcatccccgacttcaggggtccccacggagtctggaccatggaggagcgaggtctggcccccaagttcgacaccacctttgagagcgcgcggcccacgcagacccacatggcgctggtgcagctggagcgcgtgggcctcctccgcttcctggtcagccagaacgtggacgggctccatgtgcgctcaggcttccccagggacaaactggcagagctccacgggaacatgtttgtggaagaatgtgccaagtgtaagacgcagtacgtccgagacacagtcgtgggcaccatgggcctgaaggccacgggccggctctgcaccgtggctaaggcaagggggctgcgagcctgcaggggagagctgagggacaccatcctagactgggaggactccctgcccgaccgggacctggcactcgccgatgaggccagcagatccggcccagcgggaacctgccgctggctaccaagcgccggggaggccgcctggtcatcgtcaacctgcagcccaccaagcacgaccgccatgctgacctccgcatccatggctacgttgacgaggtcatgacccggctcatgaagcacctggggctggagatccccgcctgggacggcccccgtgtgctggagagggcgctgccacccctgccccgcccgcccacccccaagctggagcccaaggaggaatctcccacccggatcaacggctctatccccgccggccccaagcaggagccctgcgcccagcacaacggctcagagcccgccagccccaaacgggagcggcccaccagccctgccccccacagaccccccaaaagggtgaaggccaaggcggtccccagctgaccagggtgcttggggagggtggggctttttgtagaaactgtggattctttttctctcgtggtctcactttgttacttgtttctgtccccgggagcctcagggctctgagagctgtgctccaggccaggggttacacctgccctccgtggtccctccctgggctccaggggcctctggtgcggttccgggaagaagccacaccccagaggtgacagctgagcccctgccacaccccagcctctgacttgctgtgttgtccagaggtgaggctgggccctccctggtctccagcttaaacaggagtgaactccctctgtccccagggcctcccttctgggccccctacagcccaccctacccctcctccatgggccctgcaggaggggagacccaccttgaagtgggggatcagtagaggcttgcactgcctttggggctggagggagacgtgggtccaccaggcttctggaaaagtcctcaatgcaataaaaacaatttctttcttgca

SEQ ID NO: 325994 - DNA, 2128 bp, Homo sapiens
gcttccggcggaagcggcctcaacaagggaaactttattgttcccgtggggcagtcgaggatgtcggtgaattacgcggcggggctgtcgccgtacgcggacaagggcaagtgcggcctcccggagatcttcgaccccccggaggagctggagcggaaggtgtgggaactggcgaggctggtctggcagtcttccaatgtggtgttccacacgggtgccggcatcagcactgcctctggcatccccgacttcagggacaaactggcagagctccacgggaacatgtttgtggaagaatgtgccaagtgtaagacgcagtacgtccgagacacagtcgtgggcaccatgggcctgaaggccacgggccggctctgcaccgtggctaaggcaagggggctgcgagcctgcaggggagagctgagggacaccatcctagactgggaggactccctgcccgaccgggacctggcactcgccgatgaggccagcagatccggcccagcgggaacctgccgctggctaccaagcgccggggaggccgcctggtcatcgtcaacctgcagcccaccaagcacgaccgccatgctgacctccgcatccatggctacgttgacgaggtcatgacccggctcatgaagcacctggggctggagatccccgcctgggacggcccccgtgtgctggagagggcgctgccacccctgccccgcccgcccacccccaagctggagcccaaggaggaatctcccacccggatcaacggctctatccccgccggccccaagcaggagccctgcgcccagcacaacggctcagagcccgccagccccaaacgggagcggcccaccagccctgccccccacagaccccccaaaagggtgaaggccaaggcggtccccagctgaccagggtgcttggggagggtggggctttttgtagaaactgtggattctttttctctcgtggtctcactttgttacttgtttctgtccccgggagcctcagggctctgagagctgtgctccaggccaggggttacacctgccctccgtggtccctccctgggctccaggggcctctggtgcggttccgggaagaagccacaccccagaggtgacagctgagcccctgccacaccccagcctctgacttgctgtgttgtccagaggtgaggctgggccctccctggtctccagcttaaacaggagtgaactccctctgtccccagggcctcccttctgggccccctacagcccaccctacccctcctccatgggccctgcaggaggggagacccaccttgaagtgggggatcagtagaggcttgcactgcctttggggctggagggagacgtgggtccaccaggcttctggaaaagtcctcaatgcaataaaaacaatttctttcttgcaaaaaaaaaaaaaaaaaaaaaaaaaaaaaaaaaaaaaaaaaaaaaaaaaaaaaaaaaaaaaaaaaaaaactcgagactagttctctgagccatggagggcggcttcggctccgatttcgggggctccggcagcgggaagctggacccagggctcataatggagcagaggatgacggacaagtgtttccggaagtgtatagggaaacctgggggctccctggacaactccgagcagaagtgcatcgccatgtgcatggaccgctacatggacgcctggaacaccgtgtctcgcgcctacaactcgcggctgcagcgggaacgagccaacatgtgaccggcgagcgcgggccaccccaccctgttcatttccataaacgtgctttgagaggcggggtccgcatgtacgtactgcctgcccggggcttaggagggtggcaccggtgctgggacagacgggactgtgtcctcgccaccccccgccctgccccctgccagccagtgcagcttggatctcgggggtgtggggccctgtgccttcctgaagtgctggcagcccagtggcacctccttcaggcctttggggtattcccctagtgtgcccaagtcagcctcatattctgggcggacagcttgtctggacttcggagttgggggtggtcagacaccacaggagctgtcacctcctgcggatgggcaaataaattggtggaggacgg

SEQ ID NO: 325995 - DNA, 1288 bp, Homo sapiens
gcttccggcggaagcggcctcaacaagggaaactttattgttcccgtggggcagtcgaggatgtcggtgaattacgcggcggggctgtcgccgtacgcggacaagggcaagtgcggcctcccggagatcttcgaccccccggaggagctggagcggaaggtgtgggaactggcgaggctggtctggcagtcttccaatgtggtgttccacacgggtgccggcatcagcactgcctctggcatccccgacttcaggggtccccacggagtctggaccatggaggagcgaggtctggcccccaagttcgacaccacctttgagagcgcgcggcccacgcagacccacatggcgctggtgcagctggagcgcgtgggcctcctccgcttcctggtcagccagaacgtggacgggctccatgtgcgctcaggcttccccagggacaaactggcagagctccacgggaacatgtttgtggaagaatgtgccaagtgtaagacgcagtacgtccgagacacagtcgtgggcaccatgggcctgaaggccacgggccggctctgcaccgtggctaaggcaagggggctgcgagcctgcaggggagagctgagggacaccatcctagactgggaggactccctgcccgaccgggacctggcactcgccgatgaggccagcaggaacgccgacctgtccatcacgctgggtacatcgctgcagatccggcccagcgggaacctgccgctggctaccaagcgccggggaggccgcctggtcatcgtcaacctgcagcccaccaagcacgaccgccatgctgacctccgcatccatggctacgttgacgaggtcatgacccggctcatgaagcacctggggctggagatccccgcctgggacggcccccgtgtgctggagagggcgctgccacccctgccccgcccgcccacccccaagggcctctggtgcggttccgggaagaagccacaccccagaggtgacagctgagcccctgccacaccccagcctctgacttgctgtgttgtccagaggtgaggctgggccctccctggtctccagcttaaacaggagtgaactccctctgtccccagggcctcccttctgggccccctacagcccaccctacccctcctccatgggccctgcaggaggggagacccaccttgaagtgggggatcagtagaggcttgcactgcctttggggctggagggagacgtgggtccaccaggcttctggaaaagtcctcaatgcaataaaaacaatttctttcttgca

SEQ ID NO: 325996 - DNA, 1427 bp, Homo sapiens
gcttccggcggaagcggcctcaacaagggaaactttattgttcccgtggggcagtcgaggatgtcggtgaattacgcggcggggctgtcgccgtacgcggacaagggcaagtgcggcctcccggaggggtccccacggagtctggaccatggaggagcgaggtctggcccccaagttcgacaccacctttgagagcgcgcggcccacgcagacccacatggcgctggtgcagctggagcgcgtgggcctcctccgcttcctggtcagccagaacgtggacgggctccatgtgcgctcaggcttccccagggacaaactggcagagctccacgggaacatgtttgtggaagaatgtgccaagtgtaagacgcagtacgtccgagacacagtcgtgggcaccatgggcctgaaggccacgggccggctctgcaccgtggctaaggcaagggggctgcgagcctgcaggaacgccgacctgtccatcacgctgggtacatcgctgcagatccggcccagcgggaacctgccgctggctaccaagcgccggggaggccgcctggtcatcgtcaacctgcagcccaccaagcacgaccgccatgctgacctccgcatccatggctacgttgacgaggtcatgacccggctcatgaagcacctggggctggagatccccgcctgggacggcccccgtgtgctggagagggcgctgccacccctgccccgcccgcccacccccaagctggagcccaaggaggaatctcccacccggatcaacggctctatccccgccggccccaagcaggagccctgcgcccagcacaacggctcagagcccgccagccccaaacgggagcggcccaccagccctgccccccacagaccccccaaaagggtgaaggccaaggcggtccccagctgaccagggtgcttggggagggtggggctttttgtagaaactgtggattctttttctctcgtggtctcactttgttacttgtttctgtccccgggagcctcagggctctgagagctgtgctccaggccaggggttacacctgccctccgtggtccctccctgggctccaggggcctctggtgcggttccgggaagaagccacaccccagaggtgacagctgagcccctgccacaccccagcctctgacttgctgtgttgtccagaggtgaggctgggccctccctggtctccagcttaaacaggagtgaactccctctgtccccagggcctcccttctgggccccctacagcccaccctacccctcctccatgggccctgcaggaggggagacccaccttgaagtgggggatcagtagaggcttgcactgcctttggggctggagggagacgtgggtccaccaggcttctggaaaagtcctcaatgcaataaaaacaatttctttcttgca

SEQ ID NO: 325997 - DNA, 2164 bp, Homo sapiens
gcttccggcggaagcggcctcaacaagggaaactttattgttcccgtggggcagtcgaggatgtcggtgaattacgcggcggggctgtcgccgtacgcggacaagggcaagtgcggcctcccggagatcttcgaccccccggaggagctggagcggaaggtgtgggaactggcgaggctggtctggcagtcttccaatgtggtgttccacacgggtgccggcatcagcactgcctctggcatccccgacttcaggggtccccacggagtctggaccatggaggagcgaggtctggcccccaagttcgacaccacctttgagagcgcgcggcccacgcagacccacatggcgctggtgcagctggagcgcgtgggcctcctccgcttcctggtcagccagaacgtggacgggctccatgtgcgctcaggcttccccagggacaaactggcagagctccacgggaacatgtttgtggaagaatgtgccaagtgtaagacgcagtacgtccgagacacagtcgtgggcaccatgggcctgaaggccacgggccggctctgcaccgtggctaaggcaagggggctgcgagcctgcaggggagagctgagggacaccatcctagactgggaggactccctgcccgaccgggacctggcactcgccgatgaggccagcaggtctgaccccccacccccagggagcccatggtggggcggggcgggacgacagcagaaacacagccagctccagcatgggacagtggctgaggctcacaggcagtgaggggaggcttcctggagcaggtgggccaggccaggggctgcacacacgcactcacacacactcgtcacctcatggctctgggtgggtgctacacaaggaaaccaaggcttccgccaggtgtctcctctatccagtgctgcccagccgggaggtgaccgagccagggtcccaccctaggtgtccaagctcttaccacactgtgatactccccggaagtgtctaagggcccgcccagatcaatgaccccgccaacggaccgcagaggagggcagggcgggatcccaaaggctgactcgggagtggggctggccttgaccgccccggtgagcacagatggcctaggtgtgaaccggcccccagggctggctcgggatgttggcaggagcagggcatcaggctcagcccacgctccccggccccaggaacgccgacctgtccatcacgctgggtacatcgctgcagatccggcccagcgggaacctgccgctggctaccaagcgccggggaggccgcctggtcatcgtcaacctgcagcccaccaagcacgaccgccatgctgacctccgcatccatggctacgttgacgaggtcatgacccggctcatgaagcacctggggctggagatccccgcctgggacggcccccgtgtgctggagagggcgctgccacccctgccccgcccgcccacccccaagctggagcccaaggaggaatctcccacccggatcaacggctctatccccgccggccccaagcaggagccctgcgcccagcacaacggctcagagcccgccagccccaaacgggagcggcccaccagccctgccccccacagaccccccaaaagggtgaaggccaaggcggtccccagctgaccagggtgcttggggagggtggggctttttgtagaaactgtggattctttttctctcgtggtctcactttgttacttgtttctgtccccgggagcctcagggctctgagagctgtgctccaggccaggggttacacctgccctccgtggtccctccctgggctccaggggcctctggtgcggttccgggaagaagccacaccccagaggtgacagctgagcccctgccacaccccagcctctgacttgctgtgttgtccagaggtgaggctgggccctccctggtctccagcttaaacaggagtgaactccctctgtccccagggcctcccttctgggccccctacagcccaccctacccctcctccatgggccctgcaggaggggagacccaccttgaagtgggggatcagtagaggcttgcactgcctttggggctggagggagacgtgggtccaccaggcttctggaaaagtcctcaatgcaataaaaacaatttctttcttgca

SEQ ID NO: 325998 - DNA, 1717 bp, Homo sapiens
gcttccggcggaagcggcctcaacaagggaaactttattgttcccgtggggcagtcgaggatgtcggtgaattacgcggcggggctgtcgccgtacgcggacaagggcaagtgcggcctcccggagatcttcgaccccccggaggagctggagcggaaggtgtgggaactggcgaggctggtctggcagtcttccaatgtggtgttccacacgggtgccggcatcagcactgcctctggcatccccgacttcaggggtccccacggagtctggaccatggaggagcgaggtctggcccccaagttcgacaccacctttgagagcgcgcggcccacgcagacccacatggcgctggtgcagctggagcgcgtgggcctcctccgcttcctggtcagccagaacgtggacgggctccatgtgcgctcaggcttccccagggacaaactggcagagctccacgggaacatgtttgtggaagaatgtgccaagtgtaagacgcagtacgtccgagacacagtcgtgggcaccatgggcctgaaggccacgggccggctctgcaccgtggctaaggcaagggggctgcgagcctgcaggtgagccacccccacccatgccctgggctccaggggaggctgcgaggcccctgaggactctcctcagcttcctcattgcaggggagagctgagggacaccatcctagactgggaggactccctgcccgaccgggacctggcactcgccgatgaggccagcaggaacgccgacctgtccatcacgctgggtacatcgctgcagatccggcccagcgggaacctgccgctggctaccaagcgccggggaggccgcctggtcatcgtcaacctgcagcccaccaagcacgaccgccatgctgacctccgcatccatggctacgttgacgaggtcatgacccggctcatgaagcacctggggctggagatccccgcctgggacggcccccgtgtgctggagagggcgctgccacccctgccccgcccgcccacccccaagctggagcccaaggaggaatctcccacccggatcaacggctctatccccgccggccccaagcaggagccctgcgcccagcacaacggctcagagcccgccagccccaaacgggagcggcccaccagccctgccccccacagaccccccaaaagggtgaaggccaaggcggtccccagctgaccagggtgcttggggagggtggggctttttgtagaaactgtggattctttttctctcgtggtctcactttgttacttgtttctgtccccgggagcctcagggctctgagagctgtgctccaggccaggggttacacctgccctccgtggtccctccctgggctccaggggcctctggtgcggttccgggaagaagccacaccccagaggtgacagctgagcccctgccacaccccagcctctgacttgctgtgttgtccagaggtgaggctgggccctccctggtctccagcttaaacaggagtgaactccctctgtccccagggcctcccttctgggccccctacagcccaccctacccctcctccatgggccctgcaggaggggagacccaccttgaagtgggggatcagtagaggcttgcactgcctttggggctggagggagacgtgggtccaccaggcttctggaaaagtcctcaatgcaataaaaacaatttctttcttgca

SEQ ID NO: 325999 - DNA, 1596 bp, Homo sapiens
gcttccggcggaagcggcctcaacaagggaaactttattgttcccgtggggcagtcgaggatgtcggtgaattacgcggcggggctgtcgccgtacgcggacaagggcaagtgcggcctcccggagatcttcgaccccccggaggagctggagcggaaggtgtgggaactggcgaggctggtctggcagtcttccaatgtggtgttccacacgggtgccggcatcagcactgcctctggcatccccgacttcaggggtccccacggagtctggaccatggaggagcgaggtctggcccccaagttcgacaccacctttgagagcgcgcggcccacgcagacccacatggcgctggtgcagctggagcgcgtgggcctcctccgcttcctggtcagccagaacgtggacgggctccatgtgcgctcaggcttccccagggacaaactggcagagctccacgggaacatgtttgtggaagaatgtgccaagtgtaagacgcagtacgtccgagacacagtcgtgggcaccatgggcctgaaggccacgggccggctctgcaccgtggctaaggcaagggggctgcgagcctgcaggggagagctgagggacaccatcctagactgggaggactccctgcccgaccgggacctggcactcgccgatgaggccagcagatccggcccagcgggaacctgccgctggctaccaagcgccggggaggccgcctggtcatcgtcaacctgcagcccaccaagcacgaccgccatgctgacctccgcatccatggctacgttgacgaggtcatgacccggctcatgaagcacctggggctggagatccccgcctgggacggcccccgtgtgctggagagggcgctgccacccctgccccgcccgcccacccccaagctggagcccaaggaggaatctcccacccggatcaacggctctatccccgccggccccaagcaggagccctgcgcccagcacaacggctcagagcccgccagccccaaacgggagcggcccaccagccctgccccccacagaccccccaaaagggtgaaggccaaggcggtccccagctgaccagggtgcttggggagggtggggctttttgtagaaactgtggattctttttctctcgtggtctcactttgttacttgtttctgtccccgggagcctcagggctctgagagctgtgctccaggccaggggttacacctgccctccgtggtccctccctgggctccaggggcctctggtgcggttccgggaagaagccacaccccagaggtgacagctgagcccctgccacaccccagcctctgacttgctgtgttgtccagaggtgaggctgggccctccctggtctccagcttaaacaggagtgaactccctctgtccccagggcctcccttctgggccccctacagcccaccctacccctcctccatgggccctgcaggaggggagacccaccttgaagtgggggatcagtagaggcttgcactgcctttggggctggagggagacgtgggtccaccaggcttctggaaaagtcctcaatgcaataaaaacaatttctttcttgca

SEQ ID NO: 326000 - DNA, 380 bp, Homo sapiens
gcttccggcggaagcggcctcaacaagggaaactttattgttcccgtggggcagtcgaggatgtcggtgaattacgcggcggggctgtcgccgtacgcggacaagggcaagtgcggcctcccggagatcttcgaccccccggaggagctggagcggaaggtgtgggaactggcgaggctggtctggcagtcttccaatgtggtgttccacacgggtgccggcatcagcactgcctctggcatccccgacttcaggggtccccacggagtctggaccatggaggagcgaggtctggcccccaagttcgacaccaccacgacgaattccgccaccacgacgacatatccgcacgaccacgacgagtccgcaccacgcgcatg

SEQ ID NO: 326001 - DNA, 1236 bp, Homo sapiens
tgacataaaaaccgggtgccggcaggcgccagtcgcaggtgtgctgctgaggcgtgagaatggcgtcccgcggccggcgtccggagcatggcggacccccagagctgttttatgacgagacagaagcccggaaatacgttcgcaactcacggatgattgatatccagaccaggatggctgggcgagcattggagcttctttatctgccagagaataagccctgttacctgctggatattggctgtggcactgggctgagtggaagttatctgtcagatgaagggcactattgggtgggcctggatatcagccctgccatgctggatgaggctgtggaccgagagatagagggagacctgctgctgggggatatgggccagggcatcccattcaagccaggcacatttgatggttgcatcagcatttctgctgtgcagtggctctgtaatgctaacaagaagtctgaaaaccctgccaagcgcctgtactgcttttttgcttctcttttttctgttctcgtccggggatcccgagctgtcctgcagctgtaccctgagaactcagagcagttggagctgatcacaacccaggccacaaaggcaggcttctccggtggcatggtggtagactaccctaacagtgccaaagcaaagaaattctacctctgcttgttttctgggccttcgacctttataccagaggggctgagtgaaaatcaggatgaagttgaacccagggagtctgtgttcaccaatgagaggttcccattaaggatgtcgaggcggggaatggtgaggaagagtcgggcatgggtgctggagaagaaggagcggcacaggcgccagggcagggaagtcagacctgacacccagtacaccggccgcaagcgcaagccccgcttctaagtcaccacgcggttctggaaaggcacttgcctctgcacttttctatattgttcagctgacaaagtagtattttagaaaagttctaaagttataaaaatgttttctgcagtaaaaaaaaagttctctgggccgggcgtggtggctcacacctgtaatcccagcaccttgggaggctgaggtgggaggatcatttgaggccaggagtttgagacctgcctgggcaacataatgaaacttcctttccagggagaaaaaaaaaaaaaaaaaaaagctctgagagcatcttattttgtttaaaggcaagaaataaaatttccttttgtggagctct

SEQ ID NO: 326002 - DNA, 1838 bp, Homo sapiens
tgacataaaaaccgggtgccggcaggcgccagtcgcaggtgtgctgctgaggcgtgagaatggcgtcccgcggccggcgtccggagcatggcggacccccagagctgttttatgacgagacagaagcccggaaatacgttcgcaactcacggatgattgatatccagaccaggatggctgggcgagcattggagcttctttatctgccagagaataagccctgttacctgctggatattggctgtggcactgggctgagtggaagttatctgtcagatgaagggcactattgggtgggcctggatatcagccctgccatgctggatgaggctgtggaccgagagatagagggagacctgctgctgggggatatgggccagggcatcccattcaagccaggcacatttgatggttgcatcagcatttctgctgtgcagtggctctgtaatgctaacaagaagtctgaaaaccctgccaagcgcctgtactgcttttttgcttctcttttttctgttctcgtccggggatcccgagctgtcctgcagctgtaccctgagaactcagagcaggtgagtccctcggctactgggtgtgccggggagttgggggactcaacaggtaagctgtcctggggaagcgacaaagaatcttatgcagattggcgggaaaaggaggaaacatgcaccctagtgtggcccctgatggcacatttgatgacctgatatcctaagggggtggcatctgcggaggtggggtgggatgccttctcttggtagatgacatggtattacagataaggtgatgcgactgatttccataaccaaataagtaaatgccatttaggaagggtgagagggcaccgacagttctccgttgtgtgatgtataaattaaggaatggcggagtaggatgtagatgttgaaagataagtgaagagctgttcctgactaataacatgaatgactctggattccaattggtggccatctccctaaacttgagtggggagctgggtccctgcactggaaagtgagaatgaggggagttgctttgttctgtaattctcctgagggaggtgtgggccatgccagattctagcctgtacttttctctacgtggcttacagcgaccttaagttctcccaggcaggatttgtcctggagcagactggcttctgaaggaggggagggaggtgaagctgtctgctcctctcaacctccgctgcctgacccgctgcctttctttcctcagttggagctgatcacaacccaggccacaaaggcaggcttctccggtggcatggtggtagactaccctaacagtgccaaagcaaagaaattctacctctgcttgttttctgggccttcgacctttataccagaggggctgagtgaaaatcaggatgaagttgaacccagggagtctgtgttcaccaatgagaggttcccattaaggatgtcgaggcggggaatggtgaggaagagtcgggcatgggtgctggagaagaaggagcggcacaggcgccagggcagggaagtcagacctgacacccagtacaccggccgcaagcgcaagccccgcttctaagtcaccacgcggttctggaaaggcacttgcctctgcacttttctatattgttcagctgacaaagtagtattttagaaaagttctaaagttataaaaatgttttctgcagtaaaaaaaaagttctctgggccgggcgtggtggctcacacctgtaatcccagcaccttgggaggctgaggtgggaggatcatttgaggccaggagtttgagacctgcctgggcaacataatgaaacttcctttccagggaga

SEQ ID NO: 326003 - DNA, 928 bp, Homo sapiens
  misc_feature (769)..(769): n is a, c, g, or t
tgacataaaaaccgggtgccggcaggcgccagtcgcaggtgtgctgctgaggcgtgagaatggcgtcccgcggccggcgtccggagcatggcggacccccagagctgttttatgacgagacagaagcccggaaatacgttcgcaactcacggatgattgatatccagaccaggatggctgggcgagcattggagcttctttatctgccagagaataagccctgttacctgctggatattggctgtggcactgggctgagtggaagttatctgtcagatgaagggcactattgggtgggcctggatatcagccctgccatgctggatgaggctgtggaccgagagatagagggagacctgctgctgggggatatgggccagggcatcccattcaagccaggcacatttgatggttgcatcagcatttctgctgtgcagtggctctgtaatgctaacaagaagtctgaaaaccctgccaagcgcctgtactgcttttttgcttctcttttttctgttctcgtccggggatcccgagctgtcctgcagctgtaccctgagaactcagagcagttggagctgatcacaacccaggccacaaaggcaggcttctccggtggcatggtggtagactaccctaacagtgccaaagcaaagaaattctacctctgcttgttttctgggccttcgacctttataccagaggggctgagtgaaaatcaggatgaagttgaacccagggagtctgtgttcaccaatgagaggaaggtggngcattgagagaagggcatccgaggcaacagactcggggttcccattaacgattgtcgaggcgggcaaggtgagaggaaagtcgggcaggggggggcaaaaggagggcaggcgccaggaggagtcagactgaaaccagtaaacgggcggaaggaagccgg

SEQ ID NO: 326004 - DNA, 714 bp, Homo sapiens
  misc_feature (654)..(654): n is a, c, g, or t
  misc_feature (662)..(662): n is a, c, g, or t
gacggtatcgttaagcttgattaagaaagccggacccccagagctgttttatgacgagacagaagcccggaaatacgttcgcaactcacggatgattgatatccagaccaggatggctgggcgagcattggagcttctttatctgccagagaataagccctgttacctgctggatattggctgtggcactgggctgagtggaagttatctgtcagatgaagggcactattgggtgggcctggatatcagccctgccatgctggatgaggctgtggaccgagagatagagggagacctgctgctgggggatatgggccagggcatcccattcaagccaggcacatttgatggttgcatcagcatttctgctgtgcagtggctctgtaatgctaacaagaagtctgaaaaccctgccaagcgcctgtactgcttttttgcttctcttttttctgttctcgtccggggatcccgagctgtcctgcagctgtaccctgagaactcagagcagttggagctgatcacaacccaggccacaaaggcaggcttctccggtggcatggtggtagactaccctaacagtgccaaagcaaagaaattctacctctgcttgttttctgggccttcgacctttataccagaggctgagtgaaatcnggtgagtnaccggggttggttcccatggggttccttaggtgtccgggggaaggggaattg

SEQ ID NO: 326005 - DNA, 504 bp, Homo sapiens
  misc_feature (345)..(345): n is a, c, g, or t
tgacataaaaaccgggtgccggcaggcgccagtcgcaggtgtgctgctgaggcgtgagaatggcgtcccgcggccggcgtccggagcatggcggacccccagagctgttttatgacgagacagaagcccggaaatacgttcgcaagtgaggggagcctgaatactgcggggcgtccgggggtcgggaagcggcaagttgcccctgttgctggcgttgcccggaaaggccgtagaatttgggggtgcgggaagggaaggacccgggtgggtgccgatttctgtctctggtaaatcaactttaagttgccgacctctctgggcagccaggctggagaggcggctaanggtgttttggaggcttccagggtggtaccggctcccgatggccagtttgctttcctcattcccaacgggggccttcgcgcacagcgggcccctgtcatccccccgtctacaccagcaacagcggcaccttccgtgggccccaaaacgccagtgtcaccc

SEQ ID NO: 326006 - DNA, 1107 bp, Homo sapiens
tgacataaaaaccgggtgccggcaggcgccagtcgcaggtgtgctgctgaggcgtgagaatggcgtcccgcggccggcgtccggagcatggcggacccccagagctgttttatgacgagacagaagcccggaaatacgttcgcaactcacggatgattgatatccagaccaggatggctgggcgagcattggagcttctttatctgccagagaataagccctgttacctgctggatattggctgtggcactgggctgagtggaagttatctgtcagatgaagggcactattgggtgggcctggatatcagccctgccatgctggatgaggctgtggaccgagagatagagggagacctgctgctgggggatatgggccagggcatcccattcaagccaggcacatttgatggttgcatcagcatttctgctgtgcagtggctctgtaatgctaacaagaagtctgaaaaccctgccaagcgcctgtactgcttttttgcttctcttttttctgttctcgtccggggatcccgagctgtcctgcagctgtaccctgagaactcagagcagttggagctgatcacaacccaggccacaaaggcaggcttctccggtggcatggtggtagactaccctaacagtgccaaagcaaagaaattctacctctgcttgttttctgggccttcgacctttataccagaggggctgagtgaaaatcaggatgaagttgaacccagggagtctgtgttcaccaatgagaggttcccattaaggatgtcgaggcggggaatggtgaggaagagtcgggcatgggtgctggagaagaaggagcggcacaggcgccagggcagggaagtcagacctgacacccagtacaccggccgcaagcgcaagccccgcttctaagtcaccacgcggttctggaaaggcacttgcctctgcacttttctatattgttcagctgacaaagtagtattttagaaaagttctaaagttataaaaatgttttctgcagtaaaaaaaaattttggggcggggggggggtcaccccttatccacacccttgggggtgttggggggggaaatttttggcccaattttaaacctc

SEQ ID NO: 326007 - DNA, 1207 bp, Homo sapiens
tgacataaaaaccgggtgccggcaggcgccagtcgcaggtgtgctgctgaggcgtgagaatggcgtcccgcggccggcgtccggagcatggcggacccccagagctgttttatgacgagacagaagcccggaaatacgttcgcaactcacggatgattgatatccagaccaggatggctgggcgagcattggagcttctttatctgccagagaataagccctgttacctgctggatattggctgtggcactgggctgagtggaagttatctgtcagatgaagggcactattgggtgggcctggatatcagccctgccatgctggatgaggctgtggaccgagagatagagggagacctgctgctgggggatatgggccagggcatcccattcaagccaggcacatttgatggttgcatcagcatttctgctgtgcagtggctctgtaatgctaacaagaagtctgaaaaccctgccaagcgcctgtactgcttttttgcttctcttttttctgttctcgtccggggatcccgagctgtcctgcagctgtaccctgagaactcagagcagttggagctgatcacaacccaggccacaaaggcaggcttctccggtggcatggtggtagactaccctaacagtgccaaagcaaagaaattctacctctgcttgttttctgggccttcgacctttataccagaggggctgagtgaaaatcaggatgaagttgaacccagggagtctgtgttcaccaatgagagggaaggtggagcatttgagagaaggggcatccgaggccaccagactcggaggttcccattaaggatgtcgaggcggggaatggtgaggaagagtcgggcatgggtgctggagaagaaggagcggcacaggcgccagggcagggaagtcagacctgacacccagtacaccggccgcaagcgcaagccccgcttctaagtcaccacgcggttctggaaaggcacttgcctctgcacttttctatattgttcagctgacaaagtagtattttagaaaagttctaaagttataaaaatgttttctgcagtaaaaaaaaagttctctgggccgggcgtggtggctcacacctgtaatcccagcaccttgggaggctgaggtgggaggatcatttgaggccaggagtttgagacctgcctgggcaacataatgaaacttcctttccagggaga

SEQ ID NO: 326008 - DNA, 1610 bp, Homo sapiens
tgacataaaaaccgggtgccggcaggcgccagtcgcaggtgtgctgctgaggcgtgagaatggcgtcccgcggccggcgtccggagcatggcggacccccagagctgttttatgacgagacagaagcccggaaatacgttcgcaactcacggatgattgatatccagaccaggatggctgggcgagcattggagcttctttatctgccagagaataagccctgttacctgctggatattggctgtggcactgggctgagtggaagttatctgtcagatgaagggcactattgggtgggcctggatatcagccctgccatgctggatgaggctgtggaccgagagatagagggagacctgctgctgggggatatgggccagggcatcccattcaagccaggcacatttgatggttgcatcagcatttctgctgtgcagtggctctgtaatgctaacaagaagtctgaaaaccctgccaagcgcctgtactgcttttttgcttctcttttttctgttctcgtccggggatcccgagctgtcctgcagctgtaccctgagaactcagagcagttggagctgatcacaacccaggccacaaaggcaggcttctccggtggcatggtggtagactaccctaacagtgccaaagcaaagaaattctacctctgcttgttttctgggccttcgacctttataccagaggggctgagtgaaaatcaggatgaagttgaacccagggagtctgtgttcaccaatgagaggtaaagcaactgctgaagcctgccccggctgcagcgggggctgccacatttgttagacatggactttctctctgccctcacccaagcctctcaggtcacatgcagcagggacaccaaggtgacggtagaaacatcaggtcccatttggactgtgcctgtttggggctaggggtttggggtcctggatgtctgggtgcagccatgcagcctggactccctttgtgagcccacacatgccccttccccttgccacgcctggcaggctgtctccttcttttctgatgctgccctccacctgcatctgggaccctctcccttgggtgctgtggctctcccttccttcctgcatcctcatcttgactctcctgggtcactgctgtcggcacacagacatgctgcacaatttctccttttctagaaaagttccttccttaaccccataacaacaactaaccaccccgttgttgcttcccttcatagcagaactcagacctgcctcttcttcccctcccaccattctctcaatccacttctcaggctgacgattctgtctcatcacaaattgttcttgtcaactccaccaccaatttccatcaagccacatctggtcacttgtgactttttttcatgtccttaatgtgcctgctcggtagggtcaaagacagcagtgcgctccctccttgacgcttccttcacttggccttccacccaccatcgtggtttcctcagccttcctggctgctccttcttttctgatgctgccctccacctgcatctgggaccctctcccttgggtgctgtggctctcccttccttcctgcatcctcatcttgactctcctgggtcactg

SEQ ID NO: 326009 - DNA, 855 bp, Homo sapiens
  misc_feature (769)..(769): n is a, c, g, or t
tgacataaaaaccgggtgccggcaggcgccagtcgcaggtgtgctgctgaggcgtgagaatggcgtcccgcggccggcgtccggagcatggcggacccccagagctgttttatgacgagacagaagcccggaaatacgttcgcaactcacggatgattgatatccagaccaggatggctgggcgagcattggagcttctttatctgccagagaataagccctgttacctgctggatattggctgtggcactgggctgagtggaagttatctgtcagatgaagggcactattgggtgggcctggatatcagccctgccatgctggatgaggctgtggaccgagagatagagggagacctgctgctgggggatatgggccagggcatcccattcaagccaggcacatttgatggttgcatcagcatttctgctgtgcagtggctctgtaatgctaacaagaagtctgaaaaccctgccaagcgcctgtactgcttttttgcttctcttttttctgttctcgtccggggatcccgagctgtcctgcagctgtaccctgagaactcagagcagttggagctgatcacaacccaggccacaaaggcaggcttctccggtggcatggtggtagactaccctaacagtgccaaagcaaagaaattctacctctgcttgttttctgggccttcgacctttataccagaggggctgagtgaaaatcaggatgaagttgaacccagggagtctgtgttcaccaatgagaggaaggtggngcattgagagaagggcatccgagggttagggtgagggtcgcgggttagggatgagggttagggtacgcggttaggtgaagttgtgc

SEQ ID NO: 326010 - DNA, 1095 bp, Homo sapiens
gacggtatcgttaagcttgattaagaaagccggacccccagagctgttttatgacgagacagaagcccggaaatacgttcgcaactcacggatgattgatatccagaccaggatggctgggcgagcattggagcttctttatctgccagagaataagccctgttacctgctggatattggctgtggcactgggctgagtggaagttatctgtcagatgaagggcactattgggtgggcctggatatcagccctgccatgctggatgaggctgtggaccgagagatagagggagacctgctgctgggggatatgggccagggcatcccattcaagccaggcacatttgatggttgcatcagcatttctgctgtgcagtggctctgtaatgctaacaagaagtctgaaaaccctgccaagcgcctgtactgcttttttgcttctcttttttctgttctcgtccggggatcccgagctgtcctgcagctgtaccctgagaactcagagcagttggagctgatcacaacccaggccacaaaggcaggcttctccggtggcatggtggtagactaccctaacagtgccaaagcaaagaaattctacctctgcttgttttctgggccttcgacctttataccagaggggctgagtgaaaatcaggatgaagttgaacccagggagtctgtgttcaccaatgagaggttcccattaaggatgtcgaggcggggaatggtgaggaagagtcgggcatgggtgctggagaagaaggagcggcacaggcgccagggcagggaagtcagacctgacacccagtacaccggccgcaagcgcaagccccgcttctaagtcaccacgcggttctggaaaggcacttgcctctgcacttttctatattgttcagctgacaaagtagtattttagaaaagttctaaagttataaaaatgttttctgcagtaaaaaaaaagttctctgggccgggcgtggtggctcacacctgtaatcccagcaccttgggaggctgaggtgggaggatcatttgaggccaggagtttgagacctgcctgggcaacataatgaaacttcctttccagggaga

SEQ ID NO: 326011 - DNA, 1918 bp, Homo sapiens
tgacataaaaaccgggtgccggcaggcgccagtcgcaggtgtgctgctgaggcgtgagaatggcgtcccgcggccggcgtccggagcatggcggacccccagagctgttttatgacgagacagaagcccggaaatacgttcgcaactcacggatgattgatatccagaccaggatggctgggcgagcattggagcttctttatctgccagagaataagccctgttacctgctggatattggctgtggcactgggctgagtggaagttatctgtcagatgaagggcactattgggtgggcctggatatcagccctgccatgctggatgaggctgtggaccgagagatagagggagacctgctgctgggggatatgggccagggcatcccattcaagccaggcacatttgatggttgcatcagcatttctgctgtgcagtggctctgtaatgctaacaagaagtctgaaaaccctgccaagcgcctgtactgcttttttgcttctcttttttctgttctcgtccggggatcccgagctgtcctgcagctgtaccctgagaactcagagcaggtgagtccctcggctactgggtgtgccggggagttgggggactcaacaggtaagctgtcctggggaagcgacaaagaatcttatgcagattggcgggaaaaggaggaaacatgcaccctagtgtggcccctgatggcacatttgatgacctgatatcctaagggggtggcatctgcggaggtggggtgggatgccttctcttggtagatgacatggtattacagataaggtgatgcgactgatttccataaccaaataagtaaatgccatttaggaagggtgagagggcaccgacagttctccgttgtgtgatgtataaattaaggaatggcggagtaggatgtagatgttgaaagataagtgaagagctgttcctgactaataacatgaatgactctggattccaattggtggccatctccctaaacttgagtggggagctgggtccctgcactggaaagtgagaatgaggggagttgctttgttctgtaattctcctgagggaggtgtgggccatgccagattctagcctgtacttttctctacgtggcttacagcgaccttaagttctcccaggcaggatttgtcctggagcagactggcttctgaaggaggggagggaggtgaagctgtctgctcctctcaacctccgctgcctgacccgctgcctttctttcctcagttggagctgatcacaacccaggccacaaaggcaggcttctccggtggcatggtggtagactaccctaacagtgccaaagcaaagaaattctacctctgcttgttttctgggccttcgacctttataccagaggggctgagtgaaaatcaggatgaagttgaacccagggagtctgtgttcaccaatgagaggttcccattaaggatgtcgaggcggggaatggtgaggaagagtcgggcatgggtgctggagaagaaggagcggcacaggcgccagggcagggaagtcagacctgacacccagtacaccggccgcaagcgcaagccccgcttctaagtcaccacgcggttctggaaaggcacttgcctctgcacttttctatattgttcagctgacaaagtagtattttagaaaagttctaaagttataaaaatgttttctgcagtaaaaaaaaagttctctgggccgggcgtggtggctcacacctgtaatcccagcaccttgggaggctgaggtgggaggatcatttgaggccaggagtttgagacctgcctgggcaacataatgaaacttcctttccagggagaaaaaaaaaaaaaaaaaaaagctctgagagcatcttattttgtttaaaggcaagaaataaaatttccttttgtggagctct

SEQ ID NO: 326012 - DNA, 1352 bp, Homo sapiens
tgacataaaaaccgggtgccggcaggcgccagtcgcaggtgtgctgctgaggcgtgagaatggcgtcccgcggccggcgtccggagcatggcggacccccagagctgttttatgacgagacagaagcccggaaatacgttcgcaagtgaggggagcctgaatactgcggggcgtccgggggtcgggaagcggcaagttgcccctgttgctggcgttgcccggaaaggccgtagaatttgggggtgcgggaagggaaggacccgggtgggtgccgatttctgtctctggtaaatcaactttaagttgccgacctctctgggcctcggtacctcagcgttgagctcacggatgattgatatccagaccaggatggctgggcgagcattggagcttctttatctgccagagaataagccctgttacctgctggatattggctgtggcactgggctgagtggaagttatctgtcagatgaagggcactattgggtgggcctggatatcagccctgccatgctggatgaggctgtggaccgagagatagagggagacctgctgctgggggatatgggccagggcatcccattcaagccaggcacatttgatggttgcatcagcatttctgctgtgcagtggctctgtaatgctaacaagaagtctgaaaaccctgccaagcgcctgtactgcttttttgcttctcttttttctgttctcgtccggggatcccgagctgtcctgcagctgtaccctgagaactcagagcagttggagctgatcacaacccaggccacaaaggcaggcttctccggtggcatggtggtagactaccctaacagtgccaaagcaaagaaattctacctctgcttgttttctgggccttcgacctttataccagaggggctgagtgaaaatcaggatgaagttgaacccagggagtctgtgttcaccaatgagaggttcccattaaggatgtcgaggcggggaatggtgaggaagagtcgggcatgggtgctggagaagaaggagcggcacaggcgccagggcagggaagtcagacctgacacccagtacaccggccgcaagcgcaagccccgcttctaagtcaccacgcggttctggaaaggcacttgcctctgcacttttctatattgttcagctgacaaagtagtattttagaaaagttctaaagttataaaaatgttttctgcagtaaaaaaaaagttctctgggccgggcgtggtggctcacacctgtaatcccagcaccttgggaggctgaggtgggaggatcatttgaggccaggagtttgagacctgcctgggcaacataatgaaacttcctttccagggaga

SEQ ID NO: 326013 - DNA, 1429 bp, Homo sapiens
aggtttttgtgcattgttgatccttctagatgagagaaactatggagaataatttttggagaaaatgttttcaacaagtgctagagcagcccagcctaatagagttgcagatcccagtggttgtttattactagctaagtgatttgcttttacacatctgcttggcagctggtgcaatgataagttgttaccacaaaataacatggtcctgaattacatggaatttttggggtcactttcgaatggttgaatttgttgatcccaacttagaaggggtcagaaaagagtacctcgggatgattgatccgttttttgtttgtttttaacttggcttttttttgttttttgttttttggtctgggggaagtattcacccagaactcctttaccatgtccacttgtgtttctgccttaccagctcacggatgattgatatccagaccaggatggctgggcgagcattggagcttctttatctgccagagaataagccctgttacctgctggatattggctgtggcactgggctgagtggaagttatctgtcagatgaagggcactattgggtgggcctggatatcagccctgccatgctggatgaggctgtggaccgagagatagagggagacctgctgctgggggatatgggccagggcatcccattcaagccaggcacatttgatggttgcatcagcatttctgctgtgcagtggctctgtaatgctaacaagaagtctgaaaaccctgccaagcgcctgtactgcttttttgcttctcttttttctgttctcgtccggggatcccgagctgtcctgcagctgtaccctgagaactcagagcagttggagctgatcacaacccaggccacaaaggcaggcttctccggtggcatggtggtagactaccctaacagtgccaaagcaaagaaattctacctctgcttgttttctgggccttcgacctttataccagaggggctgagtgaaaatcaggatgaagttgaacccagggagtctgtgttcaccaatgagaggttcccattaaggatgtcgaggcggggaatggtgaggaagagtcgggcatgggtgctggagaagaaggagcggcacaggcgccagggcagggaagtcagacctgacacccagtacaccggccgcaagcgcaagccccgcttctaagtcaccacgcggttctggaaaggcacttgcctctgcacttttctatattgttcagctgacaaagtagtattttagaaaagttctaaagttataaaaatgttttctgcagtaaaaaaaaagttctctgggccgggcgtggtggctcacacctgtaatcccagcaccttgggaggctgaggtgggaggatcatttgaggccaggagtttgagacctgcctgggcaacataatgaaacttcctttccagggaga

SEQ ID NO: 326014 - DNA, 1112 bp, Homo sapiens
  misc_feature (18)..(19): n is a, c, g, or t
  misc_feature (24)..(24): n is a, c, g, or t
  misc_feature (27)..(27): n is a, c, g, or t
  misc_feature (94)..(94): n is a, c, g, or t
attaaggcaggtaccagnnctggngtncgcggcggcgtcggagcatggcggacccccagagctgttttatgacgagacagaagcccggaaatcnttcgcaactcacggatgattgatatccagaccaggatggctgggcgagcattggagcttctttatctgccagagaataagccctgttacctgctggatattggctgtggcactgggctgagtggaagttatctgtcagatgaagggcactattgggtgggcctggatatcagccctgccatgctggatgaggctgtggaccgagagatagagggagacctgctgctgggggatatgggccagggcatcccattcaagccaggcacatttgatggttgcatcagcatttctgctgtgcagtggctctgtaatgctaacaagaagtctgaaaaccctgccaagcgcctgtactgcttttttgcttctcttttttctgttctcgtccggggatcccgagctgtcctgcagctgtaccctgagaactcagagcagttggagctgatcacaacccaggccacaaaggcaggcttctccggtggcatggtggtagactaccctaacagtgccaaagcaaagaaattctacctctgcttgttttctgggccttcgacctttataccagaggggctgagtgaaaatcaggatgaagttgaacccagggagtctgtgttcaccaatgagaggttcccattaaggatgtcgaggcggggaatggtgaggaagagtcgggcatgggtgctggagaagaaggagcggcacaggcgccagggcagggaagtcagacctgacacccagtacaccggccgcaagcgcaagccccgcttctaagtcaccacgcggttctggaaaggcacttgcctctgcacttttctatattgttcagctgacaaagtagtattttagaaaagttctaaagttataaaaatgttttctgcagtaaaaaaaaagttctctgggccgggcgtggtggctcacacctgtaatcccagcaccttgggaggctgaggtgggaggatcatttgaggccaggagtttgagacctgcctgggcaacataatgaaacttcctttccagggaga

SEQ ID NO: 326015 - DNA, 1102 bp, Homo sapiens
tgacataaaaaccgggtgccggcaggcgccagtcgcaggtgtgctgctgaggcgtgagaatggcgtcccgcggccggcgtccggagcatggcggacccccagagctgttttatgacgagacagaagcccggaaatacgttcgcaactcacggatgattgatatccagaccaggatggctgggcgagcattggagcttctttatctgccagagaataagccctgttacctgctggatattggctgtggcactgggctgagtggaagttatctgtcagatgaagggcactattgggtgggcctggatatcagccctgccatgctggatgaggctgtggaccgagagatagagggagacctgctgctgggggatatgggccagggcatcccattcaagccaggcacatttgatggttgcatcagcatttctgctgtgcagtggctctgtaatgctaacaagaagtctgtccggggatcccgagctgtcctgcagctgtaccctgagaactcagagcagttggagctgatcacaacccaggccacaaaggcaggcttctccggtggcatggtggtagactaccctaacagtgccaaagcaaagaaattctacctctgcttgttttctgggccttcgacctttataccagaggggctgagtgaaaatcaggatgaagttgaacccagggagtctgtgttcaccaatgagaggttcccattaaggatgtcgaggcggggaatggtgaggaagagtcgggcatgggtgctggagaagaaggagcggcacaggcgccagggcagggaagtcagacctgacacccagtacaccggccgcaagcgcaagccccgcttctaagtcaccacgcggttctggaaaggcacttgcctctgcacttttctatattgttcagctgacaaagtagtattttagaaaagttctaaagttataaaaatgttttctgcagtaaaaaaaaagttctctgggccgggcgtggtggctcacacctgtaatcccagcaccttgggaggctgaggtgggaggatcatttgaggccaggagtttgagacctgcctgggcaacataatgaaacttcctttccagggaga

SEQ ID NO: 326016 - DNA, 1045 bp, Homo sapiens
tgacataaaaaccgggtgccggcaggcgccagtcgcaggtgtgctgctgaggcgtgagaatggcgtcccgcggccggcgtccggagcatggcggacccccagagctgttttatgacgagacagaagcccggaaatacgttcgcaactcacggatgattgatatccagaccaggatggctgggcgagcattggagcttctttatctgccagagaataagccctgttacctgctggatattggctgtggcactgggctgagtggaagttatctgtcagatgaagggcactattgggtgggcctggatatcagccctgccatgctggatgaggctgtggaccgagagatagagggagacctgctgctgggggatatgggccagggcatcccattcaagccaggcacatttgatggttgcatcagcatttctgctgtgcagtggctctgtaatgctaacaagaagtctgaaaaccctgccaagcgcctgtactgcttttttgcttctcttttttctgttctcgtccggggatcccgagctgtcctgcagctgtaccctgagaactcagagcaggttcccattaaggatgtcgaggcggggaatggtgaggaagagtcgggcatgggtgctggagaagaaggagcggcacaggcgccagggcagggaagtcagacctgacacccagtacaccggccgcaagcgcaagccccgcttctaagtcaccacgcggttctggaaaggcacttgcctctgcacttttctatattgttcagctgacaaagtagtattttagaaaagttctaaagttataaaaatgttttctgcagtaaaaaaaaagttctctgggccgggcgtggtggctcacacctgtaatcccagcaccttgggaggctgaggtgggaggatcatttgaggccaggagtttgagacctgcctgggcaacataatgaaacttcctttccagggagaaaaaaaaaaaaaaaaaaaagctctgagagcatcttattttgtttaaaggcaagaaataaaatttccttttgtggagctct

SEQ ID NO: 326017 - DNA, 1042 bp, Homo sapiens
tgacataaaaaccgggtgccggcaggcgccagtcgcaggtgtgctgctgaggcgtgagaatggcgtcccgcggccggcgtccggagcatggcggacccccagagctgttttatgacgagacagaagcccggaaatacgttcgcaactcacggatgattgatatccagaccaggatggctgggcgagcattggagcttctttatctgccagagaataagccctgttacctgctggatattggctgtggcactgggctgagtggaagttatctgtcagatgaagggcactattgggtgggcctggatatcagccctgccatgctgggtccggggatcccgagctgtcctgcagctgtaccctgagaactcagagcagttggagctgatcacaacccaggccacaaaggcaggcttctccggtggcatggtggtagactaccctaacagtgccaaagcaaagaaattctacctctgcttgttttctgggccttcgacctttataccagaggggctgagtgaaaatcaggatgaagttgaacccagggagtctgtgttcaccaatgagaggttcccattaaggatgtcgaggcggggaatggtgaggaagagtcgggcatgggtgctggagaagaaggagcggcacaggcgccagggcagggaagtcagacctgacacccagtacaccggccgcaagcgcaagccccgcttctaagtcaccacgcggttctggaaaggcacttgcctctgcacttttctatattgttcagctgacaaagtagtattttagaaaagttctaaagttataaaaatgttttctgcagtaaaaaaaaagttctctgggccgggcgtggtggctcacacctgtaatcccagcaccttgggaggctgaggtgggaggatcatttgaggccaggagtttgagacctgcctgggcaacataatgaaacttcctttccagggagaaaaaaaaaaaaaaaaaaaagctctgagagcatcttattttgtttaaaggcaagaaataaaatttccttttgtggagctct

SEQ ID NO: 326018 - DNA, 1546 bp, Homo sapiens
  misc_feature (631)..(631): n is a, c, g, or t
  misc_feature (684)..(684): n is a, c, g, or t
  misc_feature (696)..(696): n is a, c, g, or t
  misc_feature (715)..(715): n is a, c, g, or t
  misc_feature (720)..(720): n is a, c, g, or t
  misc_feature (734)..(734): n is a, c, g, or t
aggtttttgtgcattgttgatccttctagatgagagaaactatggagaataatttttggagaaaatgttttcaacaagtgctagagcagcccagcctaatagagttgcagatcccagtggttgtttattactagctaagtgatttgcttttacacatctgcttggcagctggtgcaatgataagttgttaccacaaaataacatggtcctgaattacatggaatttttggggtcactttcgaatggttgaatttgttgatcccaacttagaaggggtcagaaaagagtacctcgggatgattgatccgttttttgtttgtttttaacttggcttttttttgttttttgttttttggtctgggggaagtattcacccagaactcctttaccatgtccacttgtgtttctgccttaccagctcacggatgattgatatccagaccaggatggctgggcgagcattggagcttctttatctgccagagaataagccctgttacctgctggatattggtctgtgcgtcactgtggctgagtggaacgttatctggtcagaatgaatgaggcacatacttgggtggagccatgcgatcatcgatgcctcatggcgcattcgcctaggactgggagngactggtgagaacgcgaagatatgagtcagaaagcggcagcacgctgccatangctagcggcggnactcagtcgtggaccgagnggtcncagtcacccacttnctacagagccgagtgaccactagttatggatgtgtgtgccatcgagcgattctcgtgctgatgcttagtggacatcttgtaatagactaacataggaaggtcttgaatgacctcgtgccaacgtcagccgtgtacgtgctattctcttagcttactcttgtttcactggttctcgtccggggatcccgagctgtcctgcagctgtaccctgagaactcagagcagttggagctgatcacaacccaggccacaaaggcaggcttctccggtggcatggtggtagactaccctaacagtgccaaagcaaagaaattctacctctgcttgttttctgggccttcgacctttataccagaggggctgagtgaaaatcaggatgaagttgaacccagggagtctgtgttcaccaatgagaggttcccattaaggatgtcgaggcggggaatggtgaggaagagtcgggcatgggtgctggagaagaaggagcggcacaggcgccagggcagggaagtcagacctgacacccagtacaccggccgcaagcgcaagccccgcttctaagtcaccacgcggttctggaaaggcacttgcctctgcacttttctatattgttcagctgacaaagtagtattttagaaaagttctaaagttataaaaatgttttctgcagtaaaaaaaaagttctctgggccgggcgtggtggctcacacctgtaatcccagcaccttgggaggctgaggtgggaggatcatttgaggccaggagtttgagacctgcctgggcaacataatgaaacttcctttccagggaga

SEQ ID NO: 326019 - DNA, 1353 bp, Homo sapiens
tcagtctaaccacattcaggacacttgtttattttaaataaacaggtgaattaagaaaaagttttttaagtctttacctaatcagtctccaggctctctttttggcctgttcctcccttcctcctggccgcctccctcccatgcctctcatgtgcctcctgcagggctgggcccccacttctcttgggacctgtgctttggggcactccccgtcttcacctccttcctttagctccattgatgactttcccccttgctgcttctcccatggctcacctcttgccccctggttcgccactctgccctcactttgtactctttgtagaatcttgagatgactcctcctgtgtccccagccctgctctgcagctgctcctgctttgtgctggctcatcaggctcaggcatccgaatggcagctccttggcttgccctgtctctggtttctacggatggtcacaggggtcttcggggttaccccgccctctttccttcttccctcatacccctcagtccttccttttcagcccctcctttccatccctgtcttcctgcccccaagctgtgggaccctaagctcctgctgtgaactgtcgactgtgctcttgaagtctaggtgatgatgtgtcattgcattggtagaaagcggcctgcttactgctgcttagctgcttcccgaagagggaacagactgctcgctggtgtttaggtctccatgcccggcccagctctctcctcctctgcccacccaacaacctctgtggcccggatggatgttatcaggaaggagggtgtccagagcggggaattgtgttatagggaaggtggagcatttgagagaaggggcatccgaggccaccagactcggaggtaagcttgccatggattcacatgggggccagtcgggcagccccatccatcagctgtccatcagctcatagctgtgtctccgccacaggttcccattaaggatgtcgaggcggggaatggtgaggaagagtcgggcatgggtgctggagaagaaggagcggcacaggcgccagggcagggaagtcagacctgacacccagtacaccggccgcaagcgcaagccccgcttctaagtcaccacgcggttctggaaaggcacttgcctctgcacttttctatattgttcagctgacaaagtagtattttagaaaagttctaaagttataaaaatgttttctgcagtaaaaaaaaagttctctgggccgggcgtggtggctcacacctgtaatcccagcaccttgggaggctgaggtgggaggatcatttgaggccaggagtttgagacctgcctgggcaacataatgaaacttcctttccagggaga

SEQ ID NO: 326020 - DNA, 522 bp, Homo sapiens
ctttgcactttctcctttcaaattctacctctgcttgttttctgggccttcgacctttataccagaggggctgagtgaaaatcaggatgaagttgaacccagggagtctgtgttcaccaatgagaggttcccattaaggatgtcgaggcggggaatggtgaggaagagtcgggcatgggtgctggagaagaaggagcggcacaggcgccagggcagggaagtcagacctgacacccagtacaccggccgcaagcgcaagccccgcttctaagtcaccacgcggttctggaaaggcacttgcctctgcacttttctatattgttcagctgacaaagtagtattttagaaaagttctaaagttataaaaatgttttctgcagtaaaaaaaaagttctctgggccgggcgtggtggctcacacctgtaatcccagcaccttgggaggctgaggtgggaggatcatttgaggccaggagtttgagacctgcctgggcaacataatgaaacttcctttccagggaga

SEQ ID NO: 326021 - DNA, 1000 bp, Homo sapiens
tgacataaaaaccgggtgccggcaggcgccagtcgcaggtgtgctgctgaggcgtgagaatggcgtcccgcggccggcgtccggagcatggcggacccccagagctgttttatgacgagacagaagcccggaaatacgttcgcaactcacggatgattgatatccagaccaggatggctgggcgagcattggagcttctttatctgccagagaataagccctgttacctgctggatattggctgtggcactgggctgagtggaagttatctgtcagatgaagggcactattgggtgggcctggatatcagccctgccatgctggcatttctgctgtgcagtggctctgtaatgctaacaagaagtctgaaaaccctgccaagcgcctgtactgcttttttgcttctcttttttctgttctcgtccggggatcccgagctgtcctgcagctgtaccctgagaactcagagcagttggagctgatcacaacccaggccacaaaggcaggcttctccggtggcatggtggtagactaccctaacagtgccaaagcaaagaaattctacctctgcttgttttctgggccttcgacctttataccagaggttcccattaaggatgtcgaggcggggaatggtgaggaagagtcgggcatgggtgctggagaagaaggagcggcacaggcgccagggcagggaagtcagacctgacacccagtacaccggccgcaagcgcaagccccgcttctaagtcaccacgcggttctggaaaggcacttgcctctgcacttttctatattgttcagctgacaaagtagtattttagaaaagttctaaagttataaaaatgttttctgcagtaaaaaaaaagttctctgggccgggcgtggtggctcacacctgtaatcccagcaccttgggaggctgaggtgggaggatcatttgaggccaggagtttgagacctgcctgggcaacataatgaaacttcctttccagggaga

SEQ ID NO: 326022 - DNA, 1265 bp, Homo sapiens
tcagtctaaccacattcaggacacttgtttattttaaataaacaggtgaattaagaaaaagttttttaagtctttacctaatcagtctccaggctctctttttggcctgttcctcccttcctcctggccgcctccctcccatgcctctcatgtgcctcctgcagggctgggcccccacttctcttgggacctgtgctttggggcactccccgtcttcacctccttcctttagctccattgatgactttcccccttgctgcttctcccatggctcacctcttgccccctggttcgccactctgccctcactttgtactctttgtagaatcttgagatgactcctcctgtgtccccagccctgctctgcagctgctcctgctttgtgctggctcatcaggctcaggcatccgaatggcagctccttggcttgccctgtctctggtttctacggatggtcacaggggtcttcggggttaccccgccctctttccttcttccctcatacccctcagtccttccttttcagcccctcctttccatccctgtcttcctgcccccaagctgtgggaccctaagctcctgctgtgaactgtcgactgtgctcttgaagtctaggtgatgatgtgtcattgcattggtagaaagcggcctgcttactgctgcttagctgcttcccgaagagggaacagactgctcgctggtgtttaggtctccatgcccggcccagctctctcctcctctgcccacccaacaacctctgtggcccggatggatgttatcaggaaggagggtgtccagagcggggaattgtgttatagggaaggtggagcatttgagagaaggggcatccgaggccaccagactcggaggttcccattaaggatgtcgaggcggggaatggtgaggaagagtcgggcatgggtgctggagaagaaggagcggcacaggcgccagggcagggaagtcagacctgacacccagtacaccggccgcaagcgcaagccccgcttctaagtcaccacgcggttctggaaaggcacttgcctctgcacttttctatattgttcagctgacaaagtagtattttagaaaagttctaaagttataaaaatgttttctgcagtaaaaaaaaagttctctgggccgggcgtggtggctcacacctgtaatcccagcaccttgggaggctgaggtgggaggatcatttgaggccaggagtttgagacctgcctgggcaacataatgaaacttcctttccagggaga

SEQ ID NO: 326023 - DNA, 419 bp, Homo sapiens
  misc_feature (18)..(19): n is a, c, g, or t
  misc_feature (24)..(24): n is a, c, g, or t
  misc_feature (27)..(27): n is a, c, g, or t
attaaggcaggtaccagnnctggngtncgcggcggcgtcggagcatggcggacccccagagctgttttatgacgagacagaagcccggaaatacgttcgcaagtgaggggagcctgaatactgcggggcgtccgggggtcgggaagcggcaagttgcccctgttgctggcgttgcccggaaaggccgtagaatttgggggtgcgggaagggaaggacccgggtgggtgccgatttctgtctctggtaaatcaactttaagttgccgacctctctgggcctcggtacctcagcgttgaggtaggggtgatcgcgcttgctttccgtgggtggttttcaaagtcgaatgtgacaatttgtcctaaacatgtggtaaaagaggcgctgggcggtgggtacgggcgaggggtcagtcctggtg

SEQ ID NO: 326024 - DNA, 254 bp, Homo sapiens
aatgagaggagtcggttggtcgccctgtggccagtcacgtaaaggggggggcggggcggtcgtgggggtggaacatgcgtattactaagcggtcgccgggctgatgacataaaaaccgggtgccggcaggcgccagtcgcaggtgtgctgctgaggcgtgagaatggcgtcccgcggccggcgtccggagcatggcggacccccagagctggtaagtcccggggcccgcggacacccctctccccacttctgcg

SEQ ID NO: 326025 - DNA, 1156 bp, Homo sapiens
tgacataaaaaccgggtgccggcaggcgccagtcgcaggtgtgctgctgaggcgtgagaatggcgtcccgcggccggcgtccggagcatggcggacccccagagctgttttatgacgagacagaagcccggaaatacgttcgcaactcacggatgattgatatccagaccaggatggctgggcgagcattggagcttctttatctgccagagaataagccctgttacctgctggatattggctgtggcactgggctgagtggaagttatctgtcagatgaagggcactattgggtgggcctggatatcagccctgccatgctggatgaggctgtggaccgagagatagagggagacctgctgctgggggatatgggccagggcatcccattcaagccaggcacatttgatggttgcatcagcatttctgctgtgcagtggctctgtaatgctaacaagaagtctgaaaaccctgccaagcgcctgtactgcttttttgcttctcttttttctgttctcgtccggggatcccgagctgtcctgcagctgtaccctgagaactcagagcagttggagctgatcacaacccaggccacaaaggcaggcttctccggtggcatggtggtagactaccctaacagtgccaaagcaaagaaattctacctctgcttgttttctgggccttcgacctttataccagaggggctgagtgaaaatcaggatgaagttgaacccagggagtctgtgttcaccaatgagaggttcccattaaggatgtcgaggcggggaatggtgaggaagagtcgggcatgggtgctggagaagaaggagcggcacaggcgccagggcagggaagtcagacctgacacccagtacaccggccgcaagcgcaagccccgcttctaagtcaccacgcggttctggaaaggcacttgcctctgcacttttctatattgttcagctgacaaagtagtattttagaaaagttctaaagttataaaaatgttttctgcagtaaaaaaaaagttctctgggccgggcgtggtggctcacacctgtaatcccagcaccttgggaggctgaggtgggaggatcatttgaggccaggagtttgagacctgcctgggcaacataatgaaacttcctttccagggaga

SEQ ID NO: 326026 - DNA, 848 bp, Homo sapiens
  misc_feature (18)..(19): n is a, c, g, or t
  misc_feature (24)..(24): n is a, c, g, or t
  misc_feature (27)..(27): n is a, c, g, or t
attaaggcaggtaccagnnctggngtncgcggcggcgtcggagcatggcggacccccagagctgttttatgacgagacagaagcccggaaatacgttcgcaactcacggatgattgatatccagaccaggatggctgggcgagcattggagcttctttatctgccagagaataagccctgttacctgctggatattggctgtggcactgggctgagtggaagttatctgtcagatgaagggcactattgggtgggcctggatatcagccctgccatgctggatgaggctgtggaccgagagatagagggagacctgctgctgggggatatgggccagggcatcccattcaagccaggcacatttgatggttgcatcagcatttctgctgtgcagtggctctgtaatgctaacaagaagtctgaaaaccctgccaagcgcctgtactgcttttttgcttctcttttttctgttctcgtccggggatcccgagctgtcctgcagctgtaccctgagaactcagagcagttggagctgatcacaacccaggccacaaaggcaggcttctccggtggcatggtggtagactaccctaacagtgccaaagcaaagaaattctacctctgcttgttttctgggccttcgacctttataccagaggggctgagtgaaaatcaggatgaagttgaacccagggagtctgtgttcaccaatgagaggttcccattaaggatgtcgaggcggggaatggtgaggaagagtcgggcatgggtgctggagaagaaggagcggcacaggcgccagggcagggagtcagactgaaaccagtaaacgggcggaaggaagccgg

SEQ ID NO: 326027 - DNA, 768 bp, Homo sapiens
tgacataaaaaccgggtgccggcaggcgccagtcgcaggtgtgctgctgaggcgtgagaatggcgtcccgcggccggcgtccggagcatggcggacccccagagctgctcacggatgattgatatccagaccaggatggctgggcgagcattggagcttctttatctgccagagaataagccctgttacctgctggatattggctgtggcactgggctgagtggaagttatctgtcagatgaagggcactattgggtgggcctggatatcagccctgccatgctggatgaggctgtggaccgagagatagagggagacctgctgctgggggatatgggccagggcatcccattcaagccaggcacatttgatggttgcatcagcatttctgctgtgcagtggctctgtaatgctaacaagaagtctgaaaaccctgccaagcgcctgtactgcttttttgcttctcttttttctgttctcgtccggggatcccgagctgtcctgcagctgtaccctgagaactcagagcagttggagctgatcacaacccaggccacaaaggcaggcttctccggtggcatggtggtagactaccctaacagtgccaaagcaaagaaatctacctctgcttgtttctgggccttcgcctttataccagagggctgagtgaaaatcaggatgatgtgaacccaggagttgtgtcccaatgagaggtccataaggatgcagcggaatgggggaaatcgctggtggggaaaaggggagggc

SEQ ID NO: 326028 - DNA, 1295 bp, Homo sapiens
tgacataaaaaccgggtgccggcaggcgccagtcgcaggtgtgctgctgaggcgtgagaatggcgtcccgcggccggcgtccggagcatggcggacccccagagctgttttatgacgagacagaagcccggaaatacgttcgcaactcacggatgattgatatccagaccaggatggctgggcgagcattggagcttctttatctgccagagaataagccctgttacctgctggatattggctgtggcactgggctgagtggaagttatctgtcagatgaagggcactattgggtgggcctggatatcagccctgccatgctggatgaggctgtggaccgagagatagagggagacctgctgctgggggatatgggccagggcatcccattcaagccaggcacatttgatggttgcatcagcatttctgctgtgcagtggctctgtaatgctaacaagaagtctgaaaaccctgccaagcgcctgtactgcttttttgcttctcttttttctgttctcgtccggggatcccgagctgtcctgcagctgtaccctgagaactcagagcagttggagctgatcacaacccaggccacaaaggcaggcttctccggtggcatggtggtagactaccctaacagtgccaaagcaaagaaattctacctctgcttgttttctgggccttcgacctttataccagaggggctgagtgaaaatcaggatgaagttgaacccagggagtctgtgttcaccaatgagagggaaggtggagcatttgagagaaggggcatccgaggccaccagactcggaggtaagcttgccatggattcacatgggggccagtcgggcagccccatccatcagctgtccatcagctcatagctgtgtctccgccacaggttcccattaaggatgtcgaggcggggaatggtgaggaagagtcgggcatgggtgctggagaagaaggagcggcacaggcgccagggcagggaagtcagacctgacacccagtacaccggccgcaagcgcaagccccgcttctaagtcaccacgcggttctggaaaggcacttgcctctgcacttttctatattgttcagctgacaaagtagtattttagaaaagttctaaagttataaaaatgttttctgcagtaaaaaaaaagttctctgggccgggcgtggtggctcacacctgtaatcccagcaccttgggaggctgaggtgggaggatcatttgaggccaggagtttgagacctgcctgggcaacataatgaaacttcctttccagggaga

SEQ ID NO: 326029 - DNA, 1331 bp, Homo sapiens
  misc_feature (1262)..(1262): n is a, c, g, or t
tgacataaaaaccgggtgccggcaggcgccagtcgcaggtgtgctgctgaggcgtgagaatggcgtcccgcggccggcgtccggagcatggcggacccccagagctgttttatgacgagacagaagcccggaaatacgttcgcaactcacggatgattgatatccagaccaggatggctgggcgagcattggagcttctttatctgccagagaataagccctgttacctgctggatattggctgtggcactgggctgagtggaagttatctgtcagatgaagggcactattgggtgggcctggatatcagccctgccatgctggatgaggctgtggaccgagagatagagggagacctgctgctgggggatatgggccagggcatcccattcaagccaggcacatttgatggttgcatcagcatttctgctgtgcagtggctctgtaatgctaacaagaagtctgaaaaccctgccaagcgcctgtactgcttttttgcttctcttttttctgttctcgtccggggatcccgagctgtcctgcagctgtaccctgagaactcagagcagttggagctgatcacaacccaggccacaaaggcaggcttctccggtggcatggtggtagactaccctaacagtgccaaagcaaagaaattctacctctgcttgttttctgggccttcgacctttataccagaggggctgagtgaaaatcaggatgaagttgaacccagggagtctgtgttcaccaatgagagggaaggtggagcatttgagagaaggggcatccgaggccaccagactcggaggtaagcttgccatggattcacatgggggccagtcgggcagccccatccatcagctgtccatcagctcatagctgtgtctccgccacaggttcccattaaggatgtcgaggcggggaatggtgaggaagagtcgggcatgggtgctggagaagaaggagcggcacaggcgccagggcagggaagtcagacctgacacccagtacaccggccgcaagcgcaagccccgcttctaagtcaccacgcggttctggaaaggcacttgcctctgcacttttctatattgttcagctgacaaagtagtattttagaaaagttctaaagttataaaaatgttttctgcagtaaaaaaaaagttctctgggccgggcgtggtggctcacacctgtaatcccagcaagtagctgagactacaggtgcatgccaccatgcctggttaatttttaaaattttnggtagagatgaggtcttcccatgttgttcaggctgatcttgaactcctggcctcaagcaatccccctgc

SEQ ID NO: 326030 - DNA, 1097 bp, Homo sapiens
tgacataaaaaccgggtgccggcaggcgccagtcgcaggtgtgctgctgaggcgtgagaatggcgtcccgcggccggcgtccggagcatggcggacccccagagctgttttatgacgagacagaagcccggaaatacgttcgcaactcacggatgattgatatccagaccaggatggctgggcgagcattggagcttctttatctgccagagaataagccctgttacctgctggatattggctgtggcactgggctgagtggaagttatctgtcagatgaagggcactattgggtgggcctggatatcagccctgccatgctggatgaggctgtggaccgagagatagagggagacctgctgctgggggatatgggccagggcatcccattcaagccaggcacatttgatggttgcatcagcatttctgctgtgcagtggctctgtaatgctaacaagaagtctgaaaaccctgccaagcgcctgtactgcttttttgcttctcttttttctgttctcgtccggggatcccgagctgtcctgcagctgtaccctgagaactcagagcagttggagctgatcacaacccaggccacaaaggcaggcttctccggtggcatggtggtagactaccctaacagtgccaaagcaaagaaattctacctctgcttgttttctgggccttcgacctttataccagaggttcccattaaggatgtcgaggcggggaatggtgaggaagagtcgggcatgggtgctggagaagaaggagcggcacaggcgccagggcagggaagtcagacctgacacccagtacaccggccgcaagcgcaagccccgcttctaagtcaccacgcggttctggaaaggcacttgcctctgcacttttctatattgttcagctgacaaagtagtattttagaaaagttctaaagttataaaaatgttttctgcagtaaaaaaaaagttctctgggccgggcgtggtggctcacacctgtaatcccagcaccttgggaggctgaggtgggaggatcatttgaggccaggagtttgagacctgcctgggcaacataatgaaacttcctttccagggaga

SEQ ID NO: 326031 - DNA, 1149 bp, Homo sapiens
  misc_feature (4)..(4): n is a, c, g, or t
gcgnccgacctaccgcacgctgctgcagctcaccaggatcgtaccccggcctgcaggtgtacaccttcacggagcgcatgatggcggacccccagagctgttttatgacgagacagaagcccggaaatacgttcgcaactcacggatgattgatatccagaccaggatggctgggcgagcattggagcttctttatctgccagagaataagccctgttacctgctggatattggctgtggcactgggctgagtggaagttatctgtcagatgaagggcactattgggtgggcctggatatcagccctgccatgctggatgaggctgtggaccgagagatagagggagacctgctgctgggggatatgggccagggcatcccattcaagccaggcacatttgatggttgcatcagcatttctgctgtgcagtggctctgtaatgctaacaagaagtctgaaaaccctgccaagcgcctgtactgcttttttgcttctcttttttctgttctcgtccggggatcccgagctgtcctgcagctgtaccctgagaactcagagcagttggagctgatcacaacccaggccacaaaggcaggcttctccggtggcatggtggtagactaccctaacagtgccaaagcaaagaaattctacctctgcttgttttctgggccttcgacctttataccagaggggctgagtgaaaatcaggatgaagttgaacccagggagtctgtgttcaccaatgagaggttcccattaaggatgtcgaggcggggaatggtgaggaagagtcgggcatgggtgctggagaagaaggagcggcacaggcgccagggcagggaagtcagacctgacacccagtacaccggccgcaagcgcaagccccgcttctaagtcaccacgcggttctggaaaggcacttgcctctgcacttttctatattgttcagctgacaaagtagtattttagaaaagttctaaagttataaaaatgttttctgcagtaaaaaaaaagttctctgggccgggcgtggtggctcacacctgtaatcccagcaccttgggaggctgaggtgggaggatcatttgaggccaggagtttgagacctgcctgggcaacataatgaaacttcctttccagggaga

SEQ ID NO: 326032 - DNA, 1253 bp, Homo sapiens
tgacataaaaaccgggtgccggcaggcgccagtcgcaggtgtgctgctgaggcgtgagaatggcgtcccgcggccggcgtccggagcatggcggacccccagagctgttttatgacgagacagaagcccggaaatacgttcgcaagtgaggggagcctgaatactgcggggcgtccgggggtcgggaagcggcaagttgcccctgttgctggcgttgcccggaaaggccgtagaatttggggctcacggatgattgatatccagaccaggatggctgggcgagcattggagcttctttatctgccagagaataagccctgttacctgctggatattggctgtggcactgggctgagtggaagttatctgtcagatgaagggcactattgggtgggcctggatatcagccctgccatgctggatgaggctgtggaccgagagatagagggagacctgctgctgggggatatgggccagggcatcccattcaagccaggcacatttgatggttgcatcagcatttctgctgtgcagtggctctgtaatgctaacaagaagtctgaaaaccctgccaagcgcctgtactgcttttttgcttctcttttttctgttctcgtccggggatcccgagctgtcctgcagctgtaccctgagaactcagagcagttggagctgatcacaacccaggccacaaaggcaggcttctccggtggcatggtggtagactaccctaacagtgccaaagcaaagaaattctacctctgcttgttttctgggccttcgacctttataccagaggggctgagtgaaaatcaggatgaagttgaacccagggagtctgtgttcaccaatgagaggttcccattaaggatgtcgaggcggggaatggtgaggaagagtcgggcatgggtgctggagaagaaggagcggcacaggcgccagggcagggaagtcagacctgacacccagtacaccggccgcaagcgcaagccccgcttctaagtcaccacgcggttctggaaaggcacttgcctctgcacttttctatattgttcagctgacaaagtagtattttagaaaagttctaaagttataaaaatgttttctgcagtaaaaaaaaagttctctgggccgggcgtggtggctcacacctgtaatcccagcaccttgggaggctgaggtgggaggatcatttgaggccaggagtttgagacctgcctgggcaacataatgaaacttcctttccagggaga

SEQ ID NO: 326033 - DNA, 1202 bp, Homo sapiens
tgacataaaaaccgggtgccggcaggcgccagtcgcaggtgtgctgctgaggcgtgagaatggcgtcccgcggccggcgtccggagcatggcggacccccagagctgttttatgacgagacagaagcccggaaatacgttcgcaagtgaggggagcctgaatactgcggggcgtccgggggtcgggaagcgctcacggatgattgatatccagaccaggatggctgggcgagcattggagcttctttatctgccagagaataagccctgttacctgctggatattggctgtggcactgggctgagtggaagttatctgtcagatgaagggcactattgggtgggcctggatatcagccctgccatgctggatgaggctgtggaccgagagatagagggagacctgctgctgggggatatgggccagggcatcccattcaagccaggcacatttgatggttgcatcagcatttctgctgtgcagtggctctgtaatgctaacaagaagtctgaaaaccctgccaagcgcctgtactgcttttttgcttctcttttttctgttctcgtccggggatcccgagctgtcctgcagctgtaccctgagaactcagagcagttggagctgatcacaacccaggccacaaaggcaggcttctccggtggcatggtggtagactaccctaacagtgccaaagcaaagaaattctacctctgcttgttttctgggccttcgacctttataccagaggggctgagtgaaaatcaggatgaagttgaacccagggagtctgtgttcaccaatgagaggttcccattaaggatgtcgaggcggggaatggtgaggaagagtcgggcatgggtgctggagaagaaggagcggcacaggcgccagggcagggaagtcagacctgacacccagtacaccggccgcaagcgcaagccccgcttctaagtcaccacgcggttctggaaaggcacttgcctctgcacttttctatattgttcagctgacaaagtagtattttagaaaagttctaaagttataaaaatgttttctgcagtaaaaaaaaagttctctgggccgggcgtggtggctcacacctgtaatcccagcaccttgggaggctgaggtgggaggatcatttgaggccaggagtttgagacctgcctgggcaacataatgaaacttcctttccagggaga

SEQ ID NO: 326034 - DNA, 1255 bp, Homo sapiens
  misc_feature (18)..(19): n is a, c, g, or t
  misc_feature (24)..(24): n is a, c, g, or t
  misc_feature (27)..(27): n is a, c, g, or t
attaaggcaggtaccagnnctggngtncgcggcggcgtcggagcatggcggacccccagagctgttttatgacgagacagaagcccggaaatacgttcgcaagtgaggggagcctgaatactgcggggcgtccgggggtcgggaagcggcaagttgcccctgttgctggcgttgcccggaaaggccgtagaatttgggggtgcgggaagggaaggacccgggtgggtgccgatttctgtctctgctcacggatgattgatatccagaccaggatggctgggcgagcattggagcttctttatctgccagagaataagccctgttacctgctggatattggctgtggcactgggctgagtggaagttatctgtcagatgaagggcactattgggtgggcctggatatcagccctgccatgctggatgaggctgtggaccgagagatagagggagacctgctgctgggggatatgggccagggcatcccattcaagccaggcacatttgatggttgcatcagcatttctgctgtgcagtggctctgtaatgctaacaagaagtctgaaaaccctgccaagcgcctgtactgcttttttgcttctcttttttctgttctcgtccggggatcccgagctgtcctgcagctgtaccctgagaactcagagcagttggagctgatcacaacccaggccacaaaggcaggcttctccggtggcatggtggtagactaccctaacagtgccaaagcaaagaaattctacctctgcttgttttctgggccttcgacctttataccagaggggctgagtgaaaatcaggatgaagttgaacccagggagtctgtgttcaccaatgagaggttcccattaaggatgtcgaggcggggaatggtgaggaagagtcgggcatgggtgctggagaagaaggagcggcacaggcgccagggcagggaagtcagacctgacacccagtacaccggccgcaagcgcaagccccgcttctaagtcaccacgcggttctggaaaggcacttgcctctgcacttttctatattgttcagctgacaaagtagtattttagaaaagttctaaagttataaaaatgttttctgcagtaaaaaaaaagttctctgggccgggcgtggtggctcacacctgtaatcccagcaccttgggaggctgaggtgggaggatcatttgaggccaggagtttgagacctgcctgggcaacataatgaaacttcctttccagggaga

SEQ ID NO: 326035 - DNA, 1059 bp, Homo sapiens
tgacataaaaaccgggtgccggcaggcgccagtcgcaggtgtgctgctgaggcgtgagaatggcgtcccgcggccggcgtccggagcatggcggacccccagagctgttttatgacgagacagaagcccggaaatacgttcgcaactcacggatgattgatatccagaccaggatggctgggcgagcattggagcttctttatctgccagagaataagccctgttacctgctggatattggctgtggcactgggctgagtggaagttatctgtcagatgaagggcactattgggtgggcctggatatcagccctgccatgctggatgaggctgtggaccgagagatagagggagacctgctgctgggggatatgggccagggcatcccattcaagccaggcacatttgatggttgcatcaggtccggggatcccgagctgtcctgcagctgtaccctgagaactcagagcagttggagctgatcacaacccaggccacaaaggcaggcttctccggtggcatggtggtagactaccctaacagtgccaaagcaaagaaattctacctctgcttgttttctgggccttcgacctttataccagaggggctgagtgaaaatcaggatgaagttgaacccagggagtctgtgttcaccaatgagaggttcccattaaggatgtcgaggcggggaatggtgaggaagagtcgggcatgggtgctggagaagaaggagcggcacaggcgccagggcagggaagtcagacctgacacccagtacaccggccgcaagcgcaagccccgcttctaagtcaccacgcggttctggaaaggcacttgcctctgcacttttctatattgttcagctgacaaagtagtattttagaaaagttctaaagttataaaaatgttttctgcagtaaaaaaaaagttctctgggccgggcgtggtggctcacacctgtaatcccagcaccttgggaggctgaggtgggaggatcatttgaggccaggagtttgagacctgcctgggcaacataatgaaacttcctttccagggaga

SEQ ID NO: 326036 - DNA, 1229 bp, Homo sapiens
  misc_feature (18)..(19): n is a, c, g, or t
  misc_feature (24)..(24): n is a, c, g, or t
  misc_feature (27)..(27): n is a, c, g, or t
  misc_feature (94)..(94): n is a, c, g, or t
  misc_feature (314)..(314): n is a, c, g, or t
  misc_feature (367)..(367): n is a, c, g, or t
  misc_feature (379)..(379): n is a, c, g, or t
  misc_feature (398)..(398): n is a, c, g, or t
  misc_feature (403)..(403): n is a, c, g, or t
  misc_feature (417)..(417): n is a, c, g, or t
attaaggcaggtaccagnnctggngtncgcggcggcgtcggagcatggcggacccccagagctgttttatgacgagacagaagcccggaaatcnttcgcaactcacggatgattgatatccagaccaggatggctgggcgagcattggagcttctttatctgccagagaataagccctgttacctgctggatattggtctgtgcgtcactgtggctgagtggaacgttatctggtcagaatgaatgaggcacatacttgggtggagccatgcgatcatcgatgcctcatggcgcattcgcctaggactgggagngactggtgagaacgcgaagatatgagtcagaaagcggcagcacgctgccatangctagcggcggnactcagtcgtggaccgagnggtcncagtcacccacttnctacagagccgagtgaccactagttatggatgtgtgtgccatcgagcgattctcgtgctgatgcttagtggacatcttgtaatagactaacataggaaggtcttgaatgacctcgtgccaacgtcagccgtgtacgtgctattctcttagcttactcttgtttcactggttctcgtccggggatcccgagctgtcctgcagctgtaccctgagaactcagagcagttggagctgatcacaacccaggccacaaaggcaggcttctccggtggcatggtggtagactaccctaacagtgccaaagcaaagaaattctacctctgcttgttttctgggccttcgacctttataccagaggggctgagtgaaaatcaggatgaagttgaacccagggagtctgtgttcaccaatgagaggttcccattaaggatgtcgaggcggggaatggtgaggaagagtcgggcatgggtgctggagaagaaggagcggcacaggcgccagggcagggaagtcagacctgacacccagtacaccggccgcaagcgcaagccccgcttctaagtcaccacgcggttctggaaaggcacttgcctctgcacttttctatattgttcagctgacaaagtagtattttagaaaagttctaaagttataaaaatgttttctgcagtaaaaaaaaagttctctgggccgggcgtggtggctcacacctgtaatcccagcaccttgggaggctgaggtgggaggatcatttgaggccaggagtttgagacctgcctgggcaacataatgaaacttcctttccagggaga

SEQ ID NO: 326037 - DNA, 554 bp, Homo sapiens
taaccctcaccctaaccgcgtaaccctgaccgtaaccgcgccaaagcaaagaaattctacctctgcttgttttctgggccttcgacctttataccagaggggctgagtgaaaatcaggatgaagttgaacccagggagtctgtgttcaccaatgagaggttcccattaaggatgtcgaggcggggaatggtgaggaagagtcgggcatgggtgctggagaagaaggagcggcacaggcgccagggcagggaagtcagacctgacacccagtacaccggccgcaagcgcaagccccgcttctaagtcaccacgcggttctggaaaggcacttgcctctgcacttttctatattgttcagctgacaaagtagtattttagaaaagttctaaagttataaaaatgttttctgcagtaaaaaaaaagttctctgggccgggcgtggtggctcacacctgtaatcccagcaccttgggaggctgaggtgggaggatcatttgaggccaggagtttgagacctgcctgggcaacataatgaaacttcctttccagggaga

SEQ ID NO: 326038 - DNA, 279 bp, Homo sapiens
ctgctctgcaggtcccagaaaggcgtgtcagttccttctcgtgggactggacctcgtccctgtcggaagggtcaggcctgggtgcctgggcttctggagtggggcagatggtttgagaactctccagggtgacctgagtgcactttggttcctgcaggggctgagtgaaaatcaggatgaagttgaacccagggagtctgtgttcaccaatgagaggtaaagcaactgctgaagcctgccccggctgcagcgggggctgccacatttgttagacatgga

SEQ ID NO: 326039 - DNA, 1004 bp, Homo sapiens
cttctttttaaacaaacaaatgcgggtttatttctcagatgatgttcatccgtgaatggtccagggaaggacctttcaccttgtctatatggcattatgtcatcacaagctctgaggcttctcctttccatcctgcgtggacagctaagacctcagttttcaatagcatctagagcagtgggactcagctggggtgatttcgccccccatctccgggggaatgtctgaagacaattttggttacctcaatgagggagtggaggaggatacagtgctactaccaactagtggataaaggccagggatgctgctcaacctcctaccatgtacaggacgtctccccattacaactacccaatccgaagtgtcaactgtgtcaggactaagaaaccctggttttgagtagaaaagggcctggaaagaggggagccaacaaatctgtctgcttcctcacattagtcattggcaaataagcattctgtctctttggctgctgcctcagcacagagagccagaactctatcgggcaccaggataacatctctcagtgaacagagttgacaaggcctatgggaaatgcctgatgggattatcttcagcttgttgagcttctaagtttctttcccttcattctaccctgcaagccaagttctgtaagagaaatgcctgagttctagctcaggttttcttactctgaatttagatctccagacccttcctggccacaattcaaattaaggcaacaaacatataccttccatgaagcacacacagacttttgaaagcaaggacaatgactgcttgaattgaggccttgaggaatgaagctttgaaggaaaagaatactttgtttccagcccccttcccacactcttcatgtgttaaccactgccttcctggaccttggagccacggtgactgtattacatgttgttatagaaaactgattttagagttctgatcgttcaagagaatgattaaatatacatttcctaaaaaaatgt

SEQ ID NO: 326040 - DNA, 1669 bp, Homo sapiens
tgtgagtcaccaaggaaggcagcggcagctccactcagccagtacccagatacgctgggaaccttccccagccatggcttccctggggcagatcctcttctggagcataattagcatcatcattattctggctggagcaattgcactcatcattggctttggtatttcagaagtctctgtctggctttcagcaatgaagggtttggttgtagaagttccaaggcttcccttagcattgatctttgcttcctgaactgcagggagacactccatcacagtcactactgtcgcctcagctgggaacattggggaggatggaatcctgagctgcacttttgaacctgacatcaaactttctgatatcgtgatacaatggctgaaggaaggtgttttaggcttggtccatgagttcaaagaaggcaaagatgagctgtcggagcaggatgaaatgttcagaggccggacagcagtgtttgctgatcaagtgatagttggcaatgcctctttgcggctgaaaaacgtgcaactcacagatgctggcacctacaaatgttatatcatcacttctaaaggcaaggggaatgctaaccttgagtataaaactggagccttcagcatgccggaagtgaatgtggactataatgccagctcagagaccttgcggtgtgaggctccccgatggttcccccagcccacagtggtctgggcatcccaagttgaccagggagccaacttctcggaagtctccaataccagctttgagctgaactctgagaatgtgaccatgaaggttgtgtctgtgctctacaatgttacgatcaacaacacatactcctgtatgattgaaaatgacattgccaaagcaacaggggatatcaaagtgacagaatcggagatcaaaaggcggagtcacctacagctgctaaactcaaaggcttctctgtgtgtctcttctttctttgccatcagctgggcacttctgcctctcagcccttacctgatgctaaaataatgtgcctcggccacaaaaaagcatgcaaagtcattgttacaacagggatctacagaactatttcaccaccagatatgacctagttttatatttctgggaggaaatgaattcatatctagaagtctggagtgagcaaacaagagcaagaaacaaaaagaagccaaaagcagaaggctccaatatgaacaagataaatctatcttcaaagacatattagaagttgggaaaataattcatgtgaactagacaagtgtgttaagagtgataagtaaaatgcacgtggagacaagtgcatccccagatctcagggacctccccctgcctgtcacctggggagtgagaggacaggatagtgcatgttctttgtctctgaatttttagttatatgtgctgtaatgttgctctgaggaagcccctggaaagtctatcccaacatatccacatcttatattccacaaattaagctgtagtatgtaccctaagacgctgctaattgactgccacttcgcaactcaggggcggctgcattttagtaatgggtcaaatgattcactttttatgatgcttccaaaggtgccttggcttctcttcccaactgacaaatgccaaagttgagaaaaatgatcataattttagcataaacagagcagtcggcga

SEQ ID NO: 326041 - DNA, 1808 bp, Homo sapiens
tgtgagtcaccaaggaaggcagcggcagctccactcagccagtacccagatacgctgggaaccttccccagccatggcttccctggggcagatcctcttctggagcataattagcatcatcattattctggctggagcaattgcactcatcattggctttggtatttcagggagacactccatcacagtcactactgtcgcctcagctgggaacattggggaggatggaatcctgagctgcacttttgaacctgacatcaaactttctgatatcgtgatacaatggctgaaggaaggtgttttaggcttggtccatgagttcaaagaaggcaaagatgagctgtcggagcaggatgaaatgttcagaggccggacagcagtgtttgctgatcaagtgatagttggcaatgcctctttgcggctgaaaaacgtgcaactcacagatgctggcacctacaaatgttatatcatcacttctaaaggcaaggggaatgctaaccttgagtataaaactggagccttcagcatgccggaagtgaatgtggactataatgccagctcagagaccttgcggtgtgaggctccccgatggttcccccagcccacagtggtctgggcatcccaagttgaccagggagccaacttctcggaagtctccaataccagctttgagctgaactctgagaatgtgaccatgaaggttgtgtctgtgctctacaatgttacgatcaacaacacatactcctgtatgattgaaaatgacattgccaaagcaacaggggatatcaaagtgacagaatcggagatcaaaaggcggagtcacctacagctgctaaactcaaaggcttctctgtgtgtctcttctttctttgccatcagctgggcacttctgcctctcagcccttacctgatgctaaaataatgtgcctcggccacaaaaaagcatgcaaagtcattgttacaacagggatctacagaactatttcaccaccagatatgacctagttttatatttctgggaggaaatgaattcatatctagaagtctggagtgagcaaacaagagcaagaaacaaaaagaagccaaaagcagaaggctccaatatgaacaagataaatctatcttcaaagacatattagaagttgggaaaataattcatgtgaactagatgtcaactgtgtcaggactaagaaaccctggttttgagtagaaaagggcctggaaagaggggagccaacaaatctgtctgcttcctcacattagtcattggcaaataagcattctgtctctttggctgctgcctcagcacagagagccagaactctatcgggcaccaggataacatctctcagtgaacagagttgacaaggcctatgggaaatgcctgatgggattatcttcagcttgttgagcttctaagtttctttcccttcattctaccctgcaagccaagttctgtaagagaaatgcctgagttctagctcaggttttcttactctgaatttagatctccagacccttcctggccacaattcaaattaaggcaacaaacatataccttccatgaagcacacacagacttttgaaagcaaggacaatgactgcttgaattgaggccttgaggaatgaagctttgaaggaaaagaatactttgtttccagcccccttcccacactcttcatgtgttaaccactgccttcctggaccttggagccacggtgactgtattacatgttgttatagaaaactgattttagagttctgatcgttcaagagaatgattaaatatacatttcctaaaaaaatgt

SEQ ID NO: 326042 - DNA, 1898 bp, Homo sapiens
tgtgagtcaccaaggaaggcagcggcagctccactcagccagtacccagatacgctgggaaccttccccagccatggcttccctggggcagatcctcttctggagcataattagcatcatcattattctggctggagcaattgcactcatcattggctttggtatttcagaagtctctgtctggctttcagcaatgaagggtttggttgtagaagttccaaggcttcccttagcattgatctttgcttcctgaactgcagggagacactccatcacagtcactactgtcgcctcagctgggaacattggggaggatggaatcctgagctgcacttttgaacctgacatcaaactttctgatatcgtgatacaatggctgaaggaaggtgttttaggcttggtccatgagttcaaagaaggcaaagatgagctgtcggagcaggatgaaatgttcagaggccggacagcagtgtttgctgatcaagtgatagttggcaatgcctctttgcggctgaaaaacgtgcaactcacagatgctggcacctacaaatgttatatcatcacttctaaaggcaaggggaatgctaaccttgagtataaaactggagccttcagcatgccggaagtgaatgtggactataatgccagctcagagaccttgcggtgtgaggctccccgatggttcccccagcccacagtggtctgggcatcccaagttgaccagggagccaacttctcggaagtctccaataccagctttgagctgaactctgagaatgtgaccatgaaggttgtgtctgtgctctacaatgttacgatcaacaacacatactcctgtatgattgaaaatgacattgccaaagcaacaggggatatcaaagtgacagaatcggagatcaaaaggcggagtcacctacagctgctaaactcaaaggcttctctgtgtgtctcttctttctttgccatcagctgggcacttctgcctctcagcccttacctgatgctaaaataatgtgcctcggccacaaaaaagcatgcaaagtcattgttacaacagggatctacagaactatttcaccaccagatatgacctagttttatatttctgggaggaaatgaattcatatctagaagtctggagtgagcaaacaagagcaagaaacaaaaagaagccaaaagcagaaggctccaatatgaacaagataaatctatcttcaaagacatattagaagttgggaaaataattcatgtgaactagatgtcaactgtgtcaggactaagaaaccctggttttgagtagaaaagggcctggaaagaggggagccaacaaatctgtctgcttcctcacattagtcattggcaaataagcattctgtctctttggctgctgcctcagcacagagagccagaactctatcgggcaccaggataacatctctcagtgaacagagttgacaaggcctatgggaaatgcctgatgggattatcttcagcttgttgagcttctaagtttctttcccttcattctaccctgcaagccaagttctgtaagagaaatgcctgagttctagctcaggttttcttactctgaatttagatctccagacccttcctggccacaattcaaattaaggcaacaaacatataccttccatgaagcacacacagacttttgaaagcaaggacaatgactgcttgaattgaggccttgaggaatgaagctttgaaggaaaagaatactttgtttccagcccccttcccacactcttcatgtgttaaccactgccttcctggaccttggagccacggtgactgtattacatgttgttatagaaaactgattttagagttctgatcgttcaagagaatgattaaatatacatttcctaaaaaaatgt

SEQ ID NO: 326043 - DNA, 217 bp, Homo sapiens
tgacctcatataataagtactgtcattatcccatttcagagatgagtatttgatgctaccttccagactgacagtgtccaggaaagcagctgcagtggaggtggaagggcagtaggattccctgattggtaagggcagtggaatgtcatggggaagactttgtccttgttggtgtcttgggaagagagcagaacagtgccctgtcagccctgcaggt

SEQ ID NO: 326044 - DNA, 434 bp, Homo sapiens
caccgtgggtgtcagggtcatgtgcgtgtgaactgccagccccgtttcgttgtgttactacagagagaaacacagtggaccttctctagcatgagagcaccatagtctaggaggagtgaaggaaggtctttatttcatgagacttaaaaaaaaaatagcttcaagatatagttttagaaacataagcagacatcttgtggtctgacaacaattcataaatcagatcttaaaactgattttagcagatcttttctataaaatgctgtatttataaaatggaaaaaaggcaggatggtgcagcaaattggccaagcacagattgcatattgacttcatctgacacttttttttgtttgtttgtttttgagatgtagtctcgttctgtcacccaggctggagttgcagtggcgcgatctcggctcactgcaacctcc

SEQ ID NO: 326045 - DNA, 1974 bp, Homo sapiens
cgggaagcgcggcggggcctccagaccggggcgggcttaagggtgacatctgcgctttaaagggtccgggtcagctgactcccgactctgtggagtctagctgccagggtcgcggcagctgcggggagagatgactggggagcgacccagcacggcgctcccggacagacgctgggggccgcggattctgggcttctggggaggctgtagggtttgggtgtttgccgcgatcttcctgctgctgtctctggcagcctcctggtccaaggctgagaacgacttcggtctggtgcagccgctggtgaccatggagcaactgctgtgggtgagcgggagacagatcggctcagtggacaccttccgcatcccgctcatcacagccactccgcggggcactcttctcgcctttgctgaggcgaggaaaatgtcctcatccgatgagggggccaagttcatcgccctgcggaggtccatggaccagggcagcacatggtctcctacagcgttcattgtcaatgatggggatgtccccgatgggctgaaccttggggcagtagtgagcgatgttgagacaggagtagtatttcttttctactccctttgtgctcacaaggccggctgccaggtggcctctaccatgttggtatggagcaaggatgatggtgtttcctggagcacaccccggaatctctccctggatattggcactgaagtgtttgcccctggaccgggctctggtattcagaaacagcgggagccacggaagggccgcctcatcgtgtgtggccatgggacgctggagcgggacggagtcttctgtctcctcagcgatgatcatggtgcctcctggcgctacggaagtggggtcagcggcatcccctacggtcagcccaagcaggaaaatgatttcaatcctgatgaatgccagccctatgagctcccagatggctcagtcgtcatcaatgcccgaaaccagaacaactaccactgccactgccgaattgtcctccgcagctatgatgcctgtgatacactaaggccccgtgatgtgaccttcgaccctgagctcgtggaccctgtggtagctgcaggagctgtagtcaccagctccggcattgtcttcttctccaacccagcacatccagagttccgagtgaacctgaccctgcgatggagcttcagcaatggtacctcatggcggaaagagacagtccagctatggccaggccccagtggctattcatccctggcaaccctggagggcagcatggatggagaggagcaggccccccagctctacgtcctgtatgagaaaggccggaaccactacacagagagcatctccgtggccaaaatcagtgtctatgggacactctgagctgtgccactgccacaggggtattctgccttcaggactctgccttcaggaacacgggtctgtagagggtctgctggagacgcctgaaagacagttccatcttcctttagactccagccttggcaaaatcaccttccctttaccagggaaatcacttcctttaggactgaaagctaggcgtcctctcccacaaaaaagtcctgccctcatctgagaatactgtctttccatatggctaagtgtggccccaccaccctctctgccctcccgggacattgattggtcctgtcttgggcaggtctagtgagctgtagaattgaatcaatgtgaactcagggaactggggaaggctgagcctcctctttggtgttgcggtaagataaccgacagggctggtgaaagtccccagatggcaggatatttggtttcagagtaaggactaggtgcaccaccatgactgactatcaatcaaaatgtttgtaacttaaaatttttaatgaaggataatgaatatttgtagagtctctatggttctgtcaatgcacatcttcgtgtctgttttcctcatgtatccttgtgagcctgggtgagttctg

SEQ ID NO: 326046 - DNA, 1063 bp, Homo sapiens
  misc_feature (939)..(939): n is a, c, g, or t
  misc_feature (944)..(944): n is a, c, g, or t
  misc_feature (948)..(948): n is a, c, g, or t
  misc_feature (954)..(954): n is a, c, g, or t
  misc_feature (975)..(975): n is a, c, g, or t
  misc_feature (977)..(977): n is a, c, g, or t
  misc_feature (992)..(992): n is a, c, g, or t
  misc_feature (996)..(996): n is a, c, g, or t
  misc_feature (1022)..(1022): n is a, c, g, or t
cgggaagcgcggcggggcctccagaccggggcgggcttaagggtgacatctgcgctttaaagggtccgggtcagctgactcccgactctgtggagtctagctgccagggtcgcggcagctgcggggagagatgactggggagcgacccagcacggcgctcccggacagacgctgggggccgcggattctgggcttctggggaggctgtagggtttgggtgtttgccgcgatcttcctgctgctgtctctggcagcctcctggtccaaggctgagaacgacttcggtctggtgcagccgctggtgaccatggagcaactgctgtgggtgagcgggagacagatcggctcagtggacaccttccgcatcccgctcatcacagccactccgcggggcactcttctcgcctttgctgaggcgaggaaaatgtcctcatccgatgagggggccaagttcatcgccctgcggaggtccatggaccagggcagcacatggtctcctacagcgttcattgtcaatgatggggatgtccccgatgggctgaaccttggggcagtagtgagcgatgttgagacaggagtagtatttcttttctactccctttgtgctcacaaggccggctgccaggtggcctctaccatgttggtatggagcaaggatgatggtgtttcctggagcacaccccggaatctctccctggatattggcactgaagtgtttgcccctggaccgggctctggtattcagaaacagcgggagccacggaagggccgcctcatcgtgtgtggccatgggacgctggagcgggacggagtcttctgtctcctcagcgatgatcatggtgcctcctggcgctacggaagtggggtcagcggcatcccctacggtcagcccaagcaggaaaatgatttcaatcctgatgaatgccagagacagccctntgaantccnaaaagnctcagtcgtcaaaatacaagnanacagaccactacccngccnctgcagattatctccgcgctatgaanctgtgaaaactaaaaaacaaaatatgccttcagacctgagc

SEQ ID NO: 326047 - DNA, 2149 bp, Homo sapiens
cgggaagcgcggcggggcctccagaccggggcgggcttaagggtgacatctgcgctttaaagggtccgggtcagctgactcccgactctgtggagtctagctgccagggtcgcggcagctgcggggagagatgactggggagcgacccagcacggcgctcccggacagacgctgggggccgcggattctgggcttctggggaggctgtagggtttgggtgtttgccgcgatcttcctgctgctgtctctggcagcctcctggtccaaggctgagaacgacttcggtctggtgcagccgctggtgaccatggagcaactgctgtgggtgagcgggagacagatcggctcagtggacaccttccgcatcccgctcatcacagccactccgcggggcactcttctcgcctttgctgaggcgaggaaaatgtcctcatccgatgagggggccaagttcatcgccctgcggaggtccatggaccagggcagcacatggtctcctacagcgttcattgtcaatgatggggatgtccccgatgggctgaaccttggggcagtagtgagcgatgttgagacaggagtagtatttcttttctactccctttgtgctcacaaggccggctgccaggtggcctctaccatgttggtatggagcaaggatgatggtgtttcctggagcacaccccggaatctctccctggatattggcactgaagtgtttgcccctggaccgggctctggtattcagaaacagcgggagccacggaagggccgcctcatcgtgtgtggccatgggacgctggagcgggacggagtcttctgtctcctcagcgatgatcatggtgcctcctggcgctacggaagtggggtcagcggcatcccctacggtcagcccaagcaggaaaatgatttcaatcctgatgaatgccagggtcaggagtccatgagatgttccctacccatttgaccctccctgccctccagaacatcatttcacgcacagacccagggtctgactgctccactcagtgccacacacccttgctcccctcggggacagggcattttccctgttccctccctgaggtcctgtcctctcccctcagccctatgagctcccagatggctcagtcgtcatcaatgcccgaaaccagaacaactaccactgccactgccgaattgtcctccgcagctatgatgcctgtgatacactaaggccccgtgatgtgaccttcgaccctgagctcgtggaccctgtggtagctgcaggagctgtagtcaccagctccggcattgtcttcttctccaacccagcacatccagagttccgagtgaacctgaccctgcgatggagcttcagcaatggtacctcatggcggaaagagacagtccagctatggccaggccccagtggctattcatccctggcaaccctggagggcagcatggatggagaggagcaggccccccagctctacgtcctgtatgagaaaggccggaaccactacacagagagcatctccgtggccaaaatcagtgtctatgggacactctgagctgtgccactgccacaggggtattctgccttcaggactctgccttcaggaacacgggtctgtagagggtctgctggagacgcctgaaagacagttccatcttcctttagactccagccttggcaaaatcaccttccctttaccagggaaatcacttcctttaggactgaaagctaggcgtcctctcccacaaaaaagtcctgccctcatctgagaatactgtctttccatatggctaagtgtggccccaccaccctctctgccctcccgggacattgattggtcctgtcttgggcaggtctagtgagctgtagaattgaatcaatgtgaactcagggaactggggaaggctgagcctcctctttggtgttgcggtaagataaccgacagggctggtgaaagtccccagatggcaggatatttggtttcagagtaaggactaggtgcaccaccatgactgactatcaatcaaaatgtttgtaacttaaaatttttaatgaaggataatgaatatttgtagagtctctatggttctgtcaatgcacatcttcgtgtctgttttcctcatgtatccttgtgagcctgggtgagttctg

SEQ ID NO: 326048 - DNA, 1915 bp, Homo sapiens
  misc_feature (1)..(1): n is a, c, g, or t
nggcactatgtaggaggcgtctctcggtgttattcgtcacgtgggcgggtgtggtgtacatcttgtgtgactggcctgtcgttcacaccagcacggcgctcccggacagacgctgggggccgcggattctgggcttctggggaggctgtagggtttgggtgtttgccgcgatcttcctgctgctgtctctggcagcctcctggtccaaggctgagaacgacttcggtctggtgcagccgctggtgaccatggagcaactgctgtgggtgagcgggagacagatcggctcagtggacaccttccgcatcccgctcatcacagccactccgcggggcactcttctcgcctttgctgaggcgaggaaaatgtcctcatccgatgagggggccaagttcatcgccctgcggaggtccatggaccagggcagcacatggtctcctacagcgttcattgtcaatgatggggatgtccccgatgggctgaaccttggggcagtagtgagcgatgttgagacaggagtagtatttcttttctactccctttgtgctcacaaggccggctgccaggtggcctctaccatgttggtatggagcaaggatgatggtgtttcctggagcacaccccggaatctctccctggatattggcactgaagtgtttgcccctggaccgggctctggtattcagaaacagcgggagccacggaagggccgcctcatcgtgtgtggccatgggacgctggagcgggacggagtcttctgtctcctcagcgatgatcatggtgcctcctggcgctacggaagtggggtcagcggcatcccctacggtcagcccaagcaggaaaatgatttcaatcctgatgaatgccagccctatgagctcccagatggctcagtcgtcatcaatgcccgaaaccagaacaactaccactgccactgccgaattgtcctccgcagctatgatgcctgtgatacactaaggccccgtgatgtgaccttcgaccctgagctcgtggaccctgtggtagctgcaggagctgtagtcaccagctccggcattgtcttcttctccaacccagcacatccagagttccgagtgaacctgaccctgcgatggagcttcagcaatggtacctcatggcggaaagagacagtccagctatggccaggccccagtggctattcatccctggcaaccctggagggcagcatggatggagaggagcaggccccccagctctacgtcctgtatgagaaaggccggaaccactacacagagagcatctccgtggccaaaatcagtgtctatgggacactctgagctgtgccactgccacaggggtattctgccttcaggactctgccttcaggaacacgggtctgtagagggtctgctggagacgcctgaaagacagttccatcttcctttagactccagccttggcaaaatcaccttccctttaccagggaaatcacttcctttaggactgaaagctaggcgtcctctcccacaaaaaagtcctgccctcatctgagaatactgtctttccatatggctaagtgtggccccaccaccctctctgccctcccgggacattgattggtcctgtcttgggcaggtctagtgagctgtagaattgaatcaatgtgaactcagggaactggggaaggctgagcctcctctttggtgttgcggtaagataaccgacagggctggtgaaagtccccagatggcaggatatttggtttcagagtaaggactaggtgcaccaccatgactgactatcaatcaaaatgtttgtaacttaaaatttttaatgaaggataatgaatatttgtagagtctctatggttctgtcaatgcacatcttcgtgtctgttttcctcatgtatccttgtgagcctgggtgagttctg

SEQ ID NO: 326049 - DNA, 1949 bp, Homo sapiens
cgggaagcgcggcggggcctccagaccggggcgggcttaagggtgacatctgcgctttaaagggtccgggtcagctgactcccgactctgtggagtctagctgccagggtcgcggcagctgcggggagagatgactggggagcgacccagcacggcgctcccggacagacgctgggggccgcggattctgggcttctggggaggctgtagggtttgggtgtttgccgcgatcttcctgctgctgtctctggcagcctcctggtccaaggctgagaacgacttcggtctggtgcagccgctggtgaccatggagcaactgctgtgggtgagcgggagacagatcggctcagtggacaccttccgcggggcactcttctcgcctttgctgaggcgaggaaaatgtcctcatccgatgagggggccaagttcatcgccctgcggaggtccatggaccagggcagcacatggtctcctacagcgttcattgtcaatgatggggatgtccccgatgggctgaaccttggggcagtagtgagcgatgttgagacaggagtagtatttcttttctactccctttgtgctcacaaggccggctgccaggtggcctctaccatgttggtatggagcaaggatgatggtgtttcctggagcacaccccggaatctctccctggatattggcactgaagtgtttgcccctggaccgggctctggtattcagaaacagcgggagccacggaagggccgcctcatcgtgtgtggccatgggacgctggagcgggacggagtcttctgtctcctcagcgatgatcatggtgcctcctggcgctacggaagtggggtcagcggcatcccctacggtcagcccaagcaggaaaatgatttcaatcctgatgaatgccagccctatgagctcccagatggctcagtcgtcatcaatgcccgaaaccagaacaactaccactgccactgccgaattgtcctccgcagctatgatgcctgtgatacactaaggccccgtgatgtgaccttcgaccctgagctcgtggaccctgtggtagctgcaggagctgtagtcaccagctccggcattgtcttcttctccaacccagcacatccagagttccgagtgaacctgaccctgcgatggagcttcagcaatggtacctcatggcggaaagagacagtccagctatggccaggccccagtggctattcatccctggcaaccctggagggcagcatggatggagaggagcaggccccccagctctacgtcctgtatgagaaaggccggaaccactacacagagagcatctccgtggccaaaatcagtgtctatgggacactctgagctgtgccactgccacaggggtattctgccttcaggactctgccttcaggaacacgggtctgtagagggtctgctggagacgcctgaaagacagttccatcttcctttagactccagccttggcaaaatcaccttccctttaccagggaaatcacttcctttaggactgaaagctaggcgtcctctcccacaaaaaagtcctgccctcatctgagaatactgtctttccatatggctaagtgtggccccaccaccctctctgccctcccgggacattgattggtcctgtcttgggcaggtctagtgagctgtagaattgaatcaatgtgaactcagggaactggggaaggctgagcctcctctttggtgttgcggtaagataaccgacagggctggtgaaagtccccagatggcaggatatttggtttcagagtaaggactaggtgcaccaccatgactgactatcaatcaaaatgtttgtaacttaaaatttttaatgaaggataatgaatatttgtagagtctctatggttctgtcaatgcacatcttcgtgtctgttttcctcatgtatccttgtgagcctgggtgagttctg

SEQ ID NO: 326050 - DNA, 1819 bp, Homo sapiens
cgggaagcgcggcggggcctccagaccggggcgggcttaagggtgacatctgcgctttaaagggtccgggtcagctgactcccgactctgtggagtctagctgccagggtcgcggcagctgcggggagagatgactggggagcgacccagcacggcgctcccggacagacgctgggggccgcggattctgggcttctggggaggctgtagggtttgggtgtttgccgcgatcttcctgctgctgtctctggcagcctcctggtccaaggctgagaacgacttcggtctggtgcagccgctggtgaccatggagcaactgctgtgggtgagcgggagacagatcggctcagtggacaccttccgcatcccgctcatcacagccactccgcggggcactcttctcgcctttgctgaggcgaggaaaatgtcctcatccgatgagggggccaagttcatcgccctgcggaggtccatggaccagggcagcacatggtctcctacagcgttcattgtcaatgatggggatgtccccgatgggctgaaccttggggcagtagtgagcgatgttgagacaggagtagtatttcttttctactccctttgtgctcacaaggccggctgccaggtggcctctaccatgttggtatggagcaaggatgatggtgtttcctggagcacaccccggaatctctccctggatattggcactgaagtgtttgcccctggaccgggctctggtattcagaaacagcgggagccacggaagggccgcctcatcgtgtgtggccatgggacgctggagcgggacggagtcttctgtctcctcagcgatgatcatggtgcctcctggcgctacggaagtggggtcagcggcatcccctacggtcagcccaagcaggaaaatgatttcaatcctgatgaatgccagccctatgagctcccagatggctcagtcgtcatcaatgcccgaaaccagaacaactaccactgccactgccgaattgtcctccgcagctatgatgcctgtgatacactaaggccccgtgatgtgaccttcgaccctgagctcgtggaccctgtggtagctgcaggagctgtagtcaccagctccggcattgtcttcttctccaacccagcacatccagagttccgagtgaacctgaccctgcgatggagcttcagcaatggtacctcatggcggaaagagacagtccagctatggccaggccccagtggctattcatccctggcaaccctggagggcagcatggatggagaggagcaggccccccagctctacgtcctgtatgagaaaggccggaaccactacacagagagcatctccgtggccaaaatcagtgtctatgggacactctgagctgtgccactgccacaggggtattctgccttcaggactctgccttcaggaacacgggtctgtagagggtctgctggagacgcctgaaagacagttccatcttcctttagactccagccttggcaaaatcaccttccctttaccagggaaatcacttcctttaggactgaaagctaggcgtccctctctgccctcccgggacattgattggtcctgtcttgggcaggtctagtgagctgtagaattgaatcaatgtgaactcagggaactggggaaggctgagcctcctctttggtgttgcggtaagataaccgacagggctggtgaaagtccccagatggcaggatatttggtttcagagtaaggactaggtgcaccaccatgactgactatcaatcaaaatgtttgtaacttaaaatttttaatgaaggataatgaata

SEQ ID NO: 326051 - DNA, 1494 bp, Homo sapiens
cgggaagcgcggcggggcctccagaccggggcgggcttaagggtgacatctgcgctttaaagggtccgggtcagctgactcccgactctgtggagtctagctgccagggtcgcggcagctgcggggagagatgactggggagcgacccagcacggcgctcccggacagacgctgggggccgcggattctgggcttctggggaggctgtagggtttgggtgtttgccgcgatcttcctgctgctgtctctggcagcctcctggtccaaggctgagaacgacttcggtctggtgcagccgctggtgaccatggagcaactgctgtgggtgagcgggagacagatcggctcagtggacaccttccgcatcccgctcatcacagccactccgcggggcactcttctcgcctttgctgaggcgaggaaaatgtcctcatccgatgagggggccaagttcatcgccctgcggaggtccatggaccagggcagcacatggtctcctacagcgttcattgtcaatgatggggatgtccccgatgggctgaaccttggggcagtagtgagcgatgttgagacaggagtagtatttcttttctactccctttgtgctcacaaggccggctgccaggtggcctctaccatgttggtatggagcaaggatgatggtgtttcctggagcacaccccggaatctctccctggatattggcactgaagtgtttgcccctggaccgggctctggtattcagaaacagcgggagccacggaagggccgcctcatcgtgtgtggccatgggacgctggagcgggacggagtcttctgtctcctcagcgatgatcatggtgcctcctggcgctacggaagtggggtcagcggcatcccctacggtcagcccaagcaggaaaatgatttcaatcctgatgaatgccagccctatgagctcccagatggctcagtcgtcatcaatgcccgaaaccagaacaactaccactgccactgccgaattgtcctccgcagctatgatgcctgtgatacactaaggccccgtgatgtgaccttcgaccctgagctcgtggaccctgtggtagctgcaggagctgtagtcaccagctccggcattgtcttcttctccaacccagcacatccagagttcccctggagggcagcatggatggagaggagcaggccccccagctctacgtcctgtatgagaaaggccggaaccactacacagagagcatctccgtggccaaaatcagtgtctatgggacactctgagctgtgccactgccacaggggtattctgccttcaggactctgccttcaggaacacgggtctgtagagggtctgctggagacgcctgaaagacagttccatcttcctttagactccagccttggatatttggtttcagagtaaggactaggtgcaccaccatgactgactatcaatcaaaatgtttgtaacttaaaatttttaatgaaggataatgaata

SEQ ID NO: 326052 - DNA, 1356 bp, Homo sapiens
cgggaagcgcggcggggcctccagaccggggcgggcttaagggtgacatctgcgctttaaagggtccgggtcagctgactcccgactctgtggagtctagctgccagggtcgcggcagctgcggggagagatgactggggagcgacccagcacggcgctcccggacagacgctgggggccgcggattctgggcttctggggaggctgtagggtttgggtgtttgccgcgatcttcctgctgctgtctctggcagcctcctggtccaaggctgagaacgacttcggtctggtgcagccgctggtgaccatggagcaactgctgtgggtgagcgggagacagatcggctcagtggacaccttccgcatcccgctcatcacagccactccgcggggcactcttctcgcctttgctgaggcgaggaaaatgtcctcatccgatgagggggccaagttcatcgccctgcggaggtccatggaccagggcagcacatggtctcctacagcgttcattgtcaatgatggggatgtccccgatgggctgaaccttggggcagtagtgagcgatgttgagacaggagtagtatttcttttctactccctttgtgctcacaaggccggctgccaggtggcctctaccatgttggtatggagcaaggatgatggtgtttcctggagcacaccccggaatctctccctggatattggcactgaagtgtttgcccctggaccgggctctggtattcagaaacagcgggagccacggaagggccgcctcatcgtgtgtggccatgggacgctggagcgggacggagtcttctgtctcctcagcgatgatcatggtgcctcctggcgctacggaagtggggtcagcggcatcccctacggtcagcccaagcaggaaaatgatttcaatcctgatgaatgccagccctatgagctcccagatggctcagtcgtcatcaatggcaaaatcaccttccctttaccagggaaatcacttcctttaggactgaaagctaggcgtcctctcccacaaaaaagtcctgccctcatctgagaatactgtctttccatatggctaagtgtggccccaccaccctctctgccctcccgggacattgattggtcctgtcttgggcaggtctagtgagctgtagaattgaatcaatgtgaactcagggaactggggaaggctgagcctcctctttggtgttgcggtaagataaccgacagggctggtgaaagtccccagatggcaggatatttggtttcagagtaaggactaggtgcaccaccatgactgactatcaatcaaaatgtttgtaacttaaaatttttaatgaaggataatgaata

SEQ ID NO: 326053 - DNA, 1444 bp, Homo sapiens
cgggaagcgcggcggggcctccagaccggggcgggcttaagggtgacatctgcgctttaaagggtccgggtcagctgactcccgactctgtggagtctagctgccagggtcgcggcagctgcggggagagatgactggggagcgacccagcacggcgctcccggacagacgctgggggccgcggattctgggcttctggggaggctgtagggtttgggtgtttgccgcgatcttcctgctgctgtctctggcagcctcctggtccaaggctgagaacgacttcggtctggtgcagccgctggtgaccatggagcaactgctgtgggtgagcgggagacagatcggctcagtggacaccttccgcatcccgctcatcacagccactccgcggggcactcttctcgcctttgctgaggcgaggaaaatgtcctcatccgatgagggggccaagttcatcgccctgcggaggtccatggaccagggcagcacatggtctcctacagcgttcattgtcaatgatggggatgtccccgatgggctgaaccttggggcagtagtgagcgatgttgagacaggagtagtatttcttttctactccctttgtgctcacaaggccggctgccaggtggcctctaccatgttggtatggagcaaggatgatggtgtttcctggagcacaccccggaatctctccctggatattggcactgaagtgtttgcccctggaccgggctctggtattcagaaacagcgggagccacggaagggccgcctcatcgtgtgtggccatgggacgctggagcgggacggagtcttctgtctcctcagcgatgatcatggtgcctcctggcgctacggaagtggggtcagcggcatcccctacggtcagcccaagcaggaaaatgatttcaatcctgatgaatgccagggtcaggagtccatgagatgttccctacccatttgaccctccctgccctccagaacatcatttcacgcacagacccagggtctgactgctccactcagtgccacacacccttgctcccctcggggacagggcattttccctgttccctccctgaggtcctgtcctctcccctcagccctatgagctcccagatggctcagtcgtcatcaatgcccgaaaccagaacaactaccactgccactgccgaattgtcctccgcagctatgatgcctgtgatacactaaggccccgtgatgtgaccttcgaccctgagctcgtggaccctgtggtagctgcaggagctgtagtcaccagctccggcattgtcttcttctccaacccagcacatccagagttccgagtgaacctgaccctgcgatggagcttcagcaatggtacctcatggcggaaagagacagtccagctatagcccaggaggtcgacgcggccgcgaatttagtagtagtaggcggccgc

SEQ ID NO: 326054 - DNA, 570 bp, Homo sapiens
tcagtttgagagcaggtactgtttattaaccaaccagcttagaaaaataatcatggtagacaccttagttccatcttcctttagactccagccttggcaaaatcaccttccctttaccagggaaatcacttcctttaggactgaaagctaggcgtcctctcccacaaaaaagtcctgccctcatctgagaatactgtctttccatatggctaagtgtggccccaccaccctctctgccctcccgggacattgattggtcctgtcttgggcaggtctagtgagctgtagaattgaatcaatgtgaactcagggaactggggaaggctgagcctcctctttggtgttgcggtaagataaccgacagggctggtgaaagtccccagatggcaggatatttggtttcagagtaaggactaggtgcaccaccatgactgactatcaatcaaaatgtttgtaacttaaaatttttaatgaaggataatgaatatttgtagagtctctatggttctgtcaatgcacatcttcgtgtctgttttcctcatgtatccttgtgagcctgggtgagttctg

SEQ ID NO: 326055 - DNA, 562 bp, Homo sapiens
ccgcagatgagaatggagttagagagacctggtggaaatgagattactcgaggaggctccacctcttatggaaccggatcagagacgggcaaaatcaccttccctttaccagggaaatcacttcctttaggactgaaagctaggcgtcctctcccacaaaaaagtcctgccctcatctgagaatactgtctttccatatggctaagtgtggccccaccaccctctctgccctcccgggacattgattggtcctgtcttgggcaggtctagtgagctgtagaattgaatcaatgtgaactcagggaactggggaaggctgagcctcctctttggtgttgcggtaagataaccgacagggctggtgaaagtccccagatggcaggatatttggtttcagagtaaggactaggtgcaccaccatgactgactatcaatcaaaatgtttgtaacttaaaatttttaatgaaggataatgaatatttgtagagtctctatggttctgtcaatgcacatcttcgtgtctgttttcctcatgtatccttgtgagcctgggtgagttctg

SEQ ID NO: 326056 - DNA, 190 bp, Homo sapiens
ccagctccggcattgtcttcttctccaacccagcacatccagagttccgtgagtgcctcatgggtggggtcagcagggagagccctgtgtctagacaaggcctgggcagagaccctctctccctgactctcctgctctccccaggagtgaacctgaccctgcgatggagcttcagcaatggtacctcatg

SEQ ID NO: 326057 - DNA, 299 bp, Homo sapiens
atactgtctttccatatggctaagtgtggccccaccaccctctctgccctcccgggacattgattggtcctgtcttgggcaggtctagtgagctgtagaattgaatcaatgtgaactcagggaactggggaaggctgagcctcctctttggtgttgcggtaagataaccgacagggctggtgaaagtccccagatggcaggatatttggtttcagagtaaggactaggtgcaccaccatgactgactatcaatcaaaatgtttgtaacttaaaatttttaatgaaggataatgaatatt

SEQ ID NO: 326058 - DNA, 1891 bp, Homo sapiens
cgggaagcgcggcggggcctccagaccggggcgggcttaagggtgacatctgcgctttaaagggtccgggtcagctgactcccgactctgtggagtctagctgccagggtcgcggcagctgcggggagagatgactggggagcgacccagcacggcgctcccggacagacgctgggggccgcggattctgggcttctggggaggctgtagggtttgggtgtttgccgcgatcttcctgctgctgtctctggcagcctcctggtccaaggctgagaacgacttcggtctggtgcagccgctggtgaccatggagcaactgctgtgggtgagcgggagacagatcggctcagtggacaccttccgcatcccgctcatcacagccactccgcggggcactcttctcgcctttgctgaggcgaggaaaatgtcctcatccgatgagggggccaagttcatcgccctgcggaggtccatggaccagggcagcacatggtctcctacagcgttcattgtcaatgatggggatgtccccgatgggctgaaccttggggcagtagtgagcgatgttgagacaggagtagtatttcttttctactccctttgtgctcacaaggccggctgccaggtggcctctaccatgttggtatggagcaaggatgatggtgtttcctggagcacaccccggaatctctccctggatattggcactgaagtgtttgcccctggaccgggctctggtattcagaaacagcgggagccacggaagggccgcctcatcgtgtgtggccatgggacgctggagcgggacggagtcttctgtctcctcagcgatgatcatggtgcctcctggcgctacggaagtggggtcagcggcatcccctacggtcagcccaagcaggaaaatgatttcaatcctgatgaatgccagccctatgagctcccagatggctcagtcgtcatcaatgcccgaaaccagaacaactaccactgccactgccgaattgtcctccgcagctatgatgcctgtgatacactaaggccccgtgatgtgaccttcgaccctgagctcgtggaccctgtggtagctgcaggagctgtagtcaccagctccggcattgtcttcttctccaacccagcacatccagagttccgagtgaacctgaccctgcgatggagcttcagcaatggtacctcatggcggaaagagacagtccagctatggccaggccccagtggctattcatccctggcaaccctggagggcagcatggatggagaggagcaggccccccagctctacgtcctgtatgagaaaggccggaaccactacacagagagcatctccgtggccaaaatcagtgtctatgggacactctgagctgtgccactgccacaggggtattctgccttcaggactctgccttcaggaacacgggtctgtagagggtctgctggagacgcctgaaagacagttccatcttcctttagactccagccttggcaaaatcaccttccctttaccagggaaatcacttcctttaggactgaaagctaggcgtcctctcccacaaaaaagtcctgccctcatctgagaatactgtctttccatatggctaagtgtggccccaccaccctctctgccctcccgggacattgattggtcctgtcttgggcaggtctagtgagctgtagaattgaatcaatgtgaactcagggaactggggaaggctgagcctcctctttggtgttgcggtaagataaccgacagggctggtgaaagtccccagatggcaggatatttggtttcagagtaaggactaggtgcaccaccatgactgactatcaatcaaaatgtttgtaacttaaaatttttaatgaaggataatgaata

SEQ ID NO: 326059 - DNA, 1857 bp, Homo sapiens
  misc_feature (1835)..(1835): n is a, c, g, or t
cgggaagcgcggcggggcctccagaccggggcgggcttaagggtgacatctgcgctttaaagggtccgggtcagctgactcccgactctgtggagtctagctgccagggtcgcggcagctgcggggagagatgactggggagcgacccagcacggcgctcccggacagacgctgggggccgcggattctgggcttctggggaggctgtagggtttgggtgtttgccgcgatcttcctgctgctgtctctggcagcctcctggtccaaggctgagaacgacttcggtctggtgcagccgctggtgaccatggagcaactgctgtgggtgagcgggagacagatcggctcagtggacaccttccgcatcccgctcatcacagccactccgcggggcactcttctcgcctttgctgaggcgaggaaaatgtcctcatccgatgagggggccaagttcatcgccctgcggaggtccatggaccagggcagcacatggtctcctacagcgttcattgtcaatgatggggatgtccccgatgggctgaaccttggggcagtagtgagcgatgttgagacaggagtagtatttcttttctactccctttgtgctcacaaggccggctgccaggtggcctctaccatgttggtatggagcaaggatgatggtgtttcctggagcacaccccggaatctctccctggatattggcactgaagtgtttgcccctggaccgggctctggtattcagaaacagcgggagccacggaagggccgcctcatcgtgtgtggccatgggacgctggagcgggacggagtcttctgtctcctcagcgatgatcatggtgcctcctggcgctacggaagtggggtcagcggcatcccctacggtcagcccaagcaggaaaatgatttcaatcctgatgaatgccagccctatgagctcccagatggctcagtcgtcatcaatgcccgaaaccagaacaactaccactgccactgccgaattgtcctccgcagctatgatgcctgtgatacactaaggccccgtgatgtgaccttcgaccctgagctcgtggaccctgtggtagctgcaggagctgtagtcaccagctccggcattgtcttcttctccaacccagcacatccagagttccgagtgaacctgaccctgcgatggagcttcagcaatggtacctcatggcggaaagagacagtccagctatggccaggccccagtggctattcatccctggcaaccctggagggcagcatggatggagaggagcaggccccccagctctacgtcctgtatgagaaaggccggaaccactacacagagagcatctccgtggccaaaatcagtgtctatgggacactctgagctgtgccactgccacaggggtattctgccttcaggactctgccttcaggaacacgggtctgtagagggtctgctggagacgcctgaaagacagttccatcttcctttagactccagccttggcaaaatcaccttccctttaccagggaaatcacttcctttaggactgaaagctaggcgtcctctcccacaaaaaagtcctgccctcatctgagaatactgtctttccatatggctaagtgtggccccaccaccctctctgccctcccgggacattgattggtcctgtcttgggcaggtctagtgagctgtagaattgaatcaatgtgaactcagggaactggggaaggctgagcctcctctttggtgttgcggtaagataaccgacagggctggtgaaagtccccagatggcagtctaaaggaagatgaaactgtctttcaggcgtctccagcanaccctctacagacccgtgttcc

SEQ ID NO: 326060 - DNA, 2026 bp, Homo sapiens
cgggaagcgcggcggggcctccagaccggggcgggcttaagggtgacatctgcgctttaaagggtccgggtcagctgactcccgactctgtggagtctagctgccagggtcgcggcagctgcggggagagatgactggggagcgacccagcacggcgctcccggacagacgctgggggccgcggattctgggcttctggggaggctgtagggtttgggtgtttgccgcgatcttcctgctgctgtctctggcagcctcctggtccaaggctgagaacgacttcggtctggtgcagccgctggtgaccatggagcaactgctgtgggtgagcgggagacagatcggctcagtggacaccttccgcatcccgctcatcacagccactccgcggggcactcttctcgcctttgctgaggcgaggaaaatgtcctcatccgatgagggggccaagttcatcgccctgcggaggtccatggaccagggcagcacatggtctcctacagcgttcattgtcaatgatggggatgtccccgatgggctgaaccttggggcagtagtgagcgatgttgagacaggagtagtatttcttttctactccctttgtgctcacaaggccggctgccaggtggcctctaccatgttggtatggagcaaggatgatggtgtttcctggagcacaccccggaatctctccctggatattggcactgaagtgtttgcccctggaccgggctctggtattcagaaacagcgggagccacggaagggccgcctcatcgtgtgtggccatgggacgctggagcgggacggagtcttctgtctcctcagcgatgatcatggtgcctcctggcgctacggaagtggggtcagcggcatcccctacggtcagcccaagcaggaaaatgatttcaatcctgatgaatgccagccctatgagctcccagatggctcagtcgtcatcaatgcccgaaaccagaacaactaccactgccactgccgaattgtcctccgcagctatgatgcctgtgatacactaaggccccgtgatgtgaccttcgaccctgagctcgtggaccctgtggtagctgcaggagctgtagtcaccagctccggcattgtcttcttctccaacccagcacatccagagttccagtgcagaccctgaaccctgtctaatgagacgcattcatgccaactggctatccgtctatgcgccgtcaaacgcagaacatgctcttagcctaatggcccacggaccccagtctgtacgtactgtcatctccctatgtggcaagcccgtgtggaggagcagctcatcggcatgtgaggaggagcaggccccccagctctacgtcctgtatgagaaaggccggaaccactacacagagagcatctccgtggccaaaatcagtgtctatgggacactctgagctgtgccactgccacaggggtattctgccttcaggactctgccttcaggaacacgggtctgtagagggtctgctggagacgcctgaaagacagttccatcttcctttagactccagccttggcaaaatcaccttccctttaccagggaaatcacttcctttaggactgaaagctaggcgtcctctcccacaaaaaagtcctgccctcatctgagaatactgtctttccatatggctaagtgtggccccaccaccctctctgccctcccgggacattgattggtcctgtcttgggcaggtctagtgagctgtagaattgaatcaatgtgaactcagggaactggggaaggctgagcctcctctttggtgttgcggtaagataaccgacagggctggtgaaagtccccagatggcaggatatttggtttcagagtaaggactaggtgcaccaccatgactgactatcaatcaaaatgtttgtaacttaaaatttttaatgaaggataatgaatatttgtagagtctctatggttctgtcaatgcacatcttcgtgtctgttttcctcatgtatccttgtgagcctgggtgagttctg

SEQ ID NO: 326061 - DNA, 1563 bp, Homo sapiens
ctctctgcaggatcttcattggatagtggatgagggaccaagttcatcgccctgcggaggccatggaccaggcagcacatggtctcctacagcgttcattgtcaatgatggggatgtccccgatgggctgaaccttggggcagtagtgagcgatgttgagacaggagtagtatttcttttctactccctttgtgctcacaaggccggctgccaggtggcctctaccatgttggtatggagcaaggatgatggtgtttcctggagcacaccccggaatctctccctggatattggcactgaagtgtttgcccctggaccgggctctggtattcagaaacagcgggagccacggaagggccgcctcatcgtgtgtggccatgggacgctggagcgggacggagtcttctgtctcctcagcgatgatcatggtgcctcctggcgctacggaagtggggtcagcggcatcccctacggtcagcccaagcaggaaaatgatttcaatcctgatgaatgccagccctatgagctcccagatggctcagtcgtcatcaatgcccgaaaccagaacaactaccactgccactgccgaattgtcctccgcagctatgatgcctgtgatacactaaggccccgtgatgtgaccttcgaccctgagctcgtggaccctgtggtagctgcaggagctgtagtcaccagctccggcattgtcttcttctccaacccagcacatccagagttccgagtgaacctgaccctgcgatggagcttcagcaatggtacctcatggcggaaagagacagtccagctatggccaggccccagtggctattcatccctggcaaccctggagggcagcatggatggagaggagcaggccccccagctctacgtcctgtatgagaaaggccggaaccactacacagagagcatctccgtggccaaaatcagtgtctatgggacactctgagctgtgccactgccacaggggtattctgccttcaggactctgccttcaggaacacgggtctgtagagggtctgctggagacgcctgaaagacagttccatcttcctttagactccagccttggcaaaatcaccttccctttaccagggaaatcacttcctttaggactgaaagctaggcgtcctctcccacaaaaaagtcctgccctcatctgagaatactgtctttccatatggctaagtgtggccccaccaccctctctgccctcccgggacattgattggtcctgtcttgggcaggtctagtgagctgtagaattgaatcaatgtgaactcagggaactggggaaggctgagcctcctctttggtgttgcggtaagataaccgacagggctggtgaaagtccccagatggcaggatatttggtttcagagtaaggactaggtgcaccaccatgactgactatcaatcaaaatgtttgtaacttaaaatttttaatgaaggataatgaatatttgtagagtctctatggttctgtcaatgcacatcttcgtgtctgttttcctcatgtatccttgtgagcctgggtgagttctg

SEQ ID NO: 326062 - DNA, 1269 bp, Homo sapiens
cgggaagcgcggcggggcctccagaccggggcgggcttaagggtgacatctgcgctttaaagggtccgggtcagctgactcccgactctgtggagtctagctgccagggtcgcggcagctgcggggagagatgactggggagcgacccagcacggcgctcccggacagacgctgggggccgcggattctgggcttctggggaggctgtagggtttgggtgtttgccgcgatcttcctgctgctgtctctggcagcctcctggtccaaggctgagaacgacttcggtctggtgcagccgctggtgaccatggagcaactgctgtgggtgagcgggagacagatcggctcagtggacaccttccgcatcccgctcatcacagccactccgcggggcactcttctcgcctttgctgaggcgaggaaaatgtcctcatccgatgagggggccaagttcatcgccctgcggaggtccatggaccagggcagcacatggtctcctacagcgttcattgtcaatgatggggatgtccccgatgggctgaaccttggggcagtagtgagcgatgttgagacaggagtagtatttcttttctactccctttgtgctcacaaggccggctgccaggtggcctctaccatgttggtatggagcaaggatgatggtgtttcctggagcacaccccggaatctctccctggatattggcactgaagtgtttgcccctggaccgggctctggtattcagaaacagcgggagccacggaagggccgcctcatcgtgtgtggccatgggacgctggagcgggacggagtcttctgtctcctcagcgatgatcatggtgcctcctggcgctacggaagtggggtcagcggcatcccctacggtcagcccaagcaggaaaatgatttcaatcctgatgaatgccagccctatgagctcccagatggctcagtcgtcatcaatgcccgaaaccagaacaactaccactgccactgccgaattgtcctccgcagctatgatgcctgtgatacactaaggccccgtgatgtgaccttcgaccctgagctcgtggaccctgtggtagctgcaggagctgtagtcaccagctccggcattgtcttcttctccaacccagcacatccagagttccgagtgaacctgaccctgcgatggagcttcagcaatggtacctcatggcggaaagagacagtccagctatagcccaggaggtcgacgcggccgcgaatttagtagtagtaggcggccgc

SEQ ID NO: 326063 - DNA, 811 bp, Homo sapiens
gagagggtggtctggccacacttagcaatatgggaagacagtattctcagatgaggtggccaggccccagtggctattcatccctggcaaccctggagggcagcatggatggagaggagcaggccccccagctctacgtcctgtatgagaaaggccggaaccactacacagagagcatctccgtggccaaaatcagtgtctatgggacactctgagctgtgccactgccacaggggtattctgccttcaggactctgccttcaggaacacgggtctgtagagggtctgctggagacgcctgaaagacagttccatcttcctttagactccagccttggcaaaatcaccttccctttaccagggaaatcacttcctttaggactgaaagctaggcgtcctctcccacaaaaaagtcctgccctcatctgagaatactgtctttccatatggctaagtgtggccccaccaccctctctgccctcccgggacattgattggtcctgtcttgggcaggtctagtgagctgtagaattgaatcaatgtgaactcagggaactggggaaggctgagcctcctctttggtgttgcggtaagataaccgacagggctggtgaaagtccccagatggcaggatatttggtttcagagtaaggactaggtgcaccaccatgactgactatcaatcaaaatgtttgtaacttaaaatttttaatgaaggataatgaatatttgtagagtctctatggttctgtcaatgcacatcttcgtgtctgttttcctcatgtatccttgtgagcctgggtgagttctg

SEQ ID NO: 326064 - DNA, 1092 bp, Homo sapiens
cgggaagcgcggcggggcctccagaccggggcgggcttaagggtgacatctgcgctttaaagggtccgggtcagctgactcccgactctgtggagtctagctgccagggtcgcggcagctgcggggagagatgactggggagcgacccagcacggcgctcccggacagacgctgggggccgcggattctgggcttctggggaggctgtagggtttgggtgtttgccgcgatcttcctgctgctgtctctggcagcctcctggtccaaggctgagaacgacttcggtctggtgcagccgctggtgaccatggagcaactgctgtgggtgagcgggagacagatcggctcagtggacaccttccgcatcccgctcatcacagccactccgcggggcactcttctcgcctttgctgaggcgaggaaaatgtcctcatccgatgagggggccaagttcatcgccctgcggaggtccatggaccagggcagcacatggtctcctacagcgttcattgtcaatgatggggatgtccccgatgggctgaaccttggggcagtagtgagcgatgttgagacaggagtagtatttcttttctactccctttgtgctcacaaggccggctgccaggtggcctctaccatgttggtatggagcaaggatgatggtgtttcctggagcacaccccggaatctctccctggatattggcactgaagtgtttgcccctggaccgggctctggtattcagaaacagcgggagccacggaagggccgcctcatcgtgtgtggccatgggacgctggagcgggacggagtcttctgtctcctcagcgatgatcatggtgcctcctggcgctacggaagtggggtcagcggcatcccctacggtcagcccaagcaggaaaatgatttcaatcctgatgaatgccaggctgagcctcctctttggtgttgcggtaagataaccgacagggctggtgaaagtccccagatggcaggatatttggtttcagagtaaggactaggtgcaccaccatgactgactatcaatcaaaatgtttgtaacttaaaatttttaatgaaggataatgaata

SEQ ID NO: 326065 - DNA, 5180 bp, Homo sapiens
ggactgcgaaaggagcagggttgcggagctagggctccagcctgcggccgcgcattcttgcgtctggccagccgcgagctctaagggtcggccccgcccggtccgcccccgcggctccctgccaggctctcgcgggcgcgctcggggtggggcctcgcggctggcggagatgcggccggggctgcgcggtggtgatgcgagcctgctgggcggcgcgccggggcagccggagccgcgcgccgcggcgctgtaatcggacaccaagagcgctcgcccccggcctccggccactttccattcactccgaggtgcttgattgagcgacgcggagaagagctccgggtgccgcggcactgcagcgctgagattcctttacaaagaaactcagaggaccgggaagaaagaatttcacctttgcgacgtgctagaaaataaggtcgtctgggaaaaggactggagacacaagcgcatccaaccccggtagcaaactgatgacttttccgtgctgatttctttcaacctcggtattttcccttggatattaacttgcatatctgaagaaatggcattccggacaatttgcgtgttggttggagtatttatttgttctatctgtgtgaaaggatcttcccagccccaagcaagagtttatttaacatttgatgaacttcgagaaaccaagacctctgaatacttcagcctttcccaccatcctttagactacaggattttattaatggatgaagatcaggaccggatatatgtgggaagcaaagatcacattctttccctgaatattaacaatataagtcaagaagctttgagtgttttctggccagcatctacaatcaaagttgaagaatgcaaaatggctggcaaagatcccacacacggctgtgggaactttgtccgtgtaattcagactttcaatcgcacacatttgtatgtctgtgggagtggcgctttcagtcctgtctgtacttacttgaacagagggaggagatcagaggaccaagttttcatgattgactccaagtgtgaatctggaaaaggacgctgctcttttcaaccccaacgtgaacacggtgtctgttatgatcaatgaggagcttttctctggaatgtatatagatttcatggggacagatgctgctatttttcgaagtttaaccaagaggaatgcggtcagaactgatcaacataattccaaatggctaagtgaacctatgtttgtagatgcacatgtcatcccagatggtactgatccaaatgatgctaaggtgtacttcttcttcaaagaaaaactgactgacaataacaggagcacgaaacagattcattccatgattgctcgaatatgtcctaatgacactggtggactgcgtagccttgtcaacaagtggaccactttcttaaaggcgaggctggtgtgctcggtaacagatgaagacggcccagaaacacactttgatgaattagaggatgtgtttctgctggaaactgataacccgaggacaacactagtgtatggcatttttacaacatcaagctcagttttcaaaggatcagccgtgtgtgtgtatcatttatctgatatacagactgtgtttaatgggccttttgcccacaaagaagggcccaatcatcagctgatttcctatcagggcagaattccatatcctcgccctggaacttgtccaggaggagcatttacacccaatatgcgaaccaccaaggagttcccagatgatgttgtcacttttattcggaaccatcctctcatgtacaattccatctacccaatccacaaaaggcctttgattgttcgtattggcactgactacaagtatacaaagatagctgtggatcgagtgaacgctgctgatgggagataccatgtcctgtttctcggaacagatcggggtactgtgcaaaaagtggttgttcttcctactaacaactctgtcagtggcgagctcattctggaggagctggaagtctttaagaatcatgctcctataacaacaatgaaaatttcatctaaaaagcaacagttgtatgtgagttccaatgaaggggtttcccaggtatctctgcaccgctgccacatctatggtacagcctgtgctgactgctgcctggcgcgggacccttattgcgcctgggatggccattcctgttccagattctacccaactgggaaacggaggagccgaagacaagatgtgagacatggaaacccactgactcaatgcagaggatttaatctaaaagcatacagaaatgcagctgaaattgtgcagtatggagtaaaaaataacaccacttttctggagtgtgcccccaagtctccgcaggcatctatcaagtggctgttacagaaagacaaagacaggaggaaagaggttaagctgaatgaacgaataatagccacttcacagggactcctgatccgctctgttcagggttctgaccaaggactttatcactgcattgctacagaaaatagtttcaagcagaccatagccaagatcaacttcaaagttttagattcagaaatggtggctgttgtgacggacaaatggtccccgtggacctgggccagctctgtgagggctttacccttccacccgaaggacatcatgggggcattcagccactcagaaatgcagatgattaaccaatactgcaaagacactcggcagcaacatcagcagggagatgaatcacagaaaatgagaggggactatggcaagttaaaggccctcatcaatagtcggaaaagtagaaacaggaggaatcagttgccagagtcataatattttcttatgtgggtcttatgcttccattaacaaatgctctgtcttcaatgatcaaattttgagcaaagaaacttgtgctttaccaaggggaattactgaaaaaggtgattactcctgaagtgagttttacacgaactgaaatgagcatgcattttcttgtatgatagtgactagcactagacatgtcatggtcctcatggtgcatataaatatatttaacttaacccagattttatttatatctttattcaccttttcttcaaaatcgatatggtggctgcaaaactagaattgttgcatccctcaattgaatgagggccatatccctgtggtattcctttcctgctttggggctttagaattctaattgtcagtgattttgtatatgaaaacaagttccaaatccacagcttttacgtagtaaaagtcataaatgcatatgacagaatggctatcaaaagaaatagaaaaggaagacggcatttaaagttgtataaaaacacgagttattcataaagagaaaatgatgagtttttatggttccaatgaaatatgttggggtttttttaagattgtaaaaataatcagttactggtatctgtcactgacctttgtttccttattcaggaagataaaaatcagtaacctaccccatgaagatatttggtgggagttatatcagtgaagcagtttggtttatattcttatgttatcaccttccaaacaaaagcacttactttttttggaagttatttaatttattttagactcaaagaatataatcttgcactactcagttattactgtttgttctcttattccctagtctgtgtggcaaattaaacaatataagaaggaaaaatttgaagtattagacttctaaataaggggtgaaatcatcagaaagaaaaatcaaagtagaaactactaattttttaagaggaatttataacaaatatggctagttttcaacttcagtactcaaattcaatgattcttccttttattaaaaccagtctcagatatcatactgatttttaagtcaacactatatattttatgatcttttcagtgtgatggcaaggtgcttgttatgtctagaaagtaagaaaacaatatgaggagacattctgtctttcaaaaggtaatggtacatacgttcactggtctctaagtgtaaaagtagtaaattttgtgatgaataaaataattatctcctaattgtatgttagaataattttattagaataatttcatactgaaattattttctccaaataaaaattagatggaaaaatgtgaaaaaaattattcatgctctcatatatattttaaaaacactacttttgcttttttatttaccttttaagacattttcatgcttccaggtaaaaacagatattgtaccatgtacctaatccaaatatcatataaacattttatttatagttaataatctatgatgaaggtaattaaagtagattatggcctttttaagtattgcagtctaaaacttcaaaaactaaaatcattgtcaaaattaatatgattattaatcagaatatcagaatatgattcactatttaaactatgataaattatgataatatatgaggaggcctcgctatagcaaaaatagttaaaatgctgacataacaccaaacttcattttttaaaaaatctgttgttccaaatgtgtataattttaaagtaatttctaaagcagtttattataatggtttgcctgcttaaaaggtataattaaacttcttttctcttctacattgacacacagaaatgtgtcaatgtaaagccaaaaccatcttctgtgtttatggccaatctattctcaaagttaaaagtaaaattgtttcagagtcacagttccctttatttcacataagcccaaactgatagacagtaacggtgtttagttttatactatatttgtgctatttaattctttctattttcacaattattaaattgtgtacactttcattacttttaaaaatgtagaaattcttcatgaacataactctgctgaatgtaaaagaaaattttttttcaaaaatgctgttaatgtatactactggtggttgattggttttattttatgtagcttgacaattcagtgacttaatatctattccatttgtattgtacataaaattttctagaaatacacttttttccaaagtgtaagtttgtgaatagattttagcatgatgaaactgtcataatggtgaatgttcaatctgtgtaagaaaacaaactaaatgtagttgtcacactaaaatttaattggatattgatgaaatcattggcctggcaaaataaaacatgttgaattcccca

SEQ ID NO: 326066 - DNA, 5454 bp, Homo sapiens
  misc_feature (5201)..(5202): n is a, c, g, or t
  misc_feature (5207)..(5207): n is a, c, g, or t
ggactgcgaaaggagcagggttgcggagctagggctccagcctgcggccgcgcattcttgcgtctggccagccgcgagctctaagggtcggccccgcccggtccgcccccgcggctccctgccaggctctcgcgggcgcgctcggggtggggcctcgcggctggcggagatgcggccggggctgcgcggtggtgatgcgagcctgctgggcggcgcgccggggcagccggagccgcgcgccgcggcgctgtaatcggacaccaagagcgctcgcccccggcctccggccactttccattcactccgaggtgcttgattgagcgacgcggagaagagctccgggtgccgcggcactgcagcgctgagattcctttacaaagaaactcagaggaccgggaagaaagaatttcacctttgcgacgtgctagaaaataaggtcgtctgggaaaaggactggagacacaagcgcatccaaccccggtagcaaactgatgacttttccgtgctgatttctttcaacctcggtattttcccttggatattaacttgcatatctgaagaaatggcattccggacaatttgcgtgttggttggagtatttatttgttctatctgtgtgaaaggatcttcccagccccaagcaagagtttatttaacatttgatgaacttcgagaaaccaagacctctgaatacttcagcctttcccaccatcctttagactacaggattttattaatggatgaagatcaggaccggatatatgtgggaagcaaagatcacattctttccctgaatattaacaatataagtcaagaagctttgagtgttttctggccagcatctacaatcaaagttgaagaatgcaaaatggctggcaaagatcccacacacggctgtgggaactttgtccgtgtaattcagactttcaatcgcacacatttgtatgtctgtgggagtggcgctttcagtcctgtctgtacttacttgaacagagggaggagatcagaggaccaagttttcatgattgactccaagtgtgaatctggaaaaggacgctgctcttttcaaccccaacgtgaacacggtgtctgttatgatcaatgaggagcttttctctggaatgtatatagatttcatggggacagatgctgctatttttcgaagtttaaccaagaggaatgcggtcagaactgatcaacataattccaaatggctaagtgaacctatgtttgtagatgcacatgtcatcccagatggtactgatccaaatgatgctaaggtgtacttcttcttcaaagaaaaactgactgacaataacaggagcacgaaacagattcattccatgattgctcgaatatgtcctaatgacactggtggactgcgtagccttgtcaacaagtggaccactttcttaaaggcgaggctggtgtgctcggtaacagatgaagacggcccagaaacacactttgatgaattagaggatgtgtttctgctggaaactgataacccgaggacaacactagtgtatggcatttttacaacatcaagctcagttttcaaaggatcagccgtgtgtgtgtatcatttatctgatatacagactgtgtttaatgggccttttgcccacaaagaagggcccaatcatcagctgatttcctatcagggcagaattccatatcctcgccctggaacttgtccaggaggagcatttacacccaatatgcgaaccaccaaggagttcccagatgatgttgtcacttttattcggaaccatcctctcatgtacaattccatctacccaatccacaaaaggcctttgattgttcgtattggcactgactacaagtatacaaagatagctgtggatcgagtgaacgctgctgatgggagataccatgtcctgtttctcggaacagatcggggtactgtgcaaaaagtggttgttcttcctactaacaactctgtcagtggcgagctcattctggaggagctggaagtctttaagaatcatgctcctataacaacaatgaaaatttcatctaaaaagcaacagttgtatgtgagttccaatgaaggggtttcccaggtatctctgcaccgctgccacatctatggtacagcctgtgctgactgctgcctggcgcgggacccttattgcgcctgggatggccattcctgttccagattctacccaactgggaaacggaggagccgaagacaagatgtgagacatggaaacccactgactcaatgcagaggatttaatctaaaagcatacagaaatgcagctgaaattgtgcagtatggagtaaaaaataacaccacttttctggagtgtgcccccaagtctccgcaggcatctatcaagtggctgttacagaaagacaaagacaggaggaaagaggttaagctgaatgaacgaataatagccacttcacagggactcctgatccgctctgttcagggttctgaccaaggactttatcactgcattgctacagaaaatagtttcaagcagaccatagccaagatcaacttcaaagttttagattcagaaatggtggctgttgtgacggacaaatggtccccgtggacctgggccagctctgtgagggctttacccttccacccgaaggacatcatgggggcattcagccactcagaaatgcagatgattaaccaatactgcaaagacactcggcagcaacatcagcagggagatgaatcacagaaaatgagaggggactatggcaagttaaaggccctcatcaatagtcggaaaagtagaaacaggaggaatcagttgccagagtcataatattttcttatgtgggtcttatgcttccattaacaaatgctctgtcttcaatgatcaaattttgagcaaagaaacttgtgctttaccaaggggaattactgaaaaaggtgattactcctgaagtgagttttacacgaactgaaatgagcatgcattttcttgtatgatagtgactagcactagacatgtcatggtcctcatggtgcatataaatatatttaacttaacccagattttatttatatctttattcaccttttcttcaaaatcgatatggtggctgcaaaactagaattgttgcatccctcaattgaatgagggccatatccctgtggtattcctttcctgctttggggctttagaattctaattgtcagtgattttgtatatgaaaacaagttccaaatccacagcttttacgtagtaaaagtcataaatgcatatgacagaatggctatcaaaagaaatagaaaaggaagacggcatttaaagttgtataaaaacacgagttattcataaagagaaaatgatgagtttttatggttccaatgaaatatgttggggtttttttaagattgtaaaaataatcagttactggtatctgtcactgacctttgtttccttattcaggaagataaaaatcagtaacctaccccatgaagatatttggtgggagttatatcagtgaagcagtttggtttatattcttatgttatcaccttccaaacaaaagcacttactttttttggaagttatttaatttattttagactcaaagaatataatcttgcactactcagttattactgtttgttctcttattccctagtctgtgtggcaaattaaacaatataagaaggaaaaatttgaagtattagacttctaaataaggggtgaaatcatcagaaagaaaaatcaaagtagaaactactaattttttaagaggaatttataacaaatatggctagttttcaacttcagtactcaaattcaatgattcttccttttattaaaaccagtctcagatatcatactgatttttaagtcaacactatatattttatgatcttttcagtgtgatggcaaggtgcttgttatgtctagaaagtaagaaaacaatatgaggagacattctgtctttcaaaaggtaatggtacatacgttcactggtctctaagtgtaaaagtagtaaattttgtgatgaataaaataattatctcctaattgtatgttagaataattttattagaataatttcatactgaaattattttctccaaataaaaattagatggaaaaatgtgaaaaaaattattcatgctctcatatatattttaaaaacactacttttgcttttttatttaccttttaagacattttcatgcttccaggtaaaaacagatattgtaccatgtacctaatccaaatatcatataaacattttatttatagttaataatctatgatgaaggtaattaaagtagattatggcctttttaagtattgcagtctaaaacttcaaaaactaaaatcattgtcaaaattaatatgattattaatcagaatatcagaatatgattcactatttaaactatgataaattatgataatatatgaggaggcctcgctatagcaaaaatagttaaaatgctgacataacaccaaacttcattttttaaaaaatctgttgttccaaatgtgtataattttaaagtaatttctaaagcagtttattataatggtttgcctgcttaaaaggtataattaaacttcttttctcttctacattgacacacagaaatgtgtcaatgtaaagccaaaaccatcttctgtgtttatggccaatctattctcaaagttaaaagtaaaattgtttcagagtcacagttccctttatttcacataagcccaaactgatagacagtaacggtgtttagttttatactatatttgtgctatttaattctttctattttcacaattattaaattgtgtacactttcattacttttaaaaatgtagaaattcttcatgaacataactctgctgaatgtaaaagaaaattttttttcaaaaatgctgttaatgtatactactggtggttgattggttttattttatgtagcttgacaattcagtgacttaatatctattccatttgtattgtacataaaattttctagaaatacacttttttccaaagtgtaagtttgtgaatagattttagcatgatgaaactgtcataatggtgaatgttcaatctgtgtaagaaaacaaactaaatgtagttgtcacactaaaatttaattggatattgatgaaatcattggcctggcaaaataaaacatgttgaattccccaaaaaaaaaacaacaaaacaannaacanaaacaccaatttcgagcaccctacgcgccccgtaaaaaagcttttaaaacacaaattgatgggcgccacgggcacccacgagagggttaacgacgacacgatgtgatacaaacgaggatccctagagaagaaccccgggagaacaaacaaacaagcgtgggaaactccaccacacaaaaaaaagccgccgggggcacacaccgaggacgttcgcaaaaaacaaccatacgtaattatcaacacgcac

SEQ ID NO: 326067 - DNA, 5594 bp, Homo sapiens
ggactgcgaaaggagcagggttgcggagctagggctccagcctgcggccgcgcattcttgcgtctggccagccgcgagctctaagggtcggccccgcccggtccgcccccgcggctccctgccaggctctcgcgggcgcgctcggggtggggcctcgcggctggcggagatgcggccggggctgcgcggtggtgatgcgagcctgctgggcggcgcgccggggcagccggagccgcgcgccgcggcgctgtaatcggacaccaagagcgctcgcccccggcctccggccactttccattcactccgaggtgcttgattgagcgacgcggagaagagctccgggtgccgcggcactgcagcgctgagattcctttacaaagaaactcagaggaccgggaagaaagaatttcacctttgcgacgtgctagaaaataaggtcgtctgggaaaaggactggagacacaagcgcatccaaccccggtagcaaactgatgacttttccgtgctgatttctttcaacctcggtattttcccttggatattaacttgcatatctgaagaaatggcattccggacaatttgcgtgttggttggagtatttatttgttctatctgtgtgaaaggatcttcccagccccaagcaagagtttatttaacatttgatgaacttcgagaaaccaagacctctgaatacttcagcctttcccaccatcctttagactacaggattttattaatggatgaagatcaggaccggatatatgtgggaagcaaagatcacattctttccctgaatattaacaatataagtcaagaagctttgagtgttttctggccagcatctacaatcaaagttgaagaatgcaaaatggctggcaaagatcccacacacggctgtgggaactttgtccgtgtaattcagactttcaatcgcacacatttgtatgtctgtgggagtggcgctttcagtcctgtctgtacttacttgaacagagggaggagatcagaggaccaagttttcatgattgactccaagtgtgaatctggaaaaggacgctgctcttttcaaccccaacgtgaacacggtgtctgttatgatcaatgaggagcttttctctggaatgtatatagatttcatggggacagatgctgctatttttcgaagtttaaccaagaggaatgcggtcagaactgatcaacataattccaaatggctaagtgaacctatgtttgtagatgcacatgtcatcccagatggtactgatccaaatgatgctaaggtgtacttcttcttcaaagaaaaactgactgacaataacaggagcacgaaacagattcattccatgattgctcgaatatgtcctaatgacactggtggactgcgtagccttgtcaacaagtggaccactttcttaaaggcgaggctggtgtgctcggtaacagatgaagacggcccagaaacacactttgatgaattagaggatgtgtttctgctggaaactgataacccgaggacaacactagtgtatggcatttttacaacatcaagctcagttttcaaaggatcagccgtgtgtgtgtatcatttatctgatatacagactgtgtttaatgggccttttgcccacaaagaagggcccaatcatcagctgatttcctatcagggcagaattccatatcctcgccctggaacttgtccaggaggagcatttacacccaatatgcgaaccaccaaggagttcccagatgatgttgtcacttttattcggaaccatcctctcatgtacaattccatctacccaatccacaaaaggcctttgattgttcgtattggcactgactacaagtatacaaagatagctgtggatcgagtgaacgctgctgatgggagataccatgtcctgtttctcggaacagatcggggtactgtgcaaaaagtggttgttcttcctactaacaactctgtcagtggcgagctcattctggaggagctggaagtctttaagaatcatgctcctataacaacaatgaaaatttcatctaaaaagcaacagttgtatgtgagttccaatgaaggggtttcccaggtatctctgcaccgctgccacatctatggtacagcctgtgctgactgctgcctggcgcgggacccttattgcgcctgggatggccattcctgttccagattctacccaactgggaaacggaggagccgaagacaagatgtgagacatggaaacccactgactcaatgcagaggatttaatctaaaagcatacagaaatgcagctgaaattgtgcagtatggagtaaaaaataacaccacttttctggagtgtgcccccaagtctccgcaggcatctatcaagtggctgttacagaaagacaaagacaggaggaaagaggttaagctgaatgaacgaataatagccacttcacagggactcctgatccgctctgttcagggttctgaccaaggactttatcactgcattgctacagaaaatagtttcaagcagaccatagccaagatcaacttcaaagttttagattcagaaatggtggctgttgtgacggacaaatggtccccgtggacctgggccagctctgtgagggctttacccttccacccgaaggacatcatgggggcattcagccactcagaaatgcagatgattaaccaatactgcaaagacactcggcagcaacatcagcagggagatgaatcacagaaaatgagaggggactatggcaagttaaaggccctcatcaatagtcggaaaagtagaaacaggaggaatcagttgccagagtcataatattttcttatgtgggtcttatgcttccattaacaaatgctctgtcttcaatgatcaaattttgagcaaagaaacttgtgctttaccaaggggaattactgaaaaaggtgattactcctgaagtgagttttacacgaactgaaatgagcatgcattttcttgtatgatagtgactagcactagacatgtcatggtcctcatggtgcatataaatatatttaacttaacccagattttatttatatctttattcaccttttcttcaaaatcgatatggtggctgcaaaactagaattgttgcatccctcaattgaatgagggccatatccctgtggtattcctttcctgctttggggctttagaattctaattgtcagtgattttgtatatgaaaacaagttccaaatccacagcttttacgtagtaaaagtcataaatgcatatgacagaatggctatcaaaagaaatagaaaaggaagacggcatttaaagttgtataaaaacacgagttattcataaagagaaaatgatgagtttttatggttccaatgaaatatgttggggtttttttaagattgtaaaaataatcagttactggtatctgtcactgacctttgtttccttattcaggaagataaaaatcagtaacctaccccatgaagatatttggtgggagttatatcagtgaagcagtttggtttatattcttatgttatcaccttccaaacaaaagcacttactttttttggaagttatttaatttattttagactcaaagaatataatcttgcactactcagttattactgtttgttctcttattccctagtctgtgtggcaaattaaacaatataagaaggaaaaatttgaagtattagacttctaaataaggggtgaaatcatcagaaagaaaaatcaaagtagaaactactaattttttaagaggaatttataacaaatatggctagttttcaacttcagtactcaaattcaatgattcttccttttattaaaaccagtctcagatatcatactgatttttaagtcaacactatatattttatgatcttttcagtgtgatggcaaggtgcttgttatgtctagaaagtaagaaaacaatatgaggagacattctgtctttcaaaaggtaatggtacatacgttcactggtctctaagtgtaaaagtagtaaattttgtgatgaataaaataattatctcctaattgtatgttagaataattttattagaataatttcatactgaaattattttctccaaataaaaattagatggaaaaatgtgaaaaaaattattcatgctctcatatatattttaaaaacactacttttgcttttttatttaccttttaagacattttcatgcttccaggtaaaaacagatattgtaccatgtacctaatccaaatatcatataaacattttatttatagttaataatctatgatgaaggtaattaaagtagattatggcctttttaagtattgcagtctaaaacttcaaaaactaaaatcattgtcaaaattaatatgattattaatcagaatatcagaatatgattcactatttaaactatgataaattatgataatatatgaggaggcctcgctatagcaaaaatagttaaaatgctgacataacaccaaacttcattttttaaaaaatctgttgttccaaatgtgtataattttaaagtaatttctaaagcagtttattataatggtttgcctgcttaaaaggtataattaaacttcttttctcttctacattgacacacagaaatgtgtcaatgtaaagccaaaaccatcttctgtgtttatggccaatctattctcaaagttaaaagtaaaattgtttcagagtcacagttccctttatttcacataagcccaaactgatagacagtaacggtgtttagttttatactatatttgtgctatttaattctttctattttcacaattattaaattgtgtacactttcattacttttaaaaatgtagaaattcttcatgaacataactctgctgaatgtaaaagaaaattttttttcaaaaatgctgttaatgtatactactggtggttgattggttttattttatgtagcttgacaattcagtgacttaatatctattccatttgtattgtacataaaattttctagaaatacacttttttccaaagtgtaagtttgtgaatagattttagcatgatgaaactgtcataatggtgaatgttcaatctgtgtaagaaaacaaactaaatgtagttgtcacactaaaatttaattggatattgatgaaatcattggcctggcaaaataaaacatgttgaattccccaaaaaaaaaaaaagaataaataaacaaagaaagaaaatatagaacagtaaataggaacgaaaagaataaaaatcagaagagggggagggcttcaagaaaatatgtctgtactagaggaccacaaaagtggtcgcgagcgccgaaacgcaattatcattaacaagggagggggcacaccacgacaggaagtcatcgaattcaagcagaaagacgggcgccaataaatagagattgaaaacgaagaaacaagggccgaccagtgaaaatagagaagaagaacacatacgagatcgggggagacaatgcggaagaaacgaacccaacgggtaagggcgacaagaagaaccacacccaagggaatagagccaacgaagaaaaataccaggggagaagccaagaggttaagggaatcacg

SEQ ID NO: 326068 - DNA, 3155 bp, Homo sapiens
aatcatcatcattcctttaatagcaacagttgtatgtgagttccaatgaaggggtttcccaggtatctctgcaccgctgccacatctatggtacagcctgtgctgactgctgcctggcgcgggacccttattgcgcctgggatggccattcctgttccagattctacccaactgggaaacggaggagccgaagacaagatgtgagacatggaaacccactgactcaatgcagaggatttaatctaaaagcatacagaaatgcagctgaaattgtgcagtatggagtaaaaaataacaccacttttctggagtgtgcccccaagtctccgcaggcatctatcaagtggctgttacagaaagacaaagacaggaggaaagaggttaagctgaatgaacgaataatagccacttcacagggactcctgatccgctctgttcagggttctgaccaaggactttatcactgcattgctacagaaaatagtttcaagcagaccatagccaagatcaacttcaaagttttagattcagaaatggtggctgttgtgacggacaaatggtccccgtggacctgggccagctctgtgagggctttacccttccacccgaaggacatcatgggggcattcagccactcagaaatgcagatgattaaccaatactgcaaagacactcggcagcaacatcagcagggagatgaatcacagaaaatgagaggggactatggcaagttaaaggccctcatcaatagtcggaaaagtagaaacaggaggaatcagttgccagagtcataatattttcttatgtgggtcttatgcttccattaacaaatgctctgtcttcaatgatcaaattttgagcaaagaaacttgtgctttaccaaggggaattactgaaaaaggtgattactcctgaagtgagttttacacgaactgaaatgagcatgcattttcttgtatgatagtgactagcactagacatgtcatggtcctcatggtgcatataaatatatttaacttaacccagattttatttatatctttattcaccttttcttcaaaatcgatatggtggctgcaaaactagaattgttgcatccctcaattgaatgagggccatatccctgtggtattcctttcctgctttggggctttagaattctaattgtcagtgattttgtatatgaaaacaagttccaaatccacagcttttacgtagtaaaagtcataaatgcatatgacagaatggctatcaaaagaaatagaaaaggaagacggcatttaaagttgtataaaaacacgagttattcataaagagaaaatgatgagtttttatggttccaatgaaatatgttggggtttttttaagattgtaaaaataatcagttactggtatctgtcactgacctttgtttccttattcaggaagataaaaatcagtaacctaccccatgaagatatttggtgggagttatatcagtgaagcagtttggtttatattcttatgttatcaccttccaaacaaaagcacttactttttttggaagttatttaatttattttagactcaaagaatataatcttgcactactcagttattactgtttgttctcttattccctagtctgtgtggcaaattaaacaatataagaaggaaaaatttgaagtattagacttctaaataaggggtgaaatcatcagaaagaaaaatcaaagtagaaactactaattttttaagaggaatttataacaaatatggctagttttcaacttcagtactcaaattcaatgattcttccttttattaaaaccagtctcagatatcatactgatttttaagtcaacactatatattttatgatcttttcagtgtgatggcaaggtgcttgttatgtctagaaagtaagaaaacaatatgaggagacattctgtctttcaaaaggtaatggtacatacgttcactggtctctaagtgtaaaagtagtaaattttgtgatgaataaaataattatctcctaattgtatgttagaataattttattagaataatttcatactgaaattattttctccaaataaaaattagatggaaaaatgtgaaaaaaattattcatgctctcatatatattttaaaaacactacttttgcttttttatttaccttttaagacattttcatgcttccaggtaaaaacagatattgtaccatgtacctaatccaaatatcatataaacattttatttatagttaataatctatgatgaaggtaattaaagtagattatggcctttttaagtattgcagtctaaaacttcaaaaactaaaatcattgtcaaaattaatatgattattaatcagaatatcagaatatgattcactatttaaactatgataaattatgataatatatgaggaggcctcgctatagcaaaaatagttaaaatgctgacataacaccaaacttcattttttaaaaaatctgttgttccaaatgtgtataattttaaagtaatttctaaagcagtttattataatggtttgcctgcttaaaaggtataattaaacttcttttctcttctacattgacacacagaaatgtgtcaatgtaaagccaaaaccatcttctgtgtttatggccaatctattctcaaagttaaaagtaaaattgtttcagagtcacagttccctttatttcacataagcccaaactgatagacagtaacggtgtttagttttatactatatttgtgctatttaattctttctattttcacaattattaaattgtgtacactttcattacttttaaaaatgtagaaattcttcatgaacataactctgctgaatgtaaaagaaaattttttttcaaaaatgctgttaatgtatactactggtggttgattggttttattttatgtagcttgacaattcagtgacttaatatctattccatttgtattgtacataaaattttctagaaatacacttttttccaaagtgtaagtttgtgaatagattttagcatgatgaaactgtcataatggtgaatgttcaatctgtgtaagaaaacaaactaaatgtagttgtcacactaaaatttaattggatattgatgaaatcattggcctggcaaaataaaacatgttgaattcccca

SEQ ID NO: 326069 - DNA, 5119 bp, Homo sapiens
ggactgcgaaaggagcagggttgcggagctagggctccagcctgcggccgcgcattcttgcgtctggccagccgcgagctctaagggtcggccccgcccggtccgcccccgcggctccctgccaggctctcgcgggcgcgctcggggtggggcctcgcggctggcggagatgcggccggggctgcgcggtggtgatgcgagcctgctgggcggcgcgccggggcagccggagccgcgcgccgcggcgctgtaatcggacaccaagagcgctcgcccccggcctccggccactttccattcactccgaggtgcttgattgagcgacgcggagaagagctccgggtgccgcggcactgcagcgctgagattcctttacaaagaaactcagaggaccgggaagaaagaatttcacctttgcgacgtgctagaaaataaggtcgtctgggaaaaggactggagacacaagcgcatccaaccccggtagcaaactgatgacttttccgtgctgatttctttcaacctcggtattttcccttggatattaacttgcatatctgaagaaatggcattccggacaatttgcgtgttggttggagtatttatttgttctatctgtgtgaaaggatcttcccagccccaagcaagagtttatttaacatttgatgaacttcgagaaaccaagacctctgaatacttcagcctttcccaccatcctttagactacaggattttattaatggatgaagatcaggaccggatatatgtgggaagcaaagatcacattctttccctgaatattaacaatataagtcaagaagctttgagtgttttctggccagcatctacaatcaaagttgaagaatgcaaaatggctggcaaagatcccacacacggctgtgggaactttgtccgtgtaattcagactttcaatcgcacacatttgtatgtctgtgggagtggcgctttcagtcctgtctgtacttacttgaacagagggaggagatcagaggaccaagttttcatgattgactccaagtgtgaatctggaaaaggacgctgctcttttcaaccccaacgtgaacacggtgtctgttatgatcaatgaggagcttttctctggaatgtatatagatttcatggggacagatgctgctatttttcgaagtttaaccaagaggaatgcggtcagaactgatcaacataattccaaatggctaagtgaacctatgtttgtagatgcacatgtcatcccagatggtactgatccaaatgatgctaaggtgtacttcttcttcaaagaaaaactgactgacaataacaggagcacgaaacagattcattccatgattgctcgaatatgtcctaatgacactggtggactgcgtagccttgtcaacaagtggaccactttcttaaaggcgaggctggtgtgctcggtaacagatgaagacggcccagaaacacactttgatgaattagaggatgtgtttctgctggaaactgataacccgaggacaacactagtgtatggcatttttacaacatcaagctcagttttcaaaggatcagccgtgtgtgtgtatcatttatctgatatacagactgtgtttaatgggccttttgcccacaaagaagggcccaatcatcagctgatttcctatcagggcagaattccatatcctcgccctggaacttgtccaggaggagcatttacacccaatatgcgaaccaccaaggagttcccagatgatgttgtcacttttattcggaaccatcctctcatgtacaattccatctacccaatccacaaaaggcctttgattgttcgtattggcactgactacaagtatacaaagatagctgtggatcgagtgaacgctgctgatgggagataccatgtcctgtttctcggaacagatcggggtactgtgcaaaaagtggttgttcttcctactaacaactctgtcagtggcgagctcattctggaggagctggaagtctttaagaatcatgctcctataacaacaatgaaaatttcatctaaaaagcaacagttgtatgtgagttccaatgaaggggtttcccaggtatctctgcaccgctgccacatctatggtacagcctgtgctgactgctgcctggcgcgggacccttattgcgcctgggatggccattcctgttccagattctacccaactgggaaacggaggagccgaagacaagatgtgagacatggaaacccactgactcaatgcagaggatttaatctaaaagcatacagaaatgcagctgaaattgtgcagtatggagtaaaaaataacaccacttttctggagtgtgcccccaagtctccgcaggcatctatcaagtggctgttacagaaagacaaagacaggaggaaagaggttaagctgaatgaacgaataatagccacttcacagggactcctgatccgctctgttcagggttctgaccaaggactttatcactgcattgctacagaaaatagtttcaagcagaccatagccaagatcaacttcaaagttttagattcagaaatggtggctgttgtgacggacaaatggtccccgtggacctgggccagctctgtgagggctttacccttccacccgaaggacatcatgggggcattcagccactcagaaatgcagatgattaaccaatactgcaaagacactcggcagcaacatcagcagggagatgaatcacagaaaatgagaggggactatggcaagttaaaggccctcatcaatagtcggaaaagtagaaacaggaggaatcagttgccagagtcataatattttcttatgtgggtcttatgcttccattaacaaatgctctgtcttcaatgatcaaattttgagcaaagaaacttgtgctttaccaaggggaattactgaaaaaggtgattactcctgaagtgagttttacacgaactgaaatgagcatgcattttcttgtatgatagtgactagcactagacatgtcatggtcctcatggtgcatataaatatatttaacttaacccagattttatttatatctttattcaccttttcttcaaaatcgatatggtggctgcaaaactagaattgttgcatccctcaattgaatgagggccatatccctgtggtattcctttcctgctttggggctttagaattctaattgtcagtgattttgtatatgaaaacaagttccaaatccacagcttttacgtagtaaaagtcataaatgcatatgacagaatggctatcaaaagaaatagaaaaggaagacggcatttaaagttgtataaaaacacgagttattcataaagagaaaatgatgagtttttatggttccaatgaaatatgttggggtttttttaagattgtaaaaataatcagttactggtatctgtcactgacctttgtttccttattcaggaagataaaaatcagtaacctaccccatgaagatatttggtgggagttatatcagtgaagcagtttggtttatattcttatgttatcaccttccaaacaaaagcacttactttttttggaagttatttaatttattttagactcaaagaatataatcttgcactactcagttattactgtttgttctcttattccctagtctgtgtggcaaattaaacaatataagaaggaaaaatttgaagtattagacttctaaataaggggtgaaatcatcagaaagaaaaatcaaagtagaaactactaattttttaagaggaatttataacaaatatggctagttttcaacttcagtactcaaattcaatgattcttccttttattaaaaccagtctcagatatcatactgatttttaagtcaacactatatattttatgatcttttcagtgtgatggcaaggtgcttgttatgtctagaaagtaagaaaacaatatgaggagacattctgtctttcaaaaggtaatggtacatacgttcactggtctctaagtgtaaaagtagtaaattttgtgatgaataaaataattatctcctaattgtatgttagaataattttattagaataatttcatactgaaattattttctccaaataaaaattagatggaaaaatgtgaaaaaaattattcatgctctcatatatattttaaaaacactacttttgcttttttatttaccttttaagacattttcatgcttccaggtaaaaacagatattgtaccatgtacctaatccaaatatcatataaacattttatttatagttaataatctatgatgaaggtaattaaagtagattatggcctttttaagtattgcagtctaaaacttcaaaaactaaaatcattgtcaaaattaatatgattattaatcagaatatcagaatatgattcactatttaaactatgataaattatgataatatatgaggaggcctcgctatagcaaaaatagttaaaatgctgacataacaccaaacttcattttttaaaaaatctgttgttccaaatgtgtataattttaaagtaatttctaaagcagtttattataatggtttgcctgcttaaaaggtataattaaacttcttttctcttctacattgacacacagaaatgtgtcaatgtaaagccaaaaccatcttctgtgtttatggccaatctattctcaaagtacagtaacggtgtttagttttatactatatttgtgctatttaattctttctattttcacaattattaaattgtgtacactttcattacttttaaaaatgtagaaattcttcatgaacataactctgctgaatgtaaaagaaaattttttttcaaaaatgctgttaatgtatactactggtggttgattggttttattttatgtagcttgacaattcagtgacttaatatctattccatttgtattgtacataaaattttctagaaatacacttttttccaaagtgtaagtttgtgaatagattttagcatgatgaaactgtcataatggtgaatgttcaatctgtgtaagaaaacaaactaaatgtagttgtcacactaaaatttaattggatattgatgaaatcattggcctggcaaaataaaacatgttgaattcccca

SEQ ID NO: 326070 - DNA, 1286 bp, Homo sapiens
ggactgcgaaaggagcagggttgcggagctagggctccagcctgcggccgcgcattcttgcgtctggccagccgcgagctctaagggtcggccccgcccggtccgcccccgcggctccctgccaggctctcgcgggcgcgctcggggtggggcctcgcggctggcggagatgcggccggggctgcgcggtggtgatgcgagcctgctgggcggcgcgccggggcagccggagccgcgcgccgcggcgctgtaatcggacaccaagagcgctcgcccccggcctccggccactttccattcactccgaggtgcttgattgagcgacgcggagaagagctccgggtgccgcggcactgcagcgctgagattcctttacaaagaaactcagaggaccgggaagaaagaatttcacctttgcgacgtgctagaaaataaggtcgtctgggaaaaggactggagacacaagcgcatccaaccccggtagcaaactgatgacttttccgtgctgatttctttcaacctcggtattttcccttggatattaacttgcatatctgaagaaatggcattccggacaatttgcgtgttggttggagtatttatttgttctatctgtgtgaaaggatcttcccagccccaagcaagagtttatttaacatttgatgaacttcgagaaaccaagacctctgaatacttcagcctttcccaccatcctttagactacaggattttattaatggatgaagatcaggaccggatatatgtgggaagcaaagatcacattctttccctgaatattaacaatataagtcaagaagctttgagtgttttctggccagcatctacaatcaaagttgaagaatgcaaaatggctggcaaagatcccacacacggctgtgggaactttgtccgtgtaattcagactttcaatcgcacacatttgtatgtctgtgggagtggcgctttcagtcctgtctgtacttacttgaacagagggaggagatcagaggggaatatttgatgagcctacttcgtgtttggagcatcacatgcttttgttataccccatttctcttctattatttgcgagactgattcagagctttctgagatttcaacagtactcactcacctaaagagcctggaatccttgctacatgaagacctaaccacggttcttctcctgtgtctactatctttactccttgtcttctgttcctggaaaaagataaagcaatacaagtgaatcatgactttaaatgaatgaataaaacatcaacaaaaat

SEQ ID NO: 326071 - DNA, 585 bp, Homo sapiens
ccccacttgaaaaataagaatgcttccttgtgctttgctaagatacagcattcaaagaaaaaaagtcataacttaaatctgtaatatgttagctccaatctgagagaacaatgaatcccaatgtctaaaacacattaccattctatatggtgctttgagcttttcttttttaacagaaaagtggtaatgctataggcatattaatgtaggaaaattctatttattttggcttcatacccttctgtgctttgcttcatgtttttaatcggttccaaaatgaatccaagggtttgtgggcatatattataatgtgttcctgctgaaagtcttcttttaacttccacatctgaaataaatcatcatcattcctttaatagcaacagttgtatgtgagttccaatgaaggggtttcccaggtatctctgcaccgctgccacatctatggtacagcctgtgctgactgctgcctggcgcgggacccttattgcgcctgggatggccattcctgttccagattctacccaactgggaaacggtgagcactaaacactcggctcaacatccaaatgtaggacaccagacaat

SEQ ID NO: 326072 - DNA, 576 bp, Homo sapiens
tcttctctaaggttaagaatgttgcttctgaagtcctcccaatgaaggatcaactgtgattttcctactttatttccccctacagtagtatggttgcccagtcaaccccataaatatatggctgtgttcttaaagaaatgagactggcagaaatctcataccctcgttctaatgttccctgtaggtgcttcttttaaaacacggttggtagctctgttagcaaacgaccccaccagcaagcccaagtcagtaggaagaagcctgccaattgtgtcattatatttttccgtaagtaattcaagtttgtggaagaaacaagacacttttggtatgttgcaaagggcagccaaagaatgaaaactctgtggccgagcaaacatattacattattctgctgcaacatgtataaagcttctgcaggagattgtttgtatagttgtatatcctgttaaagcagaacttaatgaaagtgttcaactttaacatctctttataagtataacagagtcatgtgcttccatcatcatgccttggacaggtcgggtacatgcaaaggatcacagaaaattgatgagc

SEQ ID NO: 326073 - DNA, 728 bp, Homo sapiens
attgtctactgactccatggatgaattgagtattgtaatgctttatgtatcaataccttttttcaaagtttttcagcttttcacatgtgttcgataacatttaacttttctatggtggattatattaactttttatcataaattttaccatatattttttaaattgtattttaattttaaaaatttgaaaatgcctttttctgttttcttttttagctcagttttcaaaggatcagccgtgtgtgtgtatcatttatctgatatacagactgtgtttaatgggccttttgcccacaaagaagggcccaatcatcagctgatttcctatcagggcagaattccatatcctcgccctggaactgtaagtatccagggaaaattctttgttatgatgctttataaaaactcatttaacaggtaatgaatatctgtggggttttttggggtttttttttgagacggagtctcactctgttgcccagggtggaatgtagtggtgcaatctcagctcacctcaccctccgcctcccgggttcaagcgattctcctgcctcagcctcctaagtaactgggattacaagcatgcaccaccatgcccggctaatttttgtgtttttagtagagacagggtttcaccatgttggtcaggctggtctcgaactcctgacctcgtgatccgcccgccttggcctcccaaagtgcttggattacaggcgtgagccaccgca

SEQ ID NO: 326074 - DNA, 5268 bp, Homo sapiens
ggactgcgaaaggagcagggttgcggagctagggctccagcctgcggccgcgcattcttgcgtctggccagccgcgagctctaagggtcggccccgcccggtccgcccccgcggctccctgccaggctctcgcgggcgcgctcggggtggggcctcgcggctggcggagatgcggccggggctgcgcggtggtgatgcgagcctgctgggcggcgcgccggggcagccggagccgcgcgccgcggcgctgtaatcggacaccaagagcgctcgcccccggcctccggccactttccattcactccgaggtgcttgattgagcgacgcggagaagagctccgggtgccgcggcactgcagcgctgagattcctttacaaagaaactcagaggaccgggaagaaagaatttcacctttgcgacgtgctagaaaataaggtcgtctgggaaaaggactggagacacaagcgcatccaaccccggtagcaaactgatgacttttccgtgctgatttctttcaacctcggtattttcccttggatattaacttgcatatctgaagaaatggcattccggacaatttgcgtgttggttggagtatttatttgttctatctgtgtgaaaggatcttcccagccccaagcaagagtttatttaacatttgatgagcctaccttgtacaatgctgtgtgctacatctgtgggtacaaaaagaagtgtggcgtgaatttggtcctcagcaaccacctactctaaacttcgagaaaccaagacctctgaatacttcagcctttcccaccatcctttagactacaggattttattaatggatgaagatcaggaccggatatatgtgggaagcaaagatcacattctttccctgaatattaacaatataagtcaagaagctttgagtgttttctggccagcatctacaatcaaagttgaagaatgcaaaatggctggcaaagatcccacacacggctgtgggaactttgtccgtgtaattcagactttcaatcgcacacatttgtatgtctgtgggagtggcgctttcagtcctgtctgtacttacttgaacagagggaggagatcagaggaccaagttttcatgattgactccaagtgtgaatctggaaaaggacgctgctcttttcaaccccaacgtgaacacggtgtctgttatgatcaatgaggagcttttctctggaatgtatatagatttcatggggacagatgctgctatttttcgaagtttaaccaagaggaatgcggtcagaactgatcaacataattccaaatggctaagtgaacctatgtttgtagatgcacatgtcatcccagatggtactgatccaaatgatgctaaggtgtacttcttcttcaaagaaaaactgactgacaataacaggagcacgaaacagattcattccatgattgctcgaatatgtcctaatgacactggtggactgcgtagccttgtcaacaagtggaccactttcttaaaggcgaggctggtgtgctcggtaacagatgaagacggcccagaaacacactttgatgaattagaggatgtgtttctgctggaaactgataacccgaggacaacactagtgtatggcatttttacaacatcaagctcagttttcaaaggatcagccgtgtgtgtgtatcatttatctgatatacagactgtgtttaatgggccttttgcccacaaagaagggcccaatcatcagctgatttcctatcagggcagaattccatatcctcgccctggaacttgtccaggaggagcatttacacccaatatgcgaaccaccaaggagttcccagatgatgttgtcacttttattcggaaccatcctctcatgtacaattccatctacccaatccacaaaaggcctttgattgttcgtattggcactgactacaagtatacaaagatagctgtggatcgagtgaacgctgctgatgggagataccatgtcctgtttctcggaacagatcggggtactgtgcaaaaagtggttgttcttcctactaacaactctgtcagtggcgagctcattctggaggagctggaagtctttaagaatcatgctcctataacaacaatgaaaatttcatctaaaaagcaacagttgtatgtgagttccaatgaaggggtttcccaggtatctctgcaccgctgccacatctatggtacagcctgtgctgactgctgcctggcgcgggacccttattgcgcctgggatggccattcctgttccagattctacccaactgggaaacggaggagccgaagacaagatgtgagacatggaaacccactgactcaatgcagaggatttaatctaaaagcatacagaaatgcagctgaaattgtgcagtatggagtaaaaaataacaccacttttctggagtgtgcccccaagtctccgcaggcatctatcaagtggctgttacagaaagacaaagacaggaggaaagaggttaagctgaatgaacgaataatagccacttcacagggactcctgatccgctctgttcagggttctgaccaaggactttatcactgcattgctacagaaaatagtttcaagcagaccatagccaagatcaacttcaaagttttagattcagaaatggtggctgttgtgacggacaaatggtccccgtggacctgggccagctctgtgagggctttacccttccacccgaaggacatcatgggggcattcagccactcagaaatgcagatgattaaccaatactgcaaagacactcggcagcaacatcagcagggagatgaatcacagaaaatgagaggggactatggcaagttaaaggccctcatcaatagtcggaaaagtagaaacaggaggaatcagttgccagagtcataatattttcttatgtgggtcttatgcttccattaacaaatgctctgtcttcaatgatcaaattttgagcaaagaaacttgtgctttaccaaggggaattactgaaaaaggtgattactcctgaagtgagttttacacgaactgaaatgagcatgcattttcttgtatgatagtgactagcactagacatgtcatggtcctcatggtgcatataaatatatttaacttaacccagattttatttatatctttattcaccttttcttcaaaatcgatatggtggctgcaaaactagaattgttgcatccctcaattgaatgagggccatatccctgtggtattcctttcctgctttggggctttagaattctaattgtcagtgattttgtatatgaaaacaagttccaaatccacagcttttacgtagtaaaagtcataaatgcatatgacagaatggctatcaaaagaaatagaaaaggaagacggcatttaaagttgtataaaaacacgagttattcataaagagaaaatgatgagtttttatggttccaatgaaatatgttggggtttttttaagattgtaaaaataatcagttactggtatctgtcactgacctttgtttccttattcaggaagataaaaatcagtaacctaccccatgaagatatttggtgggagttatatcagtgaagcagtttggtttatattcttatgttatcaccttccaaacaaaagcacttactttttttggaagttatttaatttattttagactcaaagaatataatcttgcactactcagttattactgtttgttctcttattccctagtctgtgtggcaaattaaacaatataagaaggaaaaatttgaagtattagacttctaaataaggggtgaaatcatcagaaagaaaaatcaaagtagaaactactaattttttaagaggaatttataacaaatatggctagttttcaacttcagtactcaaattcaatgattcttccttttattaaaaccagtctcagatatcatactgatttttaagtcaacactatatattttatgatcttttcagtgtgatggcaaggtgcttgttatgtctagaaagtaagaaaacaatatgaggagacattctgtctttcaaaaggtaatggtacatacgttcactggtctctaagtgtaaaagtagtaaattttgtgatgaataaaataattatctcctaattgtatgttagaataattttattagaataatttcatactgaaattattttctccaaataaaaattagatggaaaaatgtgaaaaaaattattcatgctctcatatatattttaaaaacactacttttgcttttttatttaccttttaagacattttcatgcttccaggtaaaaacagatattgtaccatgtacctaatccaaatatcatataaacattttatttatagttaataatctatgatgaaggtaattaaagtagattatggcctttttaagtattgcagtctaaaacttcaaaaactaaaatcattgtcaaaattaatatgattattaatcagaatatcagaatatgattcactatttaaactatgataaattatgataatatatgaggaggcctcgctatagcaaaaatagttaaaatgctgacataacaccaaacttcattttttaaaaaatctgttgttccaaatgtgtataattttaaagtaatttctaaagcagtttattataatggtttgcctgcttaaaaggtataattaaacttcttttctcttctacattgacacacagaaatgtgtcaatgtaaagccaaaaccatcttctgtgtttatggccaatctattctcaaagttaaaagtaaaattgtttcagagtcacagttccctttatttcacataagcccaaactgatagacagtaacggtgtttagttttatactatatttgtgctatttaattctttctattttcacaattattaaattgtgtacactttcattacttttaaaaatgtagaaattcttcatgaacataactctgctgaatgtaaaagaaaattttttttcaaaaatgctgttaatgtatactactggtggttgattggttttattttatgtagcttgacaattcagtgacttaatatctattccatttgtattgtacataaaattttctagaaatacacttttttccaaagtgtaagtttgtgaatagattttagcatgatgaaactgtcataatggtgaatgttcaatctgtgtaagaaaacaaactaaatgtagttgtcacactaaaatttaattggatattgatgaaatcattggcctggcaaaataaaacatgttgaattcccca

SEQ ID NO: 326075 - DNA, 3374 bp, Homo sapiens
caagtcagtaggaagaagcctgccaattgtgtcattatatttttcctgtccaggaggagcatttacacccaatatgcgaaccaccaaggagttcccagatgatgttgtcacttttattcggaaccatcctctcatgtacaattccatctacccaatccacaaaaggcctttgattgttcgtattggcactgactacaagtatacaaagatagctgtggatcgagtgaacgctgctgatgggagataccatgtcctgtttctcggaacagatcggggtactgtgcaaaaagtggttgttcttcctactaacaactctgtcagtggcgagctcattctggaggagctggaagtctttaagaatcatgctcctataacaacaatgaaaatttcatctaaaaaggaggagccgaagacaagatgtgagacatggaaacccactgactcaatgcagaggatttaatctaaaagcatacagaaatgcagctgaaattgtgcagtatggagtaaaaaataacaccacttttctggagtgtgcccccaagtctccgcaggcatctatcaagtggctgttacagaaagacaaagacaggaggaaagaggttaagctgaatgaacgaataatagccacttcacagggactcctgatccgctctgttcagggttctgaccaaggactttatcactgcattgctacagaaaatagtttcaagcagaccatagccaagatcaacttcaaagttttagattcagaaatggtggctgttgtgacggacaaatggtccccgtggacctgggccagctctgtgagggctttacccttccacccgaaggacatcatgggggcattcagccactcagaaatgcagatgattaaccaatactgcaaagacactcggcagcaacatcagcagggagatgaatcacagaaaatgagaggggactatggcaagttaaaggccctcatcaatagtcggaaaagtagaaacaggaggaatcagttgccagagtcataatattttcttatgtgggtcttatgcttccattaacaaatgctctgtcttcaatgatcaaattttgagcaaagaaacttgtgctttaccaaggggaattactgaaaaaggtgattactcctgaagtgagttttacacgaactgaaatgagcatgcattttcttgtatgatagtgactagcactagacatgtcatggtcctcatggtgcatataaatatatttaacttaacccagattttatttatatctttattcaccttttcttcaaaatcgatatggtggctgcaaaactagaattgttgcatccctcaattgaatgagggccatatccctgtggtattcctttcctgctttggggctttagaattctaattgtcagtgattttgtatatgaaaacaagttccaaatccacagcttttacgtagtaaaagtcataaatgcatatgacagaatggctatcaaaagaaatagaaaaggaagacggcatttaaagttgtataaaaacacgagttattcataaagagaaaatgatgagtttttatggttccaatgaaatatgttggggtttttttaagattgtaaaaataatcagttactggtatctgtcactgacctttgtttccttattcaggaagataaaaatcagtaacctaccccatgaagatatttggtgggagttatatcagtgaagcagtttggtttatattcttatgttatcaccttccaaacaaaagcacttactttttttggaagttatttaatttattttagactcaaagaatataatcttgcactactcagttattactgtttgttctcttattccctagtctgtgtggcaaattaaacaatataagaaggaaaaatttgaagtattagacttctaaataaggggtgaaatcatcagaaagaaaaatcaaagtagaaactactaattttttaagaggaatttataacaaatatggctagttttcaacttcagtactcaaattcaatgattcttccttttattaaaaccagtctcagatatcatactgatttttaagtcaacactatatattttatgatcttttcagtgtgatggcaaggtgcttgttatgtctagaaagtaagaaaacaatatgaggagacattctgtctttcaaaaggtaatggtacatacgttcactggtctctaagtgtaaaagtagtaaattttgtgatgaataaaataattatctcctaattgtatgttagaataattttattagaataatttcatactgaaattattttctccaaataaaaattagatggaaaaatgtgaaaaaaattattcatgctctcatatatattttaaaaacactacttttgcttttttatttaccttttaagacattttcatgcttccaggtaaaaacagatattgtaccatgtacctaatccaaatatcatataaacattttatttatagttaataatctatgatgaaggtaattaaagtagattatggcctttttaagtattgcagtctaaaacttcaaaaactaaaatcattgtcaaaattaatatgattattaatcagaatatcagaatatgattcactatttaaactatgataaattatgataatatatgaggaggcctcgctatagcaaaaatagttaaaatgctgacataacaccaaacttcattttttaaaaaatctgttgttccaaatgtgtataattttaaagtaatttctaaagcagtttattataatggtttgcctgcttaaaaggtataattaaacttcttttctcttctacattgacacacagaaatgtgtcaatgtaaagccaaaaccatcttctgtgtttatggccaatctattctcaaagttaaaagtaaaattgtttcagagtcacagttccctttatttcacataagcccaaactgatagacagtaacggtgtttagttttatactatatttgtgctatttaattctttctattttcacaattattaaattgtgtacactttcattacttttaaaaatgtagaaattcttcatgaacataactctgctgaatgtaaaagaaaattttttttcaaaaatgctgttaatgtatactactggtggttgattggttttattttatgtagcttgacaattcagtgacttaatatctattccatttgtattgtacataaaattttctagaaatacacttttttccaaagtgtaagtttgtgaatagattttagcatgatgaaactgtcataatggtgaatgttcaatctgtgtaagaaaacaaactaaatgtagttgtcacactaaaatttaattggatattgatgaaatcattggcctggcaaaataaaacatgttgaattcccca

SEQ ID NO: 326076 - DNA, 4927 bp, Homo sapiens
ggactgcgaaaggagcagggttgcggagctagggctccagcctgcggccgcgcattcttgcgtctggccagccgcgagctctaagggtcggccccgcccggtccgcccccgcggctccctgccaggctctcgcgggcgcgctcggggtggggcctcgcggctggcggagatgcggccggggctgcgcggtggtgatgcgagcctgctgggcggcgcgccggggcagccggagccgcgcgccgcggcgctgtaatcggacaccaagagcgctcgcccccggcctccggccactttccattcactccgaggtgcttgattgagcgacgcggagaagagctccgggtgccgcggcactgcagcgctgagattcctttacaaagaaactcagaggaccgggaagaaagaatttcacctttgcgacgtgctagaaaataaggtcgtctgggaaaaggactggagacacaagcgcatccaaccccggtagcaaactgatgacttttccgtgctgatttctttcaacctcggtattttcccttggatattaacttgcatatctgaagaaatggcattccggacaatttgcgtgttggttggagtatttatttgttctatctgtgtgaaaggatcttcccagccccaagcaagagtttatttaacatttgatgaacttcgagaaaccaagacctctgaatacttcagcctttcccaccatcctttagactacaggattttattaatggatgaagatcaggaccggatatatgtgggaagcaaagatcacattctttccctgaatattaacaatataagtcaagaagctttgagtgttttctggccagcatctacaatcaaagttgaagaatgcaaaatggctggcaaagatcccacacacggctgtgggaactttgtccgtgtaattcagactttcaatcgcacacatttgtatgtctgtgggagtggcgctttcagtcctgtctgtacttacttgaacagagggaggagatcagaggaccaagttttcatgattgactccaagtgtgaatctggaaaaggacgctgctcttttcaaccccaacgtgaacacggtgtctgttatgatcaatgaggagcttttctctggaatgtatatagatttcatggggacagatgctgctatttttcgaagtttaaccaagaggaatgcggtcagaactgatcaacataattccaaatggctaagtgaacctatgtttgtagatgcacatgtcatcccagatggtactgatccaaatgatgctaaggtgtacttcttcttcaaagaaaaactgactgacaataacaggagcacgaaacagattcattccatgattgctcgaatatgtcctaatgacactggtggactgcgtagccttgtcaacaagtggaccactttcttaaaggcgaggctggtgtgctcggtaacagatgaagacggcccagaaacacactttgatgaattagaggatgtgtttctgctggaaactgataacccgaggacaacactagtgtatggcatttttacaacatcaagctcagttttcaaaggatcagccgtgtgtgtgtatcatttatctgatatacagactgtgtttaatgggccttttgcccacaaagaagggcccaatcatcagctgatttcctatcagggcagaattccatatcctcgccctggaacttgtccaggaggagcatttacacccaatatgcgaaccaccaaggagttcccagatgatgttgtcacttttattcggaaccatcctctcatgtacaattccatctacccaatccacaaaaggcctttgattgttcgtattggcactgactacaagtatacaaagatagctgtggatcgagtgaacgctgctgatgggagataccatgtcctgtttctcggaacagatcggggtactgtgcaaaaagtggttgttcttcctactaacaactctgtcagtggcgagctcattctggaggagctggaagtctttaagaatcatgctcctataacaacaatgaaaatttcatctaaaaagcaacagttgtatgtgagttccaatgaaggggtttcccaggtatctctgcaccgctgccacatctatggtacagcctgtgctgactgctgcctggcgcgggacccttattgcgcctgggatggccattcctgttccagattctacccaactgggaaacggaggagccgaagacaagatgtgagacatggaaacccactgactcaatgcagaggatttaatctaaaagcatacagaaatgcagctgaaattgtgcagtatggagtaaaaaataacaccacttttctggagtgtgcccccaagtctccgcaggcatctatcaagtggctgttacagaaagacaaagacaggaggaaagaggttaagctgaatgaacgaataatagccacttcacagggactcctgatccgctctgttcagggttctgaccaaggactttatcactgcattgctacagaaaatagtttcaagcagaccatagccaagatcaacttcaaagttttagattcagaaatggtggctgttgtgacggacaaatggtccccgtggacctgggccagctctgtgagggctttacccttccacccgaaggacatcatgggggcattcagccactcagaaatgcagatgattaaccaatactgcaaagacactcggcagcaacatcagcagggagatgaatcacagaaaatgagaggggactatggcaagttaaaggccctcatcaatagtcggaaaagtagaaacaggaggaatcagttgccagagtcataatattttcttatgtgggtcttatgcttccattaacaaatgctctgtcttcaatgatcaaattttgagcaaagaaacttgtgctttaccaaggggaattactgaaaaaggtgattactcctgaagtgagttttacacgaactgaaatgagcatgcattttcttgtatgatagtgactagcactagacatgtcatggtcctcatggtgcatataaatatatttaacttaacccagattttatttatatctttattcaccttttcttcaaaatcgatatggtggctgcaaaactagaattgttgcatccctcaattgaatgagggccatatccctgtggtattcctttcctgctttggggctttagaattctaattgtcagtgattttgtatatgaaaacaagttccaaatccacagcttttacgtagtaaaagtcataaatgcatatgacagaatggctatcaaaagaaatagaaaaggaagacggcatttaaagttgtataaaaacacgagttattcataaagagaaaatgatgagtttttatggttccaatgaaatatgttggggtttttttaagattgtaaaaataatcagttactggtatctgtcactgacctttgtttccttattcaggaagataaaaatcagtaacctaccccatgaagatatttggtgggagttatatcagtgaagcagtttggtttatattcttatgttatcaccttccaaacaaaagcacttactttttttggaagttatttaatttattttagactcaaagaatataatcttgcactactcagttattactgtttgttctcttattccctagtctgtgtggcaaattaaacaatataagaaggaaaaatttgaagtattagacttctaaataaggggtgaaatcatcagaaagaaaaatcaaagtagaaactactaattttttaagaggaatttataacaaatatggctagttttcaacttcagtactcaaattcaatgattcttccttttattaaaaccagtctcagatatcatactgatttttaagtcaacactatatattttatgatcttttcagtgtgatggcaaggtgcttgttatgtctagaaagtaagaaaacaatatgaggagacattctgtctttcaaaaggtaatggtacatacgttcactggtctctaagtgtaaaagtagtaaattttgtgatgaataaaataattatctcctaattgtatgttagaataattttattagaataatttcatactgaaattattttctccaaataaaaattagatggaaaaatgtgaaaaaaattattcatgctctcatatatattttaaaaacactacttttgcttttttatttaccttttaagacattttcatgcttccaggtaaaaacagatattgtaccatgtacctaatccaaatatcatataaacattttatttatagttaataatctatgatgaaggtaattaaagtagattatggcctttttaagtattgcagtctaaaacttcaaaaactaaaatcattgtcaaaattaatatgattattaatcagaatatcagaatatgattcactatttaaactatgataaattatgataatatatgaggaggcctcgctatagcaaaaatagttaaaatgctgacataacaccaaacttcattttttaaaaaatctgttgttccaaatgtgtataattttaaagtaatttctaaagcagtttattataatggtttgcctgcttaaaaggtataattaaacttcttttctcttctacattgacacacagaaatgtgtcaatgtaaagccaaaaccatcttctgtgtttatggccaatctattctcaaagttaaaagtaaaattgtttcagagtcacagttccctttatttcacataagcccaaactgatagacagtaacggtgtttagttttatactatatttgtgctatttaattctttctattttcacaattattaaattgtgtacactttcattacttttaaaaatgtagaaattcttcatgaacataactctgctgaatgtagttttttttcatgacaattcaatgactttatctattccatttggatggtacat

SEQ ID NO: 326077 - DNA, 208 bp, Homo sapiens
cccaaattatgaagagaaatttgtagtcctcaagcttcctccattttacccaaacatagactgtgtttgctgtttagagctgagtcctttgtaatctgttttggattttcaccaagtgagcttccttcctttgctctcccatctttctgccttggctactttgagtcagctcactggcttcttgtagccctgttttcctgcatgcaca

SEQ ID NO: 326078 - DNA, 414 bp, Homo sapiens
aattgcccggcatgtacatagtggacccgctctcttcagataggtgcagactatctctgaaagctcactctgcctcagttcctctctaacgatgtgcagcaggtattcaccaagcttccagtagcctgtgtttcacatgatgtgaggtgaaggggtgatggtatatttattggcctcgtatctgatagttgcctgcacattgtgcccagagaagcactttgggaagtggagctggtgttcaaaaggccactaattggcttattccccaggattcatcttcagttgttgaaatctattttttgaaaggcttaacctgggaagtcccctgaaaacaggtgtgtgatgcagtagggacagcgggaaaccaggggaagtttccagagagaagtgtgaagagccattctccattgctat

SEQ ID NO: 326079 - DNA, 342 bp, Homo sapiens
atgtaatctatcacgactttcagtagattctacctcctcgagaatgtggcttgtacatttctccataatttggtgctgctcacctttccagtctcatctctgaccactctgagactctctaaactacttttagtactcacatactcagcatgcataatcattcatgttctttccaaaatgtacgtatgttgtgccctccacccaaaacagacttccccacctctttatttggttaactccttcacaccttgtaagtgtctgtgtacaagtcactaacttccaattttccctaaatctgggttaggttacctcctagggctctcagtacttatctcttcataa

SEQ ID NO: 326080 - DNA, 497 bp, Homo sapiens
ttccctttagataatcaagtaagccattcaaaatgccaaaatgtcccaaactcctaattagctcattagaggtaaacattaattaatcattctggtgagtttaggtaaaggttaccatcttcactgcagggctcctgggaaccctcaatgtaagaaagcattaacccacaaatcagaacattctcaatgaagtccatcaaaaatataaatcaatagaaactgtttttaactcccaactagtgtgctggaagacgaacttgtttaattgtatttgtgtaaaatgttgtagtagtgacacataatgaaatcgttcaagctggtcacccttggagacgccagcagataatacagcaaggcaggtgagatcccaggaagatgttgggttgacagctttgaatcagcacatctttcaactatcatattgcaagataaccacaaccattaatataacaggtatcacttattaatcccttactacatgccaaacactttatata

SEQ ID NO: 326081 - DNA, 1210 bp, Homo sapiens
atggactctctagcaacatcaatcaaccagtttgccctggagttgagcaaaaagctagctgaatctgctcagggtaaaaatatcttcttttcttcctggagcatctcaacttccttgaccatagtgtatttgggcgccaaaggtaccactgcagcccaaatggcccaggtgcttcaatttaacagagaccagggagtcaaatgtgaccctgaaagtgaaaaaaaaaggaaaatggaattcaacttgagcaactcggaagaaatacactctgatttccaaacacttatctcagaaatcctcaagcccaacgatgactacttacttaaaacagccaatgcgatatatggagagaaaacgtatgcatttcacaataaatatttagaagacatgaaaacatattttggtgcagaacctcagcctgttaactttgtggaagcttctgatcaaatcagaaaggacatcaactcttgggttgaaagacagaccgagggtaaaatccagaatctcctgcctgatgactctgtggattccacaaccaggatgattctggtgaacgccctatactttaaaggaatctgggaacatcaattcttagtgcaaaacaccacagaaaagccttttagaataaacgagactacaagcaaaccagtgcaaatgatgtttatgaagaaaaagcttcacatttttcacatagaaaagccaaaagcagtgggccttcaactctactacaaaagccgtgacctcagcctgcttatactactgccagaagacattaatgggctggaacagctggaaaaggccatcacctatgagaagctgaatgagtggaccagtgcagacatgatggagttgtatgaagtgcagctacaccttcccaagttcaagctggaagacagttatgatctcaagtcaaccctgagcagtatggggatgagtgatgccttcagccaaagcaaagctgatttctcaggaatgtcttcagcaagaaacctatttttgtccaatgttttccataaggcttttgtggaaataaatgaacaaggtactgaagctgcagctggcagtgggagtgagatagatatacgaattagagtcccatccattgaattcaatgcaaatcacccattcctcttcttcatcaggcacaataaaaccaacaccattcttttttatggaagattatgctccccctaatcctgcatatctctca

SEQ ID NO: 326082 - DNA, 960 bp, Homo sapiens
caagggtccttcgaggtaggaggtcctgggtgactttggaagtccgtagtgtctcattgcagataatttttagcttagggcctggtggctaggtcggttctctcctttccagtcggagacctctgccgcaaacatgctccgccagatcatcggtcaggccaagaagcatccgagcttgatccccctctttgtatttattggaactggagctactggagcaacactgtatctcttgcgtctggcattgttcaatccagatgtttgttgggacagaaataacccagagccctggaacaaactgggtcccaatgatcaatacaagttctactcagtgaatgtggattacagcaagctgaagaaggaacgtccagatttctaaatgaaatgtttcactataacgctgctttagaatgaaggtcttccagaagccacatccgcacaattttccacttaaccaggaaatatttctcctctaaatgcatgaaatcatgttggagatctctattgtaatctctattggagattacaatgattaaatcaataaataactgaaacttgatatgtgtcacttttttatgctgaaagtatgctctgaactttagagtataggaaattaactattagaatttaaagaatttcttgaatttctgtagtttgaaaatacgactttaagctgctttagtaaaacacttccattttgtgtatagactgttggtaacttcactagagcatacataacaactggaactggaaattatacaaaagtaaattgggaaggatactccagcatctgacactggcaaaatggaaacctttgagtttctcttactggctgttgaagtgtgtgcagtttttaacaatggtttttacttggcatctctttgttgtgattttcaaggttataagttgctttggtcctaggattgaagttgaaatctgagtttatcagtgctaaccatg

SEQ ID NO: 326083 - DNA, 611 bp, Homo sapiens
gatctctttggggtcaagaaagaaccctagtggatttgggattctagagggggtgttataattaattattcagaaaaatgcatgtatttacctcttcaaccaaaagggcagtgcagataatttttagcttagggcctggtggctaggtcggttctctcctttccagtcggagacctctgccgcaaacatgctccgccagatcatcggtcaggccaagaagcatccgagcttgatccccctctttgtatttattggaactggagctactggagcaacactgtatctcttgcgtctggcattgttcaatccagatgtttgttgggacagaaataacccagagccctggaacaaactgggtcccaatgatcaatacaagttctactcagtgaatgtggattacagcaagctgaagaaggaacgtccagatttctaaatgaaatgtttcactataacgctgctttagaatgaaggtcttccagaagccacatccgcacaattttccacttaaccaggaaatatttctcctctaaatgcatgaaatcatgttggagatctctattgtaatctctattggagattacaatgattaaatcaataaataactgaaactt

SEQ ID NO: 326084 - DNA, 716 bp, Homo sapiens
ggtatccacgcgacccccttcaaactctttcttgaagcaccaacatgctgttggtcacctggtagtttcttttctcagataatgtatgtccatcagtcctcaccatagagtcgtgtcctttcctcacagtaccggaggcaatcaaatagaactgtcactcaagggtcgtgtcacaggaaggaccgcccaccacgtctccctcgcatgaattttctttgcagataatttttagcttagggcctggtggctaggtcggttctctcctttccagtcggagacctctgccgcaaacatgctccgccagatcatcggtcaggccaagaagcatccgagcttgatccccctctttgtatttattggaactggagctactggagcaacactgtatctcttgcgtctggcattgttcaatccagatgtttgttgggacagaaataacccagagccctggaacaaactgggtcccaatgatcaatacaagttctactcagtgaatgtggattacagcaagctgaagaaggaacgtccagatttctaaatgaaatgtttcactataacgctgctttagaatgaaggtcttccagaagccacatccgcacaattttccacttaaccaggaaatatttctcctctaaatgcatgaaatcatgttggagatctctattgtaatctctattggagattacaatgattaaatcaataaataactgaaactt

SEQ ID NO: 326085 - DNA, 594 bp, Homo sapiens
actctccaatagagattacaatagagatctccaacatgatttcgatgcatttagaggagaaatatttcctggttaagtggaaaattgtgcggattgcagataatttttagcttagggcctggtggctaggtcggttctctcctttccagtcggagacctctgccgcaaacatgctccgccagatcatcggtcaggccaagaagcatccgagcttgatccccctctttgtatttattggaactggagctactggagcaacactgtatctcttgcgtctggcattgttcaatccagatgtttgttgggacagaaataacccagagccctggaacaaactgggtcccaatgatcaatacaagttctactcagtgaatgtggattacagcaagctgaagaaggaacgtccagatttctaaatgaaatgtttcactataacgctgctttagaatgaaggtcttccagaagccacatccgcacaattttccacttaaccaggaaatatttctcctctaaatgcatgaaatcatgttggagatctctattgtaatctctattggagattacaatgattaaatcaataaataactgaaactt

SEQ ID NO: 326086 - DNA, 571 bp, Homo sapiens
  misc_feature (32)..(32): n is a, c, g, or t
cttgaacccccattgaacgcttgagcgccatngtgagggtacctggccattcggccattatggccggggagtgcagataatttttagcttagggcctggtggctaggtcggttctctcctttccagtcggagacctctgccgcaaacatgctccgccagatcatcggtcaggccaagaagcatccgagcttgatccccctctttgtatttattggaactggagctactggagcaacactgtatctcttgcgtctggcattgttcaatccagatgtttgttgggacagaaataacccagagccctggaacaaactgggtcccaatgatcaatacaagttctactcagtgaatgtggattacagcaagctgaagaaggaacgtccagatttctaaatgaaatgtttcactataacgctgctttagaatgaaggtcttccagaagccacatccgcacaattttccacttaaccaggaaatatttctcctctaaatgcatgaaatcatgttggagatctctattgtaatctctattggagattacaatgattaaatcaataaataactgaaactt

SEQ ID NO: 326087 - DNA, 612 bp, Homo sapiens
caagggtccttcgaggtaggaggtcctgggtgactttggaagtccgtagtgtctcattgcagataatttttagcttagggcctggtggctaggtcggttctctcctttccagtcggagacctctgccgcaaacatgctccgccagatcatcggtcaggccaagaagcatccgagcttgatccccctctttgtatttattggaactggagctactggagcaacactgtatctcttgcgtctggcattgttcaatccagatgtttgttgggacagaaataacccagagccctggaacaaactgggtcccaatgatcaatacaagttctactcagtgaatgtggattacagcaagctgaagaaggaacgtccagatttctaaatgaaatgtttcactataacgctgctttagaatgaaggtcttccagaagccacatccgcacaattttccacttaaccaggaaatatttctcctctaaatgcatgaaatcatgttggagatctctattgtaatctctattggagattacaatgattaaatcaataaataactgaaacttaaaaaaaacaagttatccagcggccgaattgagctcattggccaatcccccttcg

SEQ ID NO: 326088 - DNA, 757 bp, Homo sapiens
  misc_feature (572)..(572): n is a, c, g, or t
  misc_feature (638)..(638): n is a, c, g, or t
  misc_feature (664)..(664): n is a, c, g, or t
  misc_feature (666)..(666): n is a, c, g, or t
  misc_feature (681)..(681): n is a, c, g, or t
  misc_feature (686)..(686): n is a, c, g, or t
  misc_feature (693)..(694): n is a, c, g, or t
  misc_feature (700)..(701): n is a, c, g, or t
  misc_feature (706)..(706): n is a, c, g, or t
  misc_feature (715)..(715): n is a, c, g, or t
  misc_feature (719)..(719): n is a, c, g, or t
  misc_feature (728)..(728): n is a, c, g, or t
caagggtccttcgaggtaggaggtcctgggtgactttggaagtccgtagtgtctcattgcagataatttttagcttagggcctggtggctaggtcggttctctcctttccagtcggagacctctgccgcaaacatgctccgccagatcatcggtcaggccaagaagcatccgagcttgatccccctctttgtatttattggaactggagctactggagcaacactgtatctcttgcgtctggcattgttcaatccagatgtttgttgggacagaaataacccagagccctggaacaaactgggtcccaatgatcaatacaagttctactcagtgaatgtggattacagcaagctgaagaaggaacgtccagatttctaaatgaaatgtttcactataacgctgctttagaatgaaggtcttccagaagccacatccgcacaattttccacttaaccaggaaatatttctcctctaaatgcatgaaatcatgttggagatctctattgtaatctctattggagattacaatgattaaatcaataaataactgaaacttcgactttagactcgngcaagtttatgcatgcggccgaatttcgggctaacttggccaattcgccctatagggagccggatnaccattcactgcccgcgttttacacngngggactggaaaaccntgggntacccanntaaatnncttgnagcatcccntttnccagttggnttatactggcctgaccgtcgccctttcct

SEQ ID NO: 326089 - DNA, 823 bp, Homo sapiens
  misc_feature (32)..(32): n is a, c, g, or t
  misc_feature (576)..(576): n is a, c, g, or t
  misc_feature (638)..(638): n is a, c, g, or t
  misc_feature (704)..(704): n is a, c, g, or t
  misc_feature (730)..(730): n is a, c, g, or t
  misc_feature (732)..(732): n is a, c, g, or t
  misc_feature (747)..(747): n is a, c, g, or t
  misc_feature (752)..(752): n is a, c, g, or t
  misc_feature (759)..(760): n is a, c, g, or t
  misc_feature (766)..(767): n is a, c, g, or t
  misc_feature (772)..(772): n is a, c, g, or t
  misc_feature (781)..(781): n is a, c, g, or t
  misc_feature (785)..(785): n is a, c, g, or t
  misc_feature (794)..(794): n is a, c, g, or t
cttgaacccccattgaacgcttgagcgccatngtgagggtacctggccattcggccattatggccggggagtgcagataatttttagcttagggcctggtggctaggtcggttctctcctttccagtcggagacctctgccgcaaacatgctccgccagatcatcggtcaggccaagaagcatccgagcttgatccccctctttgtatttattggaactggagctactggagcaacactgtatctcttgcgtctggcattgttcaatccagatgtttgttgggacagaaataacccagagccctggaacaaactgggtcccaatgatcaatacaagttctactcagtgaatgtggattacagcaagctgaagaaggaacgtccagatttctaaatgaaatgtttcactataacgctgctttagaatgaaggtcttccagaagccacatccgcacaattttccacttaaccaggaaatatttctcctctaaatgcatgaaatcatgttggagatctctattgtaatctctattggagattacaatgattaaatcaataaataactgaaacttaaaanaaaacttcacatataaataataaacatgttggccgcctgggcccagacgactttagactcgngcaagtttatgcatgcggccgaatttcgggctaacttggccaattcgccctatagggagccggatnaccattcactgcccgcgttttacacngngggactggaaaaccntgggntacccanntaaatnncttgnagcatcccntttnccagttggnttatactggcctgaccgtcgccctttcct

SEQ ID NO: 326090 - DNA, 503 bp, Homo sapiens
caagggtccttcgaggtaggaggtcctgggtgactttggaagtccgtagtgtctcattgcagataatttttagcttagggcctggtggctaggtcggttctctcctttccagtcggagacctctgccgcaaacatgctccgccagatcatcggtcaggccaagaagcatccgagcttgatccccctctttgtatttattggaactggagctactggagcaacactgtatctcttgcgtctggcattgttcaatccagatgtttgttgggacagaaataacccagagccctggaacaaactgggtcccaatgatcaatacaagttctactcagtgaatgtggattacagcaagctgaagaaggaacgtccagatttctaaatgaaatgtttcactataacgctgctttagaatgaaggtcttcctgcatgaaatcatgttggagatctctattgtaatctctattggagattacaatgattaaatcaataaataactgaaactt

SEQ ID NO: 326091 - DNA, 553 bp, Homo sapiens
gttataagaaatcttacctcaatgtaagatctactttatttaaattttaagacaaaacagtccaataacagtttgagacttggaaatcaatgtgcagaaactactgtaatctctcgttggccagtgttttaagtatttgaagatggttattctattttgtgtttggtttagttgatccccctctttgtatttattggaactggagctactggagcaacactgtatctcttgcgtctggcattgttcaatccagatgtttgttgggacagaaataacccagagccctggaacaaactgggtcccaatgatcaatacaagttctactcagtgaatgtggattacagcaagctgaagaaggaacgtccagatttctaaatgaaatgtttcactataacgctgctttagaatgaaggtcttccagaagccacatccgcacaattttccacttaaccaggaaatatttctcctctaaatgcatgaaatcatgttggagatctctattgtaatctctattggagattacaatgattaaatcaataaataactgaaactt

SEQ ID NO: 326092 - DNA, 437 bp, Homo sapiens
  misc_feature (37)..(37): n is a, c, g, or t
tacattttattcaaatttgaatgcccgatttcccagncagagagaaagagttttattgatccccctctttgtatttattggaactggagctactggagcaacactgtatctcttgcgtctggcattgttcaatccagatgtttgttgggacagaaataacccagagccctggaacaaactgggtcccaatgatcaatacaagttctactcagtgaatgtggattacagcaagctgaagaaggaacgtccagatttctaaatgaaatgtttcactataacgctgctttagaatgaaggtcttccagaagccacatccgcacaattttccacttaaccaggaaatatttctcctctaaatgcatgaaatcatgttggagatctctattgtaatctctattggagattacaatgattaaatcaataaataactgaaactt

SEQ ID NO: 326093 - DNA, 573 bp, Homo sapiens
cacttgggacgtccgtacatgtctcatagcgaataaggttcataggcttagggcctgggggatacgttggcgcgattgatctcctggctccgagtcgctagaaccctctggccgaaagaccattgctgccgccacgatcatcggttgcaggccatcgaaggattgtcccgtatgcttgtgagtccctccatcttgttgtcatatcatgggaagagtgcagcgtgcatggccgcaactacatgtatctcttggggtctgcattgttcaatccagatgtttgttgggacagaaataacccagagccctggaacaaactgggtcccaatgatcaatacaagttctactcagtgaatgtggattacagcaagctgaagaaggaacgtccagatttctaaatgaaatgtttcactataacgctgctttagaatgaaggtcttccagaagccacatccgcacaattttccacttaaccaggaaatatttctcctctaaatgcatgaaatcatgttggagatctctattgtaatctctattggagattacaatgattaaatcaataaataactgaaactt

SEQ ID NO: 326094 - DNA, 411 bp, Homo sapiens
  misc_feature (305)..(306): n is a, c, g, or t
caagggtccttcgaggtaggaggtcctgggtgactttggaagtccgtagtgtctcattgcagataatttttagcttagggcctggtggctaggtcggttctctcctttccagtcggagacctctgccgcaaacatgctccgccagatcatcggtcaggccaagaagcatccgagcttgatccccctctttgtatttattggaactggagctactggagcaacactgtatctcttgcgtctggcattgttcaatccagatgtttgtatgggacagaaataacccagagccctggaacaaactgggnngtcccaatgggactcaataccaagggttctactaaagggggggggcccccccctttttttggggggggacaaaaaaaaaagggggcgcaaatgaaggtcttccag

SEQ ID NO: 326095 - DNA, 545 bp, Homo sapiens
tcatggttctcggcacatgtaaatgttttttgccttcacttgcacatttgcagttgaaaaacaatagacaatcaaaagattgattcatcattattctatgcacttttctgtatatcactttattaattaaatggaaaggttttgtgaaagccagataaaaagtatcttgtgatagggattctgtgttctaccttttttctaattgattacatgagattgcttattatagatcctctacctgtttcaacttcataatgaaataacaccatacctcatctaatagaaaataagattgatctgttcaaaaatgtattcttagtacaaaacactaaatagtgctttattattataacagtcgtaatgttttatttcttttagttgggacagaaataacccagagccctggaacaaactgggtcccaatgatcaatacaaggtaaactacaaaattgttttaaagttgttagaaattgtgttgtaataagttttgtcatggggtgggttttcttgaaactggatatacgagtaaaattccattatattga

SEQ ID NO: 326096 - DNA, 1014 bp, Homo sapiens
gatctctttggggtcaagaaagaaccctagtggatttgggattctagagggggtgttataattaattattcagaaaaatgcatgtatttacctcttcaaccaaaagggcagtgcagataatttttagcttagggcctggtggctaggtcggttctctcctttccagtcggagacctctgccgcaaacatgctccgccagatcatcggtcaggccaagaagcatccgagcttgatccccctctttgtatttattggaactggagctactggagcaacactgtatctcttgcgtctggcattgttcaatccagatgtttgttgggacagaaataacccagagccctggaacaaactgggtcccaatgatcaatacaagttctactcagtgaatgtggattacagcaagctgaagaaggaacgtccagatttctaaatgaaatgtttcactataacgctgctttagaatgaaggtcttccagaagccacatccgcacaattttccacttaaccaggaaatatttctcctctaaatgcatgaaatcatgttggagatctctattgtaatctctattggagattacaatgattaaatcaataaataactgaaacttgatatgtgtcacttttttatgctgaaagtatgctctgaactttagagtataggaaattaactattagaatttaaagaatttcttgaatttctgtagtttgaaaatacgactttaagctgctttagtaaaacacttccattttgtgtatagactgttggtaacttcactagagcatacataacaactggaactggaaattatacaaaagtaaattgggaaggatactccagcatctgacactggcaaaatggaaacctttgagtttctcttactggctgttgaagtgtgtgcagtttttaacaatggtttttacttggcatctctttgttgtgattttcaaggttataagttgctttggtcctaggattgaagttgaaatctgagtttatcagtgctaaccatg

SEQ ID NO: 326097 - DNA, 816 bp, Homo sapiens
  misc_feature (587)..(587): n is a, c, g, or t
  misc_feature (589)..(589): n is a, c, g, or t
  misc_feature (598)..(598): n is a, c, g, or t
  misc_feature (606)..(606): n is a, c, g, or t
  misc_feature (613)..(613): n is a, c, g, or t
  misc_feature (616)..(616): n is a, c, g, or t
  misc_feature (631)..(631): n is a, c, g, or t
  misc_feature (697)..(697): n is a, c, g, or t
  misc_feature (723)..(723): n is a, c, g, or t
  misc_feature (725)..(725): n is a, c, g, or t
  misc_feature (740)..(740): n is a, c, g, or t
  misc_feature (745)..(745): n is a, c, g, or t
  misc_feature (752)..(753): n is a, c, g, or t
  misc_feature (759)..(760): n is a, c, g, or t
  misc_feature (765)..(765): n is a, c, g, or t
  misc_feature (774)..(774): n is a, c, g, or t
  misc_feature (778)..(778): n is a, c, g, or t
  misc_feature (787)..(787): n is a, c, g, or t
caagggtccttcgaggtaggaggtcctgggtgactttggaagtccgtagtgtctcattgcagataatttttagcttagggcctggtggctaggtcggttctctcctttccagtcggagacctctgccgcaaacatgctccgccagatcatcggtcaggccaagaagcatccgagcttgatccccctctttgtatttattggaactggagctactggagcaacactgtatctcttgcgtctggcattgttcaatccagatgtttgttgggacagaaataacccagagccctggaacaaactgggtcccaatgatcaatacaagttctactcagtgaatgtggattacagcaagctgaagaaggaacgtccagatttctaaatgaaatgtttcactataacgctgctttagaatgaaggtcttccagaagccacatccgcacaattttccacttaaccaggaaatatttctcctctaaatgcatgaaatcatgttggagatctctattgtaatctctattggagattacaatgattaaatcaataaataactgaaacttaaaaaaaaaaaaaaaaaaaaaaaaatacananaaaacatgncgcccgcntggcccnagncgactttagactcgngcaagtttatgcatgcggccgaatttcgggctaacttggccaattcgccctatagggagccggatnaccattcactgcccgcgttttacacngngggactggaaaaccntgggntacccanntaaatnncttgnagcatcccntttnccagttggnttatactggcctgaccgtcgccctttcct

SEQ ID NO: 326098 - DNA, 723 bp, Homo sapiens
caagggtccttcgaggtaggaggtcctgggtgactttggaagtccgtagtgtctcattgcagataatttttagcttagggcctggtggctaggtcggttctctcctttccagtcggagacctctgccgcaaacatgctccgccagatcatcggtcaggccaagaagcatccgagcttgatccccctctttgtatttattggaactggagctactggagcaacactgtatctcttgcgtctggcattgttcaatccagatgtttgttgggacagaaataacccagagccctggaacaaactgggtcccaatgatcaatacaagttctactcagtgaatgtggattacagcaagctgaagaaggaacgtccagatttctaaatgaaatgtttcactataacgctgctttagaatgaaggtcttccagaagccacatccgcacaattttccacttaaccaggaaatatttctcctctaaatgcatgaaatcatgttggagatctctattgtaatctctattggagattacaatgattaaatcaataaataactgaaacttaaaaaaaaaaaatatggatttacacatctctcaactggacgagctctgcgtgaggaacttgcatcagaatctgaaagaagcttgatcagagacattatggaacgtggagacctgatgccctcatgcaatcgtttggagcttctgggaggccatggtggccagcctc

SEQ ID NO: 326099 - DNA, 747 bp, Homo sapiens
  misc_feature (558)..(558): n is a, c, g, or t
  misc_feature (578)..(578): n is a, c, g, or t
caagggtccttcgaggtaggaggtcctgggtgactttggaagtccgtagtgtctcattgcagataatttttagcttagggcctggtggctaggtcggttctctcctttccagtcggagacctctgccgcaaacatgctccgccagatcatcggtcaggccaagaagcatccgagcttgatccccctctttgtatttattggaactggagctactggagcaacactgtatctcttgcgtctggcattgttcaatccagatgtttgttgggacagaaataacccagagccctggaacaaactgggtcccaatgatcaatacaagttctactcagtgaatgtggattacagcaagctgaagaaggaacgtccagatttctaaatgaaatgtttcactataacgctgctttagaatgaaggtcttccagaagccacatccgcacaattttccacttaaccaggaaatatttctcctctaaatgcatgaaatcatgttggagatctctattgtaatctctattggagattacaatgattaaatcaataaataactgaaacttnaaaaaaaaatgctataaatnattgaaataaaaaataatttttaatagaaaaatttggggcgcccctgggcccagtgcttttttgattgggaaagatttttctttggcgcccaatttggggctctttggcaaattccccatatggggggggtaaaaacaatctggggccgggtttaaaacgggggagggg

SEQ ID NO: 326100 - DNA, 714 bp, Homo sapiens
  misc_feature (655)..(655): n is a, c, g, or t
  misc_feature (677)..(678): n is a, c, g, or t
  misc_feature (680)..(680): n is a, c, g, or t
caagggtccttcgaggtaggaggtcctgggtgactttggaagtccgtagtgtctcattgcagataatttttagcttagggcctggtggctaggtcggttctctcctttccagtcggagacctctgccgcaaacatgctccgccagatcatcggtcaggccaagaagcatccgagcttgatccccctctttgtatttattggaactggagctactggagcaacactgtatctcttgcgtctggcattgttcaatccagatgtttgttgggacagaaataacccagagccctggaacaaactgggtcccaatgatcaatacaagttctactcagtgaatgtggattacagcaagctgaagaaggaacgtccagatttctaaatgaaatgtttcactataacgctgctttagaatgaaggtcttccagaagccacatccgcacaattttccacttaaccaggaaatatttctcctctaaatgcatgaaatcatgttggagatctctattgtaatctctattggagattacaatgattaaatcaataaataactgaaacttaaaaaaaaaaacaacaaaaacaaaaaaaaaaaaaaaaaaaaaaaaatttgttggggcggccttgggccctggaaaaagttttttaaccccttctgttngggggccgggccccattgggtnngngcacctgtgccaaaggcggtccccaggaaaatcc

SEQ ID NO: 326101 - DNA, 1074 bp, Homo sapiens
tcatggttctcggcacatgtaaatgttttttgccttcacttgcacatttgcagttgaaaaacaatagacaatcaaaagattgattcatcattattctatgcacttttctgtatatcactttattaattaaatggaaaggttttgtgaaagccagataaaaagtatcttgtgatagggattctgtgttctaccttttttctaattgattacatgagattgcttattatagatcctctacctgtttcaacttcataatgaaataacaccatacctcatctaatagaaaataagattgatctgttcaaaaatgtattcttagtacaaaacactaaatagtgctttattattataacagtcgtaatgttttatttcttttagttgggacagaaataacccagagccctggaacaaactgggtcccaatgatcaatacaagttctactcagtgaatgtggattacagcaagctgaagaaggaacgtccagatttctaaatgaaatgtttcactataacgctgctttagaatgaaggtcttccagaagccacatccgcacaattttccacttaaccaggaaatatttctcctctaaatgcatgaaatcatgttggagatctctattgtaatctctattggagattacaatgattaaatcaataaataactgaaacttgatatgtgtcacttttttatgctgaaagtatgctctgaactttagagtataggaaattaactattagaatttaaagaatttcttgaatttctgtagtttgaaaatacgactttaagctgctttagtaaaacacttccattttgtgtatagactgttggtaacttcactagagcatacataacaactggaactggaaattatacaaaagtaaattgggaaggatactccagcatctgacactggcaaaatggaaacctttgagtttctcttactggctgttgaagtgtgtgcagtttttaacaatggtttttacttggcatctctttgttgtgattttcaaggttataagttgctttggtcctaggattgaagttgaaatctgagtttatcagtgctaaccatg

SEQ ID NO: 326102 - DNA, 1050 bp, Homo sapiens
ctgaggcgggtggatcacttgaggttgggagttcgagaccagcctgcccaacatgatgaaaccccgtgtctactaaaaatacaaaaattagctgggcgtggtggcacatacctgtaattccagctacttgggaggctgaggcaggagaatcacttgaacctgggaggcagaggttgcagtgagctccagcctgggtgacaagagtgaaactccgtctcaaaaaaaaaaaaaaaaaatgcagataatttttagcttagggcctggtggctaggtcggttctctcctttccagtcggagacctctgccgcaaacatgctccgccagatcatcggtcaggccaagaagcatccgagcttgggacagaaataacccagagccctggaacaaactgggtcccaatgatcaatacaagttctactcagtgaatgtggattacagcaagctgaagaaggaacgtccagatttctaaatgaaatgtttcactataacgctgctttagaatgaaggtcttccagaagccacatccgcacaattttccacttaaccaggaaatatttctcctctaaatgcatgaaatcatgttggagatctctattgtaatctctattggagattacaatgattaaatcaataaataactgaaacttgatatgtgtcacttttttatgctgaaagtatgctctgaactttagagtataggaaattaactattagaatttaaagaatttcttgaatttctgtagtttgaaaatacgactttaagctgctttagtaaaacacttccattttgtgtatagactgttggtaacttcactagagcatacataacaactggaactggaaattatacaaaagtaaattgggaaggatactccagcatctgacactggcaaaatggaaacctttgagtttctcttactggctgttgaagtgtgtgcagtttttaacaatggtttttacttggcatctctttgttgtgattttcaaggttataagttgctttggtcctaggattgaagttgaaatctgagtttatcagtgctaaccatg

SEQ ID NO: 326103 - DNA, 969 bp, Homo sapiens
caagggtccttcgaggtaggaggtcctgggtgactttggaagtccgtagtgtctcattgcagataatttttagcttagggcctggtggctaggtcggttctctcctttccagtcggagacctctgccgcaaacatgctccgccagatcatcggtcaggccaagaagcatccgagcttgatccccctctttgtatttattggaactggagctactggagcaacactgtatctcttgcgtctggcattgttcaatccagatgtttgtatgggacagaaataacccagagccctggaacaaactgggaaactgggtcccaatgatcaatacaagttctactcagtgaatgtggattacagcaagctgaagaaggaacgtccagatttctaaatgaaatgtttcactataacgctgctttagaatgaaggtcttccagaagccacatccgcacaattttccacttaaccaggaaatatttctcctctaaatgcatgaaatcatgttggagatctctattgtaatctctattggagattacaatgattaaatcaataaataactgaaacttgatatgtgtcacttttttatgctgaaagtatgctctgaactttagagtataggaaattaactattagaatttaaagaatttcttgaatttctgtagtttgaaaatacgactttaagctgctttagtaaaacacttccattttgtgtatagactgttggtaacttcactagagcatacataacaactggaactggaaattatacaaaagtaaattgggaaggatactccagcatctgacactggcaaaatggaaacctttgagtttctcttactggctgttgaagtgtgtgcagtttttaacaatggtttttacttggcatctctttgttgtgattttcaaggttataagttgctttggtcctaggattgaagttgaaatctgagtttatcagtgctaaccatg

SEQ ID NO: 326104 - DNA, 1288 bp, Homo sapiens
aatattaattgattataaagaaatgttggaaatgtaaacagcaaaaataccgtattatttaaaagccattaccagagttgaagtgtcagtttgatattgaatatagtctggattaggaaattagtgagagagagaaaatatcttagaagttatgtaaaccacaaaacaaagcagtaccttatattactagcctctttttgttgcaggatctctccctctaaattacagcagttcattcagcaagtagggaaggtaattcttgttaatcctctattctgttggcgattcttccacgtacttagtagagttaaggcaaaaacttaccgaattggaagtatgtatcagaaggaattcttaattattcactttgaaataaaagaattttccttataggttccaagtagtagactgtactataatactgctcttctgaaataaattgaatatttttaccttgccaaaactatcattgaaggctggaattttaggtacagtatttttctgtgaatgattttatgttgttaaatattcttttaaaaattcatatctgtaattgttactgtagaaaaccaaatacaaagaattctaaaacctttgtaccgtctctatgtatttgagattacttaaaatatctttttttctgttccaagttctactcagtgaatgtggattacagcaagctgaagaaggaacgtccagatttctaaatgaaatgtttcactataacgctgctttagaatgaaggtcttccagaagccacatccgcacaattttccacttaaccaggaaatatttctcctctaaatgcatgaaatcatgttggagatctctattgtaatctctattggagattacaatgattaaatcaataaataactgaaacttgatatgtgtcacttttttatgctgaaagtatgctctgaactttagagtataggaaattaactattagaatttaaagaatttcttgaatttctgtagtttgaaaatacgactttaagctgctttagtaaaacacttccattttgtgtatagactgttggtaacttcactagagcatacataacaactggaactggaaattatacaaaagtaaattgggaaggatactccagcatctgacactggcaaaatggaaacctttgagtttctcttactggctgttgaagtgtgtgcagtttttaacaatggtttttacttggcatctctttgttgtgattttcaaggttataagttgctttggtcctaggattgaagttgaaatctgagtttatcagtgctaaccatg

SEQ ID NO: 326105 - DNA, 1010 bp, Homo sapiens
  misc_feature (222)..(222): n is a, c, g, or t
  misc_feature (227)..(228): n is a, c, g, or t
  misc_feature (271)..(271): n is a, c, g, or t
caagggtccttcgaggtaggaggtcctgggtgactttggaagtccgtagtgtctcattgcagataatttttagcttagggcctggtggctaggtcggttctctcctttccagtcggagacctctgccgcaaacatgctccgccagatcatcggtcaggccaagaagcatccgagcttgatccccctctttgtatttattggaactggagctactggagaccntgggnntaaatttccttacattgtgacccggattccatggaggccaacntttttggctttcaaaaatcgccaagcatagtttgtatgggacagaaataacccagagccctggaacaaactgggaaactgggtcccaatgatcaatacaagttctactcagtgaatgtggattacagcaagctgaagaaggaacgtccagatttctaaatgaaatgtttcactataacgctgctttagaatgaaggtcttccagaagccacatccgcacaattttccacttaaccaggaaatatttctcctctaaatgcatgaaatcatgttggagatctctattgtaatctctattggagattacaatgattaaatcaataaataactgaaacttgatatgtgtcacttttttatgctgaaagtatgctctgaactttagagtataggaaattaactattagaatttaaagaatttcttgaatttctgtagtttgaaaatacgactttaagctgctttagtaaaacacttccattttgtgtatagactgttggtaacttcactagagcatacataacaactggaactggaaattatacaaaagtaaattgggaaggatactccagcatctgacactggcaaaatggaaacctttgagtttctcttactggctgttgaagtgtgtgcagtttttaacaatggtttttacttggcatctctttgttgtgattttcaaggttataagttgctttggtcctaggattgaagttgaaatctgagtttatcagtgctaaccatg

SEQ ID NO: 326106 - DNA, 647 bp, Homo sapiens
ctgaggcgggtggatcacttgaggttgggagttcgagaccagcctgcccaacatgatgaaaccccgtgtctactaaaaatacaaaaattagctgggcgtggtggcacatacctgtaattccagctacttgggaggctgaggcaggagaatcacttgaacctgggaggcagaggttgcagtgagctccagcctgggtgacaagagtgaaactccgtctcaaaaaaaaaaaaaaaaaatgcagataatttttagcttagggcctggtggctaggtcggttctctcctttccagtcggagacctctgccgcaaacatgctccgccagatcatcggtcaggccaagaagcatccgagcttgggacagaaataacccagagccctggaacaaactgggtcccaatgatcaatacaagttctactcagtgaatgtggattacagcaagctgaagaaggaacgtccagatttctaaatgaaatgtttcactataacgctgctttagaatgaaggtcttccagaagccacatccgcacaattttccacttaaccaggaaatatttctcctctaaatgcatgaaatcatgttggagatctctattgtaatctctattggagattacaatgattaaatcaataaataactgaaactt

SEQ ID NO: 326107 - DNA, 957 bp, Homo sapiens
ctgaggcgggtggatcacttgaggttgggagttcgagaccagcctgcccaacatgatgaaaccccgtgtctactaaaaatacaaaaattagctgggcgtggtggcacatacctgtaattccagctacttgggaggctgaggcaggagaatcacttgaacctgggaggcagaggttgcagtgagctccagcctgggtgacaagagtgaaactccgtctcaaaaaaaaaaaaaaaaaatgcagataatttttagcttagggcctggtggctaggtcggttctctcctttccagtcggagacctctgccgcaaacatgctccgccagatcatcggtcaggccaagaagcatccgagcttgggacagaaataacccagagccctggaacaaactgggtcccaatgatcaatacaagttctactcagtgaatgtggattacagcaagctgaagaaggaacgtccagatttctaaatgaaatgtttcactataacgctgctttagaatgaaggtcttccagaagccacatccgcacaattttccacttaaccaggaaatatttctcctctaaatgcatgaaatcatgttggagatctctattgtaatctctattggagattacaatgattaaatcaataaataactgaaacttaaaaaaaaaaacaattcacgaaaaaagcgatcataacaaaagcaaaactaccacaggaaaaaaaaaaaaaaacttgttggcccctttgggccaaatcaattttagcttgggcaaggttttgcatgggggccaaatttggggtcaattgggcaatttccccctatggggaggctgttaaaaatacatggcccgggttttacaacgttgggctggaaaaacctctgggttccccaatttaacgcctttggagtacccctttttccaaggtggcgtataacccaaggggccctccgcggcttttccggtggct

SEQ ID NO: 326108 - DNA, 429 bp, Homo sapiens
  misc_feature (91)..(91): n is a, c, g, or t
ggagaatcagatatgaagattatccgtgtcctctggtggtactacttctccaaactcatagaatttatggacactttcttcttcatcctgngcaagaacaaccaccagatcacggtcctgcacgtctaccaccatgcctcgatgctgaacatctggtggtttgtgataaactgggtcccaatgatcaatacaagttctactcagtgaatgtggattacagcaagctgaagaaggaacgtccagatttctaaatgaaatgtttcactataacgctgctttagaatgaaggtcttccagaagccacatccgcacaattttccacttaaccaggaaatatttctcctctaaatgcatgaaatcatgttggagatctctattgtaatctctattggagattacaatgattaaatcaataaataactgaaactt

SEQ ID NO: 326109 - DNA, 733 bp, Homo sapiens
caagggtccttcgaggtaggaggtcctgggtgactttggaagtccgtagtgtctcattgcagataatttttagcttagggcctggtggctaggtcggttctctcctttccagtcggagacctctgccgcaaacatgctccgccagatcatcggtcaggccaagaagcatccgagcttgatccccctctttgtatttattggaactggagctactggagcaacactgtatctcttgcgtctggcattgttcaatccagatgtttgttgggacagaaataacccagagccctggaacaaactgggtcccaatgatcaatacaagttctactcagtgaatgtggattacagcaagctgaagaaggaacgtccagatttctaaatgaaatgtttcactataacgctgctttagaatgaaggtcttccagaagccacatccgcacaattttccacttaaccaggaaatatttctcctctaaatgcatgaaatcatgttggagatctctattgtaatctctattggagattacaatgattaaatcaataaataactgaaacttaaaaaaaacctctcctaaataaaaaaaccattgtggcccgcctgggcccagccgatcttagacttgggcaggcttatgcatcgggcccgaatttcgggctcattgggccaattcgcccttatagcgggcgcaattaccaattaccgggcccggggtcttaaccaggtcggaattgg

SEQ ID NO: 326110 - DNA, 766 bp, Homo sapiens
caagggtccttcgaggtaggaggtcctgggtgactttggaagtccgtagtgtctcattgcagataatttttagcttagggcctggtggctaggtcggttctctcctttccagtcggagacctctgccgcaaacatgctccgccagatcatcggtcaggccaagaagcatccgagcttgatccccctctttgtatttattggaactggagctactggagcaacactgtatctcttgcgtctggcattgttcaatccagatgtttgttgggacagaaataacccagagccctggaacaaactgggtcccaatgatcaatacaagttctactcagtgaatgtggattacagcaagctgaagaaggaacgtccagatttctaaatgaaatgtttcactataacgctgctttagaatgaaggtcttccagaagccacatccgcacaattttccacttaaccaggaaatatttctcctctaaatgcatgaaatcatgttggagatctctattgtaatctctattggagattacaatgattaaatcaataaataactgaaacttaaaaaaaaaaaaaaaaaaaaaaaaacactcgacactagttctctctctctcctagggccagtgtcactcagggggcttgtccatctctctggggggcgcgacagcttggaaaagccgaacggataagagacaaggaggtgagaaggacctgttcaacacaagaggccctgaggagctcagataacgggataagccgtagtgcacagaag

SEQ ID NO: 326111 - DNA, 870 bp, Homo sapiens
  misc_feature (647)..(647): n is a, c, g, or t
caagggtccttcgaggtaggaggtcctgggtgactttggaagtccgtagtgtctcattgcagataatttttagcttagggcctggtggctaggtcggttctctcctttccagtcggagacctctgccgcaaacatgctccgccagatcatcggtcaggccaagaagcatccgagcttgatccccctctttgtatttattggaactggagctactggagcaacactgtatctcttgcgtctggcattgttcaatccagatgtttgttgggacagaaataacccagagccctggaacaaactgggtcccaatgatcaatacaagttctactcagtgaatgtggattacagcaagctgaagaaggaacgtccagatttctaaatgaaatgtttcactataacgctgctttagaatgaaggtcttccagaagccacatccgcacaattttccacttaaccaggaaatatttctcctctaaatgcatgaaatcatgttggagatctctattgtaatctctattggagattacaatgattaaatcaataaataactgaaacttaaaaaaaaaaaaaaaaaaaaaaaaaagagtgtgtggggcggtggggcccgagagaaagtttttggaaacctttgggtggggggggggggncccaggggtagtgcagcctggggccatagcggtgacccccacagaggaaaaaccccggggcagaaacacacaagggggcggggggatcctcccccagataaaataaaacgccggggggggcacacagaggggtggctgaacacaacccccgaagggaggccccagaagcgccaactacgggcagctacaaaacggggagctcacaaggaagccggatacaatc

SEQ ID NO: 326112 - DNA, 777 bp, Homo sapiens
  misc_feature (588)..(588): n is a, c, g, or t
  misc_feature (604)..(604): n is a, c, g, or t
caagggtccttcgaggtaggaggtcctgggtgactttggaagtccgtagtgtctcattgcagataatttttagcttagggcctggtggctaggtcggttctctcctttccagtcggagacctctgccgcaaacatgctccgccagatcatcggtcaggccaagaagcatccgagcttgatccccctctttgtatttattggaactggagctactggagcaacactgtatctcttgcgtctggcattgttcaatccagatgtttgttgggacagaaataacccagagccctggaacaaactgggtcccaatgatcaatacaagttctactcagtgaatgtggattacagcaagctgaagaaggaacgtccagatttctaaatgaaatgtttcactataacgctgctttagaatgaaggtcttccagaagccacatccgcacaattttccacttaaccaggaaatatttctcctctaaatgcatgaaatcatgttggagatctctattgtaatctctattggagattacaatgattaaatcaataaataactgaaacttaaaaaaaaaaccaaaaaactctaagcctaancaaatttaaacctgcncacacaaaaaaaacccattggcaacttgggccaaggccagttaaaactcaactcagttttcgcaggagttcaacattcgggcctaattgccctttacggcgcaaaaggcccttttttcgagtcattgcccgtttttgacacgggcttacgggcccctggccccggcgtttccc

SEQ ID NO: 326113 - DNA, 693 bp, Homo sapiens
  misc_feature (634)..(634): n is a, c, g, or t
  misc_feature (656)..(657): n is a, c, g, or t
  misc_feature (659)..(659): n is a, c, g, or t
caagggtccttcgaggtaggaggtcctgggtgactttggaagtccgtagtgtctcattgcagataatttttagcttagggcctggtggctaggtcggttctctcctttccagtcggagacctctgccgcaaacatgctccgccagatcatcggtcaggccaagaagcatccgagcttgatccccctctttgtatttattggaactggagctactggagcaacactgtatctcttgcgtctggcattgttcaatccagatgtttgttgggacagaaataacccagagccctggaacaaactgggtcccaatgatcaatacaagttctactcagtgaatgtggattacagcaagctgaagaaggaacgtccagatttctaaatgaaatgtttcactataacgctgctttagaatgaaggtcttccagaagccacatccgcacaattttccacttaaccaggaaatatttctcctctaaatgcatgaaatcatgttggagatctctattgtaatctctattggagattacaatgattaaatcaataaataactgaaacttaaaaaaaaaaaaaaaaaaaaaaaaatttgttggggcggccttgggccctggaaaaagttttttaaccccttctgttngggggccgggccccattgggtnngngcacctgtgccaaaggcggtccccaggaaaatcc

SEQ ID NO: 326114 - DNA, 557 bp, Homo sapiens
caagggtccttcgaggtaggaggtcctgggtgactttggaagtccgtagtgtctcattgcagataatttttagcttagggcctggtggctaggtcggttctctcctttccagtcggagacctctgccgcaaacatgctccgccagatcatcggtcaggccaagaagcatccgagcttgatccccctctttgtatttattggaactggagctactggagcaacactgtatctcttgcgtctggcattgttcaatccagatgtttgttgggacagaaataacccagagccctggaacaaactgggtcccaatgatcaatacaagttctactcagtgaatgtggattacagcaagctgaagaaggaacgtccagatttctaaatgaaatgtttcactataacgctgctttagaatgaaggtcttccagaagccacatccgcacaattttccacttaaccaggaaatatttctcctctaaatgcatgaaatcatgttggagatctctattgtaatctctattggagattacaatgattaaatcaataaataactgaaactt

SEQ ID NO: 326115 - DNA, 422 bp, Homo sapiens
gctagagtgcagtggcacgatcttggcttactgcaacctccgcctcccgggttcgagcaattctcctgctttggccacccaagtagctgggattgcaggcgtgcaccaccacacctaagttttgtgtttttagtagagacaaggtttcactatgttggccaggctcgaactcctgatctcaaatgatctccctgcctcagcctcgtgcctgtaatcactctgggattacaggcgtgagccaccacgcccggcggtcaacatggagtgctttaatcatgacacgtgggagatttttttatcctcatattcaccttggtaaatcctactcatatttgaactcttaatataagcactacttcctaagggaagtccttaagattacccatagaaggtactttattaaatatttgttggataaatga

SEQ ID NO: 326116 - DNA, 717 bp, Homo sapiens
tttgtttttaaggtggattcttattatgttgccccagttggagtgcaatggctattcacaggcacaattgtagctccctacagcctagaacttctgggctccagtgatcctcctgccttagcctctggagtagctgggacaacagacatacaccgtcatgcctggcctaacttcagaaattcatttcacctatcatcaataccacatacaacattttttttacttctatatactctactgccaaaaaaaattttaaaaagaaagaaagaaaaagaaaacatggaaacaagtgacaagaaatataaatttaacttagcaactatttcatttttggtagtctgctgtctgacagttttagcaatcctgttaattacaagaaagcaaaggcatgaagaaaaatacctactcttcccctcaaacaaaatcgtctggaccatgccctgggagaagcactcaggttgttattctagtccaaagcaatgagaaataaagaagaataaagaacaaaggaagtatttaagtgtattcagttgttattaaagatgaagcagaaagcaaattaaaccaataggacataaccaaaaagccaagagaagaaaaagcagttcaaaaacactagctttgggcactttgacatctccccaaacacctgcttattaaagtcctaggactccacccttttatttctaaataaaatcacaaaagtcttccagagaa

SEQ ID NO: 326117 - DNA, 657 bp, Homo sapiens
ggaaagaccaggtgtgactttctccaaaactgagtgattgcttgtggatgaatacaatctaaaaatacaaggccatgaagtagtttttcatttagatgctgagaaataataggtttgggcagctcaaagcataggaaatagtaagggttttctagagctcctcctttggtggcctgtttgagtagcacaagggacgtcatcctaaatgtgcagttgccatttgttctgtagtgacttacagggatctcagtggcaaagggcgtcagtgagacaacaactgagcaaaaagaactagacgaggcttgcgcttggaaagtcacggtaggattggacctgccggccacatggctcagggagtattgacggatttgcacattggcaggaaactctcccgtttgggattctttaaatggggcacagaaggccacttgtttgcatttctgggtaaaaaacagtcatcccccatgactgcctgcatcgggtttgtcttgtgccaaagttactcttcctttgtttttactttgccttgatttttagcattagctggtagtttggcttggaaatgtcctggatagccgattccctaagaaactgaaacatttaatattggcttaggatgtatcagatggggccaaataaagcttctttacaatagta

SEQ ID NO: 326118 - DNA, 1398 bp, Homo sapiens
ggaaagaccaggtgtgactttctccaaaactgagtgattgcttgtggatgaatacaatctaaaaatacaaggccatgaagtagtttttcatttagatgctgagaaataataggtttgggcagctcaaagcataggaaatagtaagggttttctagagctcctcctttggtggcctgtttgagtagcacaagggacgtcatcctaaatgtgcagttgccatttgttctgtagtgacttacagggatctcagtggcaaagggcgtcagtgagacaacaactgagcaaaaagaactagacgaggcttgcgcttggaaagtcacggtaggattggacctgccggccacatggctcagggagtattgacggatttgcacattggcaggaaactctcccgtttgggattctttaaatggggcacagaaggccacttgtttgcatttctgggtaaaaaacagtcatcccccatgactgcctgcatcgggtttgtcttgtgccaaagttactcttcctttgtttttactttgccttgatttttagcattagctggtagtttggcttggaaatgtcctggatagccgattccctaagaaactgaaacatttaatattggcttaggatgtatcagatggggccaaataaagcttctttacaatagtaaaagcactttatacttcactctctgagtcttcccaataaataaccttgggaggtgcagggggtggggggcccaggatggggaggcctgggagctcccagggtagtgacagagttgggctgagttctccagacgccaggatgcgtcgcagcggggccagctcaggagtgctcactcccagccctctggatctctctcctggttggaataatcattacatatcgtaactctcaaaatttattcacttatattttcagaataagaagtgtgaaatgttaacagctctctgctctcttacttgttccccatttggggatcttctggagggaaggggcagggggagagtaacttttctatatccttggtttctaggaacacatcgatttgaagactcagtagctgactggtttttttttttcccccttcaaactgaagtgcgagtgtgcgtgtgttccacaaaatagcaagtatttatagtgttgtaattacatttccttgagaaatattttcttgtatttaaaaatctttctacttcagtaactcccagcagaacagtgcccaggacagcatgtgccggttagtaccagctttgcaggtgagctgacttctaaacttaggacgacgtcttcatcaatcaaactagtgcacagtccagaaaaaggggtcctttatcttctaagttctgctcctcacctttctttggaaccaaaattgcagtggagtgtgaggaagagctttgaaag

SEQ ID NO: 326119 - DNA, 5837 bp, Homo sapiens
taggcaggcggctgagccggcggcgggtggcctgcccaacgtgtgctgggtgggagaaggcgaggcggcagcgatgctgtctcttccgtgaggagcgcagaggaggtcgcggcgccggaggccccagaaggctcgaaggcgccgcgggctggggtcggtggcttagggagcccgtccggccatggtggccgcgggtggtggttggcgcggctgcgctgcggcccggggcagtgcggagccgggacagtcgcggcgctgacgcccgcgggccccagctgcagatatgaagcggagccgctgccgcgaccgaccgcagccgccgccgcccgaccgccgggaggatggagttcagcgggcagcggagctgtctcagtctttgccgccgcgccggcgagcgccgcccgggaggcagcggctggaggagcggacgggccccgcggggcccgagggcaaggagcaggatgtagtaactggagttagtcccctgctcttcaggaaactcagtaatcctgacatattttcatccactggaaaagttaaacttcagcgacaactgagtcaggatgattgtaagttatggagaggaaacctggccagctctctatcgggtaagcagctgctccctttgtccagcagtgtacatagcagtgtgggacaggtgacttggcagtcgtcaggagaagcatcaaacctggttcgaatgagaaaccagtcccttggacagtctgcaccttctcttactgctggcctgaaggagttgagccttccaagaagaggcagcttttgtcggacaagtaaccgcaagagcttgattgtgacctctagcacatcacctacactaccacggccacactcaccactccatggccacacaggtaacagtcctttggacagcccccggaatttctctccaaatgcacctgctcacttttcttttgttcctgcccgtaggactgatgggcggcgctggtctttggcctctttgccctcttcaggatatggaactaacactcctagctccactgtctcatcatcatgctcctcacaggaaaagctgcatcagttgcctttccagcctacagctgatgagctgcactttttgacgaagcatttcagcacagagagcgtaccagatgaggaaggacggcagtccccagccatgcggcctcgctcccggagcctcagtcccggacgatccccagtatcctttgacagtgaaataataatgatgaatcatgtttacaaagaaagattcccaaaggccaccgcacaaatggaagagcgactagcagagtttatttcctccaacactccagacagcgtgctgcccttggcagatggagccctgagctttattcatcatcaggtgattgagatggcccgagactgcctggataaatctcggagtggcctcattacatcacaatacttctacgaacttcaagagaatttggagaaacttttacaagatgctcatgagcgctcagagagctcagaagtggcttttgtgatgcagctggtgaaaaagctgatgattatcattgcccgcccagcacgtctcctggaatgcctggagtttgaccctgaagagttctaccaccttttagaagcagctgagggccacgccaaagagggacaagggattaaatgtgacattccccgctacatcgttagccagctgggcctcacccgggatcccctagaagaaatggcccagttgagcagctgtgacagtcctgacactccagagacagatgattctattgagggccatggggcatctctgccatctaaaaagacaccctctgaagaggacttcgagaccattaagctcatcagcaatggcgcctatggggctgtatttctggtgcggcacaagtccacccggcagcgctttgccatgaagaagatcaacaagcagaacctgatcctacggaaccagatccagcaggccttcgtggagcgtgacatactgactttcgctgagaacccctttgtggtcagcatgttctgctcctttgataccaagcgccacttgtgcatggtgatggagtacgttgaagggggagactgtgccactctgctgaagaatattggggccctgcctgtggacatggtgcgtctatactttgcggaaactgtgctggccctggagtacttacacaactatggcatcgtgcaccgtgacctcaagcctgacaacctcctaattacatccatggggcacatcaagctcacggactttggactgtccaaaatgggcctcatgagtctgacaacgaacttgtatgagggtcatattgaaaaggatgcccgggaattcctggacaagcaggtatgcgggaccccagaatacattgcgcctgaggtgatcctgcgccagggctatgggaagccagtggactggtgggccatgggcattatcctgtatgagttcctggtgggctgcgtccctttttttggagatactccggaggagctctttgggcaggtgatcagtgatgagattgtgtggcctgagggtgatgaggcactgcccccagacgcccaggacctcacctccaaactgctccaccagaaccctctggagagacttggcacaggcagtgcctatgaggtgaagcagcacccattctttactggtctggactggacaggacttctccgccagaaggctgaatttattcctcagttggagtcagaggatgatactagctattttgacacccgctcagagcgataccaccacatggactcggaggatgaggaagaagtgagtgaggatggctgccttgagatccgccagttctcttcctgctctccaaggttcaacaaggtgtacagcagcatggagcggctctcactgctcgaggagcgccggacaccacccccgaccaagcgcagcctgagtgaggagaaggaggaccattcagatggcctggcagggctcaaaggccgagaccggagctgggtgattggctcccctgagatattacggaagcggctgtcggtgtctgagtcgtcccacacagagagtgactcaagccctccaatgacagtgcgacgccgctgctcaggcctcctggatgcgcctcggttcccggagggccctgaggaggccagcagcaccctcaggaggcaaccacaggagggtatatgggtcctgacacccccatctggagagggggtatctgggcctgtcactgaacactcaggggagcagcggccaaagctggatgaggaagctgttggccggagcagtggttccagtccagctatggagacccgaggccgtgggacctcacagctggctgagggagccacagccaaggccatcagtgacctggctgtgcgtagggcccgccaccggctgctctctggggactcaacagagaagcgcactgctcgccctgtcaacaaagtgatcaagtccgcctcagccacagccctctcactcctcattccttcggaacaccacacctgctccccgttggccagccccatgtccccacattctcagtcgtccaacccatcatcccgggactcttctccaagcagggacttcttgccagcccttggcagcatgaggcctcccatcatcatccaccgagctggcaagaagtatggcttcaccctgcgggccattcgcgtctacatgggtgactccgatgtctacaccgtgcaccatatggtgtggcacgtggaggatggaggtccggccagtgaggcagggcttcgtcaaggtgacctcatcacccatgtcaatggggaacctgtgcatggcctggtgcacacggaggtggtggagctgatcctgaagagtggaaacaaggtggccatttcaacaactcccctggagaacacatccattaaagtggggccagctcggaagggcagctacaaggccaagatggcccgaaggagcaagaggagccgcggcaaggatgggcaagaaagcagaaaaaggagctccctgttccgcaagatcaccaagcaagcatccctgctccacaccagccgcagcctttcttcccttaaccgctccttgtcatcaggggagagtgggccaggctctcccacacacagccacagcctttccccccgatctcccactcaaggctaccgggtgacccccgatgctgtgcattcagtgggagggaattcatcacagagcagctcccccagctccagcgtgcccagttccccagccggctctgggcacacacggcccagctccctccacggtctggcacccaagctccaacgccagtaccgctctccacggcgcaagtcagcaggcagcatcccactgtcaccactggcccacaccccttctcccccacccccaacagcttcacctcagcggtccccatcgcccctgtctggccatgtagcccaggcctttcccacaaagcttcacttgtcacctcccctgggcaggcaactctcacggcccaagagtgcggagccaccccgttcaccactactcaagagggtgcagtcggctgagaaactggcagcagcacttgccgcctctgagaagaagctagccacttctcgcaagcacagccttgacctgccccactctgaactaaagaaggaactgccgcccagggaagtgagccctctggaggtagttggagccaggagtgtgctgtctggcaagggggccctgccagggaagggggtgctgcagcctgctccctcacgggccctaggcaccctccggcaggaccgagccgaacgacgggagtcgctgcagaagcaagaagccattcgtgaggtggactcctcagaggacgacaccgaggaagggcctgagaacagccagggtgcacaggagctgagcttggcacctcacccagaagtgagccagagtgtggcccctaaaggagcaggagagagtggggaagaggatcctttcccgtccagagaccctaggagcctgggcccaatggtcccaagcctattgacagggatcacactggggcctcccagaatggaaagtcccagtggtccccacaggaggctcgggagcccacaagccattgaggaggctgccagctcctcctcagcaggccccaacctaggtcagtctggagccacagaccccatccctcctgaaggttgctggaaggcccagcacctccacacccaggcactaacagcactttctcccagcacttcgggactcacccccaccagcagttgctctcctcccagctccacctctgggaagctgagcatgtggtcctggaaatcccttattgagggcccagacagggcatccccaagcagaaaggcaaccatggcaggtgggctagccaacctccaggatttggaaaacacaactccagcccagcctaagaacctgtctcccagggagcaggggaagacacagccacctagtgcccccagactggcccatccatcttatgaggatcccagccagggctggctatgggagtctgagtgtgcacaagcagtgaaagaggatccagccctgagcatcacccaagtgcctgatgcctcaggtgacagaaggcaggacgttccatgccgaggctgccccctcacccagaagtctgagcccagcctcaggaggggccaagaaccagggggccatcaaaagcatcgggatttggcattggttccagatgagcttttaaagcaaacatagcagttgtttgccatttcttgcactcagacctgtgtaatatatgctcctggaaaccatctttatgtcttttgcttgcttgttttccttcggtcaacccacatgtaactaggtcctgtgttgctgctgggaatatagtggtgaataaaacagtttccac

SEQ ID NO: 326120 - DNA, 374 bp, Homo sapiens
aatgcaactcatcgggatcccctagaagaaatggcccagttgagcagctgtgacagtcctgacactccagagacagatgattctattgagggccatggggcatctctgccatctaaaaagacaccctctgaagaggacttcgagaccattaagctcatcagcaatggcgcctatgggtaaaggcaggggtcagggtgtggccaggactgaagccgggtcagcctttgatctcttccatgtgagagtgtatgctgcccagtcctctgggcagatgcctcggggtggaccttctcactcccagaagcctcctgggtgggcaggagttcagattcctctgacatccgatcattgttcctttcccagacaagattccc

SEQ ID NO: 326121 - DNA, 2765 bp, Homo sapiens
attcatttgggatctggaacttgtcactgtcccactgctgcctcgtgggctcttaggtcttttgtggggggatgggaggggtgttctgaagatcatgtttttgaagaaaagtactttaatttttgccaatctctaccctttgccgaggagctgaagtaaaccagcacatgttttcacccacatctgctccagccctcttcctcactaaagtcccatttagtgctgattgtgctttggctacttctcctcttgccattttcctgaacccacgagcccacagcagtcctggcactccttgttccagccgcccactgccgtggagttgtcggacaagtaaccgcaagagcttgattgtgacctctagcacatcacctacactaccacggccacactcaccactccatggccacacaggtaacagtcctttggacagcccccggaatttctctccaaatgcacctgctcacttttcttttgttcctgcccgtaggactgatgggcggcgctggtctttggcctctttgccctcttcaggatatggaactaacactcctagctccactgtctcatcatcatgctcctcacaggaaaagctgcatcagttgcctttccagcctacagctgatgagctgcactttttgacgaagcatttcagcacagagagcgtaccagatgaggaaggacggcagtccccagccatgcggcctcgctcccggagcctcagtcccggacgatccccagtatcctttgacagtgaaataataatgatgaatcatgtttacaaagaaagattcccaaaggccaccgcacaaatggaagagcgactagcagagtttatttcctccaacactccagacagcgtgctgcccttggcagatggagccctgagctttattcatcatcaggtgattgagatggcccgagactgcctggataaatctcggagtggcctcattacatcacaatacttctacgaacttcaagagaatttggagaaacttttacaagatgctcatgagcgctcagagagctcagaagtggcttttgtgatgcagctggtgaaaaagctgatgattatcattgcccgcccagcacgtctcctggaatgcctggagtttgaccctgaagagttctaccaccttttagaagcagctgagggccacgccaaagagggacaagggattaaatgtgacattccccgctacatcgttagccagctgggcctcacccgggatcccctagaagaaatggcccagttgagcagctgtgacagtcctgacactccagagacagatgattctattgagggccatggggcatctctgccatctaaaaagacaccctctgaagaggacttcgagaccattaagctcatcagcaatggcgcctatggggctgtatttctggtgcggcacaagtccacccggcagcgctttgccatgaagaagatcaacaagcagaacctgatcctacggaaccagatccagcaggccttcgtggagcgtgacatactgactttcgctgagaacccctttgtggtcagcatgttctgctcctttgataccaagcgccacttgtgcatggtgatggagtacgttgaagggggagactgtgccactctgctgaagaatattggggccctgcctgtggacatggtgcgtctatactttgcggaaactgtgctggccctggagtacttacacaactatggcatcgtgcaccgtgacctcaagcctgacaacctcctaattacatccatggggcacatcaagctcacggactttggactgtccaaaatgggcctcatgagtctgacaacgaacttgtatgagggtcatattgaaaaggatgcccgggaattcctggacaagcaggtatgcgggaccccagaatacattgcgcctgaggtgatcctgcgccagggctatgggaagccagtggactggtgggccatgggcattatcctgtatgagttcctggtgggctgcgtccctttttttggagatactccggaggagctctttgggcaggtgatcagtgatgagattgtgtggcctgagggtgatgaggcactgcccccagacgcccaggacctcacctccaaactgctccaccagaaccctctggagagacttggcacaggcagtgcctatgaggtgaagcagcacccattctttactggtctggactggacaggacttctccgccagaaggctgaatttattcctcagttggagtcagaggatgatactagctattttgacacccgctcagagcgataccaccacatggactcggaggatgaggaagaagtgagtgaggatggctgccttgagatccgccagttctcttcctgctctccaaggttcaacaaggtgtacagcagcatggagcggctctcactgctcgaggagcgccggacaccacccccgaccaagcgcagcctgagtgaggagaaggaggaccattcagatggcctggcagggctcaaaggccgagaccggagctgggtgattggctcccctgagatccctgagcatcacccaagtgcctgatgcctcaggtgacagaaggcaggacgttccatgccgaggctgccccctcacccagaagtctgagcccagcctcaggaggggccaagaaccagggggccatcaaaagcatcgggatttggcattggttccagatgagcttttaaagcaaacatagcagttgtttgccatttcttgcactcagacctgtgtaatatatgctcctggaaacca

SEQ ID NO: 326122 - DNA, 6321 bp, Homo sapiens
taggcaggcggctgagccggcggcgggtggcctgcccaacgtgtgctgggtgggagaaggcgaggcggcagcgatgctgtctcttccgtgaggagcgcagaggaggtcgcggcgccggaggccccagaaggctcgaaggcgccgcgggctggggtcggtggcttagggagcccgtccggccatggtggccgcgggtggtggttggcgcggctgcgctgcggcccggggcagtgcggagccgggacagtcgcggcgctgacgcccgcgggccccagctgcagatatgaagcggagccgctgccgcgaccgaccgcagccgccgccgcccgaccgccgggaggatggagttcagcgggcagcggagctgtctcagtctttgccgccgcgccggcgagcgccgcccgggaggcagcggctggaggagcggacgggccccgcggggcccgagggcaaggagcaggatgtagtaactggagttagtcccctgctcttcaggaaactcagtaatcctgacatattttcatccactggaaaagttaaacttcagcgacaactgagtcaggatgattgtaagttatggagaggaaacctggccagctctctatcgggtaagcagctgctccctttgtccagcagtgtacatagcagtgtgggacaggtgacttggcagtcgtcaggagaagcatcaaacctggttcgaatgagaaaccagtcccttggacagtctgcaccttctcttactgctggcctgaaggagttgagccttccaagaagaggcagcttttgtcggacaagtaaccgcaagagcttgattgtgacctctagcacatcacctacactaccacggccacactcaccactccatggccacacaggtaacagtcctttggacagcccccggaatttctctccaaatgcacctgctcacttttcttttgttcctgcccgtaggactgatgggcggcgctggtctttggcctctttgccctcttcaggatatggaactaacactcctagctccactgtctcatcatcatgctcctcacaggaaaagctgcatcagttgcctttccagcctacagctgatgagctgcactttttgacgaagcatttcagcacagagagcgtaccagatgaggaaggacggcagtccccagccatgcggcctcgctcccggagcctcagtcccggacgatccccagtatcctttgacagtgaaataataatgatgaatcatgtttacaaagaaagattcccaaaggctcatgagcgctcagagagctcagaagtggcttttgtgatgcagctggtgaaaaagctgatgattatcattgcccgcccagcacgtctcctggaatgcctggagtttgaccctgaagagttctaccaccttttagaagcagctgagggccacgccaaagagggacaagggattaaatgtgacattccccgctacatcgttagccagctgggcctcacccgggatcccctagaagaaatggcccagttgagcagctgtgacagtcctgacactccagagacagatgattctattgagggccatggggcatctctgccatctaaaaagacaccctctgaagaggacttcgagaccattaagctcatcagcaatggcgcctatggggctgtatttctggtgcggcacaagtccacccggcagcgctttgccatgaagaagatcaacaagcagaacctgatcctacggaaccagatccagcaggccttcgtggagcgtgacatactgactttcgctgagaacccctttgtggtcagcatgttctgctcctttgataccaagcgccacttgtgcatggtgatggagtacgttgaagggggagactgtgccactctgctgaagaatattggggccctgcctgtggacatggtgcgtctatactttgcggaaactgtgctggccctggagtacttacacaactatggcatcgtgcaccgtgacctcaagcctgacaacctcctaattacatccatggggcacatcaagctcacggactttggactgtccaaaatgggcctcatgagtctgacaacgaacttgtatgagggtcatattgaaaaggatgcccgggaattcctggacaagcaggtatgcgggaccccagaatacattgcgcctgaggtgatcctgcgccagggctatgggaagccagtggactggtgggccatgggcattatcctgtatgagttcctggtgggctgcgtccctttttttggagatactccggaggagctctttgggcaggtgatcagtggtaggtactatgcccctggcccagtggggaaacagagtctgaatccacaaatatgatgtatgcaggcagctcgtgaggcctgtgagctcttgttctgaactcatcatgtgtgtttgtgatgtctgctgctttggggatgggtgtctctgtgtttctgcatgtacatacatgtgcacactgtgtcccttggggcttcacatgtctctcatagacacctggtctctcatatacacctgggtgttcctgtctgtgtatgtgcacatcccataagtgtgaggggtacgtctgtgtatgttttgtggagtataaaagcagggtgagctagagctttgcagtgcctgctgtggatcaaagatcaagctatggtctaggaacctatagaatttaaggactggggtcccaggcaaggctttcaggggctccaggctgggtcctttttgcctcctttcctttcactgttctgggaccctcttctgcatctctccactctacccacaatttctcctttccctctcacccctgatgacttcagatgagattgtgtggcctgagggtgatgaggcactgcccccagacgcccaggacctcacctccaaactgctccaccagaaccctctggagagacttggcacaggtagggcaggccctgctaacttttctcactacttggaaaaggggtaagggaggctgagtcatgtaccctggaggttcaggcttcggttacgggcagcccctctggatcctgaaactctgccctgctctgtaggcagaaaagggaagatgcttgagctgatcccctaggtatagcttctgaaggtctggcttcttgctagatttgctgacctagactccatgctgctcatcctacccccttgcccatgtcctccctgtccacaggcagtgcctatgaggtgaagcagcacccattctttactggtctggactggacaggacttctccgccagaaggctgaatttattcctcagttggagtcagaggatgatactagctattttgacacccgctcagagcgataccaccacatggactcggaggatgaggaagaagtgagtgaggatggctgccttgagatccgccagttctcttcctgctctccaaggttcaacaaggtgtacagcagcatggagcggctctcactgctcgaggagcgccggacaccacccccgaccaagcgcagcctgagtgaggagaaggaggaccattcagatggcctggcagggctcaaaggccgagaccggagctgggtgattggctcccctgagatattacggaagcggctgtcggtgtctgagtcgtcccacacagagagtgactcaagccctccaatgacagtgcgacgccgctgctcaggcctcctggatgcgcctcggttcccggagggccctgaggaggccagcagcaccctcaggaggcaaccacaggagggtatatgggtcctgacacccccatctggagagggggtatctgggcctgtcactgaacactcaggggagcagcggccaaagctggatgaggaagctgttggccggagcagtggttccagtccagctatggagacccgaggccgtgggacctcacagctggctgagggagccacagccaaggccatcagtgacctggctgtgcgtagggcccgccaccggctgctctctggggactcaacagagaagcgcactgctcgccctgtcaacaaagtgatcaagtccgcctcagccacagccctctcactcctcattccttcggaacaccacacctgctccccgttggccagccccatgtccccacattctcagtcgtccaacccatcatcccgggactcttctccaagcagggacttcttgccagcccttggcagcatgaggcctcccatcatcatccaccgagctggcaagaagtatggcttcaccctgcgggccattcgcgtctacatgggtgactccgatgtctacaccgtgcaccatatggtgtggcacgtggaggatggaggtccggccagtgaggcagggcttcgtcaaggtgacctcatcacccatgtcaatggggaacctgtgcatggcctggtgcacacggaggtggtggagctgatcctgaagagtggaaacaaggtggccatttcaacaactcccctggagaacacatccattaaagtggggccagctcggaagggcagctacaaggccaagatggcccgaaggagcaagaggagccgcggcaaggatgggcaagaaagcagaaaaaggagctccctgttccgcaagatcaccaagcaagcatccctgctccacaccagccgcagcctttcttcccttaaccgctccttgtcatcaggggagagtgggccaggctctcccacacacagccacagcctttccccccgatctcccactcaaggctaccgggtgacccccgatgctgtgcattcagtgggagggaattcatcacagagcagctcccccagctccagcgtgcccagttccccagccggctctgggcacacacggcccagctccctccacggtctggcacccaagctccaacgccagtaccgctctccacggcgcaagtcagcaggcagcatcccactgtcaccactggcccacaccccttctcccccacccccaacagcttcacctcagcggtccccatcgcccctgtctggccatgtagcccaggcctttcccacaaagcttcacttgtcacctcccctgggcaggcaactctcacggcccaagagtgcggagccaccccgttcaccactactcaagagggtgcagtcggctgagaaactggcagcagcacttgccgcctctgagaagaagctagccacttctcgcaagcacagccttgacctgccccactctgaactaaagaaggaactgccgcccagggaagtgagccctctggaggtagttggagccaggagtgtgctgtctggcaagggggccctgccagggaagggggtgctgcagcctgctccctcacgggccctaggcaccctccggcaggaccgagccgaacgacgggagtcgctgcagaagcaagaagccattcgtgaggtggactcctcagaggacgacaccgaggaagggcctgagaacagccagggtgcacaggagctgagcttggcacctcacccagaagtgagccagagtgtggcccctaaaggagcaggagagagtggggaagaggatcctttcccgtccagagaccctaggagcctgggcccaatggtcccaagcctattgacagggatcacactggggcctcccagaatggaaagtcccagtggtccccacaggaggctcgggagcccacaagccattgaggaggctgccagctcctcctcagcaggccccaacctaggtcagtctggagccacagaccccatccctcctgaaggttgctggaaggcccagcacctccacacccaggcactaacagcactttctcccagcacttcgggactcacccccaccagcagttgctctcctcccagctccacctctgggaagctgagcatgtggtcctggaaatcccttattgagggcccagacagggcatccccaagcagaaaggcaaccatggcaggtgggctagccaacctccaggatttggaaaacacaactccagcccagcctaagaacctgtctcccagggagcaggggaagacacagccacctagtgcccccagactggcccatccatcttatgaggatcccagccagggctggctatgggagtctgagtgtgcacaagcagtgaaagaggatccagccctgagcatcacccaagtgcctgatgcctcaggtgacagaaggcaggacgttccatgccgaggctgccccctcacccagaagtctgagcccagcctcaggaggggccaagaaccagggggccatcaaaagcatcgggatttggcattggttccagatgagcttttaaagcaaacatagcagttgtttgccatttcttgcactcagacctgtgtaatatatgctcctggaaacca

SEQ ID NO: 326123 - DNA, 3267 bp, Homo sapiens
cattcattggtggttccatggtagaacgcatgatgagattgtgtggcctgagggtgatgaggcactgcccccagacgcccaggacctcacctccaaactgctccaccagaaccctctggagagacttggcacaggcagtgcctatgaggtgaagcagcacccattctttactggtctggactggacaggacttctccgccagaaggctgaatttattcctcagttggagtcagaggatgatactagctattttgacacccgctcagagcgataccaccacatggactcggaggatgaggaagaagtgagtgaggatggctgccttgagatccgccagttctcttcctgctctccaaggttcaacaaggtgtacagcagcatggagcggctctcactgctcgaggagcgccggacaccacccccgaccaagcgcagcctgagtgaggagaaggaggaccattcagatggcctggcagggctcaaaggccgagaccggagctgggtgattggctcccctgagatattacggaagcggctgtcggtgtctgagtcgtcccacacagagagtgactcaagccctccaatgacagtgcgacgccgctgctcaggcctcctggatgcgcctcggttcccggagggccctgaggaggccagcagcaccctcaggaggcaaccacaggagggtatatgggtcctgacacccccatctggagagggggtatctgggcctgtcactgaacactcaggggagcagcggccaaagctggatgaggaagctgttggccggagcagtggttccagtccagctatggagacccgaggccgtgggacctcacagctggctgagggagccacagccaaggccatcagtgacctggctgtgcgtagggcccgccaccggctgctctctggggactcaacagagaagcgcactgctcgccctgtcaacaaagtgatcaagtccgcctcagccacagccctctcactcctcattccttcggaacaccacacctgctccccgttggccagccccatgtccccacattctcagtcgtccaacccatcatcccgggactcttctccaagcagggacttcttgccagcccttggcagcatgaggcctcccatcatcatccaccgagctggcaagaagtatggcttcaccctgcgggccattcgcgtctacatgggtgactccgatgtctacaccgtgcaccatatggtgtggcacgtggaggatggaggtccggccagtgaggcagggcttcgtcaaggtgacctcatcacccatgtcaatggggaacctgtgcatggcctggtgcacacggaggtggtggagctgatcctgaagagtggaaacaaggtggccatttcaacaactcccctggagaacacatccattaaagtggggccagctcggaagggcagctacaaggccaagatggcccgaaggagcaagaggagccgcggcaaggatgggcaagaaagcagaaaaaggagctccctgttccgcaagatcaccaagcaagcatccctgctccacaccagccgcagcctttcttcccttaaccgctccttgtcatcaggggagagtgggccaggctctcccacacacagccacagcctttccccccgatctcccactcaaggctaccgggtgacccccgatgctgtgcattcagtgggagggaattcatcacagagcagctcccccagctccagcgtgcccagttccccagccggctctgggcacacacggcccagctccctccacggtctggcacccaagctccaacgccagtaccgctctccacggcgcaagtcagcaggcagcatcccactgtcaccactggcccacaccccttctcccccacccccaacagcttcacctcagcggtccccatcgcccctgtctggccatgtagcccaggcctttcccacaaagcttcacttgtcacctcccctgggcaggcaactctcacggcccaagagtgcggagccaccccgttcaccactactcaagagggtgcagtcggctgagaaactggcagcagcacttgccgcctctgagaagaagctagccacttctcgcaagcacagccttgacctgccccactctgaactaaagaaggaactgccgcccagggaagtgagccctctggaggtagttggagccaggagtgtgctgtctggcaagggggccctgccagggaagggggtgctgcagcctgctccctcacgggccctaggcaccctccggcaggaccgagccgaacgacgggagtcgctgcagaagcaagaagccattcgtgaggtggactcctcagaggacgacaccgaggaagggcctgagaacagccagggtgcacaggagctgagcttggcacctcacccagaagtgagccagagtgtggcccctaaaggagcaggagagagtggggaagaggatcctttcccgtccagagaccctaggagcctgggcccaatggtcccaagcctattgacagggatcacactggggcctcccagaatggaaagtcccagtggtccccacaggaggctcgggagcccacaagccattgaggaggctgccagctcctcctcagcaggccccaacctaggtcagtctggagccacagaccccatccctcctgaaggttgctggaaggcccagcacctccacacccaggcactaacagcactttctcccagcacttcgggactcacccccaccagcagttgctctcctcccagctccacctctgggaagctgagcatgtggtcctggaaatcccttattgagggcccagacagggcatccccaagcagaaaggcaaccatggcaggtgggctagccaacctccaggatttggaaaacacaactccagcccagcctaagaacctgtctcccagggagcaggggaagacacagccacctagtgcccccagactggcccatccatcttatgaggatcccagccagggctggctatgggagtctgagtgtgcacaagcagtgaaagaggatccagccctgagcatcacccaagtgcctgatgcctcaggtgacagaaggcaggacgttccatgccgaggctgccccctcacccagaagtctgagcccagcctcaggaggggccaagaaccagggggccatcaaaagcatcgggatttggcattggttccagatgagcttttaaagcaaacatagcagttgtttgccatttcttgcactcagacctgtgtaatatatgctcctggaaacca

SEQ ID NO: 326124 - DNA, 5672 bp, Homo sapiens
taggcaggcggctgagccggcggcgggtggcctgcccaacgtgtgctgggtgggagaaggcgaggcggcagcgatgctgtctcttccgtgaggagcgcagaggaggtcgcggcgccggaggccccagaaggctcgaaggcgccgcgggctggggtcggtggcttagggagcccgtccggccatggtggccgcgggtggtggttggcgcggctgcgctgcggcccggggcagtgcggagccgggacagtcgcggcgctgacgcccgcgggccccagctgcagatatgaagcggagccgctgccgcgaccgaccgcagccgccgccgcccgaccgccgggaggatggagttcagcgggcagcggagctgtctcagtctttgccgccgcgccggcgagcgccgcccgggaggcagcggctggaggagcggacgggccccgcggggcccgagggcaaggagcaggatgtagtaactggagttagtcccctgctcttcaggaaactcagtaatcctgacatattttcatccactggaaaagttaaacttcagcgacaactgagtcaggatgattgtaagttatggagaggaaacctggccagctctctatcgggtaagcagctgctccctttgtccagcagtgtacatagcagtgtgggacaggtgacttggcagtcgtcaggagaagcatcaaacctggttcgaatgagaaaccagtcccttggacagtctgcaccttctcttactgctggcctgaaggagttgagccttccaagaagaggcagcttttgtcggacaagtaaccgcaagagcttgattgtgacctctagcacatcacctacactaccacggccacactcaccactccatggccacacaggtaacagtcctttggacagcccccggaatttctctccaaatgcacctgctcacttttcttttgttcctgcccgtaggactgatgggcggcgctggtctttggcctctttgccctcttcaggatatggaactaacactcctagctccactgtctcatcatcatgctcctcacaggaaaagctgcatcagttgcctttccagcctacagctgatgagctgcactttttgacgaagcatttcagcacagagagcgtaccagatgaggaaggacggcagtccccagccatgcggcctcgctcccggagcctcagtcccggacgatccccagtatcctttgacagtgaaataataatgatgaatcatgtttacaaagaaagattcccaaaggccaccgcacaaatggaagagcgactagcagagtttatttcctccaacactccagacagcgtgctgcccttggcagatggagccctgagctttattcatcatcaggtgattgagatggcccgagactgcctggataaatctcggagtggcctcattacatcacaatacttctacgaacttcaagagaatttggagaaacttttacaagatgctcatgagcgctcagagagctcagaagtggcttttgtgatgcagctggtgaaaaagctgatgattatcattgcccgcccagcacgtctcctggaatgcctggagtttgaccctgaagagttctaccaccttttagaagcagctgagggccacgccaaagagggacaagggattaaatgtgacattccccgctacatcgttagccagctgggcctcacccgggatcccctagaagaaatggcccagttgagcagctgtgacagtcctgacactccagagacagatgattctattgagggccatggggcatctctgccatctaaaaagacaccctctgaagaggacttcgagaccattaagctcatcagcaatggcgcctatggggctgtatttctggtgcggcacaagtccacccggcagcgctttgccatgaagaagatcaacaagcagaacctgatcctacggaaccagatccagcaggccttcgtggagcgtgacatactgactttcgctgagaacccctttgtggtcagcatgttctgctcctttgataccaagcgccacttgtgcatggtgatggagtacgttgaagggggagactgtgccactctgctgaagaatattggggccctgcctgtggacatggtgcgtctatactttgcggaaactgtgctggccctggagtacttacacaactatggcatcgtgcaccgtgacctcaagcctgacaacctcctaattacatccatggggcacatcaagctcacggactttggactgtccaaaatgggcctcatgagtctgacaacgaacttgtatgagggtcatattgaaaaggatgcccgggaattcctggacaagcaggtatgcgggaccccagaatacattgcgcctgaggtgatcctgcgccagggctatgggaagccagtggactggtgggccatgggcattatcctgtatgagttcctggtgggctgcgtccctttttttggagatactccggaggagctctttgggcaggtgatcagtgatgagattgtgtggcctgagggtgatgaggcactgcccccagacgcccaggacctcacctccaaactgctccaccagaaccctctggagagacttggcacaggcagtgcctatgaggtgaagcagcacccattctttactggtctggactggacaggacttctccgccagaaggctgaatttattcctcagttggagtcagaggatgatactagctattttgacacccgctcagagcgataccaccacatggactcggaggatgaggaagaagtgagtgaggatggctgccttgagatccgccagttctcttcctgctctccaaggttcaacaaggtgtacagcagcatggagcggctctcactgctcgaggagcgccggacaccacccccgaccaagcgcagcctgagtgaggagaaggaggaccattcagatggcctggcagggctcaaaggccgagaccggagctgggtgattggctcccctgagatattacggaagcggctgtcggtgtctgagtcgtcccacacagagagtgactcaagccctccaatgacagtgcgacgccgctgctcaggcctcctggatgcgcctcggttcccggagggccctgaggaggccagcagcaccctcaggaggcaaccacaggagggtatatgggtcctgacacccccatctggagagggggtatctgggcctgtcactgaacactcaggggagcagcggccaaagctggatgaggaagctgttggccggagcagtggttccagtccagctatggagacccgaggccgtgggacctcacagctggctgagggagccacagccaaggccatcagtgacctggctgtgcgtagggcccgccaccggctgctctctggggactcaacagagaagcgcactgctcgccctgtcaacaaagtgatcaagtccgcctcagccacagccctctcactcctcattccttcggaacaccacacctgctccccgttggccagccccatgtccccacattctcagtcgtccaacccatcatcccgggactcttctccaagaagtatggcttcaccctgcgggccattcgcgtctacatgggtgactccgatgtctacaccgtgcaccatatggtgtggcacgtggaggatggaggtccggccagtgaggcagggcttcgtcaaggtgacctcatcacccatgtcaatggggaacctgtgcatggcctggtgcacacggaggtggtggagctgatcctgaagagtggaaacaaggtggccatttcaacaactcccctggagaacacatccattaaagtggggccagctcggaagggcagctacaaggccaagatggcccgaaggagcaagaggagccgcggcaaggatgggcaagaaagcagaaaaaggagctccctgttccgcaagatcaccaagcaagcatccctgctccacaccagccgcagcctttcttcccttaaccgctccttgtcatcaggggagagtgggccaggctctcccacacacagccacagcctttccccccgatctcccactcaaggctaccgggtgacccccgatgctgtgcattcagtgggagggaattcatcacagagcagctcccccagctccagcgtgcccagttccccagccggctctgggcacacacggcccagctccctccacggtctggcacccaagctccaacgccagtaccgctctccacggcgcaagtcagcaggcagcatcccactgtcaccactggcccacaccccttctcccccacccccaacagcttcacctcagcggtccccatcgcccctgtctggccatgtagcccaggcctttcccacaaagcttcacttgtcacctcccctgggcaggcaactctcacggcccaagagtgcggagccaccccgttcaccactactcaagagggtgcagtcggctgagaaactggcagcagcacttgccgcctctgagaagaagctagccacttctcgcaagcacagccttgacctgccccactctgaactaaagaaggaactgccgcccagggaagtgagccctctggaggtagttggagccaggagtgtgctgtctggcaagggggccctgccagggaagggggtgctgcagcctgctccctcacgggccctaggcaccctccggcaggaccgagccgaacgacgggagtcgctgcagaagcaagaagccattcgtgaggtggactcctcagaggacgacaccgaggaagggcctgagaacagccagggtgcacaggagctgagcttggcacctcacccagaagtgagccagagtgtggcccctaaaggagcaggagagagtggggaagaggatcctttcccgtccagagaccctaggagcctgggcccaatggtcccaagcctattgacagggatcacactggggcctcccagaatggaaagtcccagtggtccccacaggaggctcgggagcccacaagccattgaggaggctgccagctcctcctcagcaggccccaacctaggtcagtctggagccacagaccccatccctcctgaaggttgctggaaggcccagcacctccacacccaggcactaacagcactttctcccagcacttcgggactcacccccaccagcagttgctctcctcccagctccacctctgggaagctgagcatgtggtcctggaaatcccttattgagggcccagacagggcatccccaagcagaaaggcaaccatggcaggtgggctagccaacctccaggatttggaaaacacaactccagcccagcctaagaacctgtctcccagggagcaggggaagacacagccacctagtgcccccagactggcccatccatcttatgaggatcccagccagggctggctatgggagtctgagtgtgcacaagcagtgaaagaggatccagccctgagcatcacccaagtgcctgatgcctcaggtgacagaaggcaggacgttccatgccgaggctgccccctcacccagaagtctgagcccagcctcaggaggggccaagaaccagggggccatcaaaagcatcgggatttggcattggttccagatgagcttttaaagcaaacatagcagttgtttgccatttcttgcactcagacctgtgtaatatatgctcctggaaacca

SEQ ID NO: 326125 - DNA, 2589 bp, Homo sapiens
caatggggaacctgtgcatggcctggtgcacacggagggggtatctgggcctgtcactgaacactcaggggagcagcggccaaagctggatgaggaagctgttggccggagcagtggttccagtccagctatggagacccgaggccgtgggacctcacagctggctgagggagccacagccaaggccatcagtgacctggctgtgcgtagggcccgccaccggctgctctctggggactcaacagagaagcgcactgctcgccctgtcaacaaagtgatcaagtccgcctcagccacagccctctcactcctcattccttcggaacaccacacctgctccccgttggccagccccatgtccccacattctcagtcgtccaacccatcatcccgggactcttctccaagcagggacttcttgccagcccttggcagcatgaggcctcccatcatcatccaccgagctggcaagaagtatggcttcaccctgcgggccattcgcgtctacatgggtgactccgatgtctacaccgtgcaccatatggtgtggcacgtggaggatggaggtccggccagtgaggcagggcttcgtcaaggtgacctcatcacccatgtcaatggggaacctgtgcatggcctggtgcacacggaggtggtggagctgatcctgaagagtggaaacaaggtggccatttcaacaactcccctggagaacacatccattaaagtggggccagctcggaagggcagctacaaggccaagatggcccgaaggagcaagaggagccgcggcaaggatgggcaagaaagcagaaaaaggagctccctgttccgcaagatcaccaagcaagcatccctgctccacaccagccgcagcctttcttcccttaaccgctccttgtcatcaggggagagtgggccaggctctcccacacacagccacagcctttccccccgatctcccactcaaggctaccgggtgacccccgatgctgtgcattcagtgggagggaattcatcacagagcagctcccccagctccagcgtgcccagttccccagccggctctgggcacacacggcccagctccctccacggtctggcacccaagctccaacgccagtaccgctctccacggcgcaagtcagcaggcagcatcccactgtcaccactggcccacaccccttctcccccacccccaacagcttcacctcagcggtccccatcgcccctgtctggccatgtagcccaggcctttcccacaaagcttcacttgtcacctcccctgggcaggcaactctcacggcccaagagtgcggagccaccccgttcaccactactcaagagggtgcagtcggctgagaaactggcagcagcacttgccgcctctgagaagaagctagccacttctcgcaagcacagccttgacctgccccactctgaactaaagaaggaactgccgcccagggaagtgagccctctggaggtagttggagccaggagtgtgctgtctggcaagggggccctgccagggaagggggtgctgcagcctgctccctcacgggccctaggcaccctccggcaggaccgagccgaacgacgggagtcgctgcagaagcaagaagccattcgtgaggtggactcctcagaggacgacaccgaggaagggcctgagaacagccagggtgcacaggagctgagcttggcacctcacccagaagtgagccagagtgtggcccctaaaggagcaggagagagtggggaagaggatcctttcccgtccagagaccctaggagcctgggcccaatggtcccaagcctattgacagggatcacactggggcctcccagaatggaaagtcccagtggtccccacaggaggctcgggagcccacaagccattgaggaggctgccagctcctcctcagcaggccccaacctaggtcagtctggagccacagaccccatccctcctgaaggttgctggaaggcccagcacctccacacccaggcactaacagcactttctcccagcacttcgggactcacccccaccagcagttgctctcctcccagctccacctctgggaagctgagcatgtggtcctggaaatcccttattgagggcccagacagggcatccccaagcagaaaggcaaccatggcaggtgggctagccaacctccaggatttggaaaacacaactccagcccagcctaagaacctgtctcccagggagcaggggaagacacagccacctagtgcccccagactggcccatccatcttatgaggatcccagccagggctggctatgggagtctgagtgtgcacaagcagtgaaagaggatccagccctgagcatcacccaagtgcctgatgcctcaggtgacagaaggcaggacgttccatgccgaggctgccccctcacccagaagtctgagcccagcctcaggaggggccaagaaccagggggccatcaaaagcatcgggatttggcattggttccagatgagcttttaaagcaaacatagcagttgtttgccatttcttgcactcagacctgtgtaatatatgctcctggaaacca

SEQ ID NO: 326126 - DNA, 1873 bp, Homo sapiens
actagacgatcccgttctagccgcgccagtgtaggcccctaaaccagatggcccgaaggagcaagaggagccgcggcaaggatgggcaagaaagcagaaaaaggagctccctgttccgcaagatcaccaagcaagcatccctgctccacaccagccgcagcctttcttcccttaaccgctccttgtcatcaggggagagtgggccaggctctcccacacacagccacagcctttccccccgatctcccactcaaggctaccgggtgacccccgatgctgtgcattcagtgggagggaattcatcacagagcagctcccccagctccagcgtgcccagttccccagccggctctgggcacacacggcccagctccctccacggtctggcacccaagctccaacgccagtaccgctctccacggcgcaagtcagcaggcagcatcccactgtcaccactggcccacaccccttctcccccacccccaacagcttcacctcagcggtccccatcgcccctgtctggccatgtagcccaggcctttcccacaaagcttcacttgtcacctcccctgggcaggcaactctcacggcccaagagtgcggagccaccccgttcaccactactcaagagggtgcagtcggctgagaaactggcagcagcacttgccgcctctgagaagaagctagccacttctcgcaagcacagccttgacctgccccactctgaactaaagaaggaactgccgcccagggaagtgagccctctggaggtagttggagccaggagtgtgctgtctggcaagggggccctgccagggaagggggtgctgcagcctgctccctcacgggccctaggcaccctccggcaggaccgagccgaacgacgggagtcgctgcagaagcaagaagccattcgtgaggtggactcctcagaggacgacaccgaggaagggcctgagaacagccagggtgcacaggagctgagcttggcacctcacccagaagtgagccagagtgtggcccctaaaggagcaggagagagtggggaagaggatcctttcccgtccagagaccctaggagcctgggcccaatggtcccaagcctattgacagggatcacactggggcctcccagaatggaaagtcccagtggtccccacaggaggctcgggagcccacaagccattgaggaggctgccagctcctcctcagcaggccccaacctaggtcagtctggagccacagaccccatccctcctgaaggttgctggaaggcccagcacctccacacccaggcactaacagcactttctcccagcacttcgggactcacccccaccagcagttgctctcctcccagctccacctctgggaagctgagcatgtggtcctggaaatcccttattgagggcccagacagggcatccccaagcagaaaggcaaccatggcaggtgggctagccaacctccaggatttggaaaacacaactccagcccagcctaagaacctgtctcccagggagcaggggaagacacagccacctagtgcccccagactggcccatccatcttatgaggatcccagccagggctggctatgggagtctgagtgtgcacaagcagtgaaagaggatccagccctgagcatcacccaagtgcctgatgcctcaggtgacagaaggcaggacgttccatgccgaggctgccccctcacccagaagtctgagcccagcctcaggaggggccaagaaccagggggccatcaaaagcatcgggatttggcattggttccagatgagcttttaaagcaaacatagcagttgtttgccatttcttgcactcagacctgtgtaatatatgctcctggaaacca

SEQ ID NO: 326127 - DNA, 6116 bp, Homo sapiens
taggcaggcggctgagccggcggcgggtggcctgcccaacgtgtgctgggtgggagaaggcgaggcggcagcgatgctgtctcttccgtgaggagcgcagaggaggtcgcggcgccggaggccccagaaggctcgaaggcgccgcgggctggggtcggtggcttagggagcccgtccggccatggtggccgcgggtggtggttggcgcggctgcgctgcggcccggggcagtgcggagccgggacagtcgcggcgctgacgcccgcgggccccagctgcagatatgaagcggagccgctgccgcgaccgaccgcagccgccgccgcccgaccgccgggaggatggagttcagcgggcagcggagctgtctcagtctttgccgccgcgccggcgagcgccgcccgggaggcagcggctggaggagcggacgggccccgcggggcccgagggcaaggagcaggatgtagtaactggagttagtcccctgctcttcaggaaactcagtaatcctgacatattttcatccactggaaaagttaaacttcagcgacaactgagtcaggatgattgtaagttatggagaggaaacctggccagctctctatcgggtaagcagctgctccctttgtccagcagtgtacatagcagtgtgggacaggtgacttggcagtcgtcaggagaagcatcaaacctggttcgaatgagaaaccagtcccttggacagtctgcaccttctcttactgctggcctgaaggagttgagccttccaagaagaggcagcttttgtcggacaagtaaccgcaagagcttgattgtgacctctagcacatcacctacactaccacggccacactcaccactccatggccacacaggtaacagtcctttggacagcccccggaatttctctccaaatgcacctgctcacttttcttttgttcctgcccgtaggactgatgggcggcgctggtctttggcctctttgccctcttcaggatatggaactaacactcctagctccactgtctcatcatcatgctcctcacaggaaaagctgcatcagttgcctttccagcctacagctgatgagctgcactttttgacgaagcatttcagcacagagagcgtaccagatgaggaaggacggcagtccccagccatgcggcctcgctcccggagcctcagtcccggacgatccccagtatcctttgacagtgaaataataatgatgaatcatgtttacaaagaaagattcccaaaggctcatgagcgctcagagagctcagaagtggcttttgtgatgcagctggtgaaaaagctgatgattatcattgcccgcccagcacgtctcctggaatgcctggagtttgaccctgaagagttctaccaccttttagaagcagctgagggccacgccaaagagggacaagggattaaatgtgacattccccgctacatcgttagccagctgggcctcacccgggatcccctagaagaaatggcccagttgagcagctgtgacagtcctgacactccagagacagatgattctattgagggccatggggcatctctgccatctaaaaagacaccctctgaagaggacttcgagaccattaagctcatcagcaatggcgcctatggggctgtatttctggtgcggcacaagtccacccggcagcgctttgccatgaagaagatcaacaagcagaacctgatcctacggaaccagatccagcaggccttcgtggagcgtgacatactgactttcgctgagaacccctttgtggtcagcatgttctgctcctttgataccaagcgccacttgtgcatggtgatggagtacgttgaagggggagactgtgccactctgctgaagaatattggggccctgcctgtggacatggtgcgtctatactttgcggaaactgtgctggccctggagtacttacacaactatggcatcgtgcaccgtgacctcaagcctgacaacctcctaattacatccatggggcacatcaagctcacggactttggactgtccaaaatgggcctcatgagtctgacaacgaacttgtatgagggtcatattgaaaaggatgcccgggaattcctggacaagcaggtatgcgggaccccagaatacattgcgcctgaggtgatcctgcgccagggctatgggaagccagtggactggtgggccatgggcattatcctgtatgagttcctggtgggctgcgtccctttttttggagatactccggaggagctctttgggcaggtgatcagtggtaggtactatgcccctggcccagtggggaaacagagtctgaatccacaaatatgatgtatgcaggcagctcgtgaggcctgtgagctcttgttctgaactcatcatgtgtgtttgtgatgtctgctgctttggggatgggtgtctctgtgtttctgcatgtacatacatgtgcacactgtgtcccttggggcttcacatgtctctcatagacacctggtctctcatatacacctgggtgttcctgtctgtgtatgtgcacatcccataagtgtgaggggtacgtctgtgtatgttttgtggagtataaaagcagggtgagctagagctttgcagtgcctgctgtggatcaaagatcaagctatggtctaggaacctatagaatttaaggactggggtcccaggcaaggctttcaggggctccaggctgggtcctttttgcctcctttcctttcactgttctgggaccctcttctgcatctctccactctacccacaatttctcctttccctctcacccctgatgacttcagatgagattgtgtggcctgagggtgatgaggcactgcccccagacgcccaggacctcacctccaaactgctccaccagaaccctctggagagacttggcacaggtagggcaggccctgctaacttttctcactacttggaaaaggggtaagggaggctgagtcatgtaccctggaggttcaggcttcggttacgggcagcccctctggatcctgaaactctgccctgctctgtaggcagaaaagggaagatgcttgagctgatcccctaggtatagcttctgaaggtctggcttcttgctagatttgctgacctagactccatgctgctcatcctacccccttgcccatgtcctccctgtccacaggcagtgcctatgaggtgaagcagcacccattctttactggtctggactggacaggacttctccgccagaaggctgaatttattcctcagttggagtcagaggatgatactagctattttgacagtaaggccaccgatgggtggggtggaggatgggtcctacctgtttgcctagaaacacctgtgcacactgaaattgcattgggagcaacttctcagggctctgctgaaatctaatggggtcacaaggaggccaccagcagggctctgaaggaaagtgtcctttatgtctggcccagcccgctcagagcgataccaccacatggactcggaggatgaggaagaagtgagtgaggatggctgccttgagatccgccagttctcttcctgctctccaaggttcaacaaggtgtgactgaggaggcccagaatgggcagaacaggctggaggatcagaagaagagggcctgtcaaagggcacacctggggcaggctcagggagttggggttggggccacctctagaaaaagaggagctaagggttggggctacatatagctatatataggtgcttctagaaccactgctgtccctgacatgagatgccaggtcagatcagtggaataactccttccccaaatattcagcaggggtgtgtgaaggagggatggaaccgactggttcaaattcctaggtttccgatgccaaggatgctttatgccacttgggaggtacggctgccagagcccatccccagcgcatcccctgtgcccacaggtgtacagcagcatggagcggctctcactgctcgaggagcgccggacaccacccccgaccaagcgcagcctgagtgaggagaaggaggaccattcagatggcctggcagggctcaaaggccgagaccggagctgggtgattggctcccctgagatgatgtgagcacccagagttcacccagggtgggcgacacagctatccctgcattgtcacagatcatgggagagattccgatgccagggaggagtgcaggtggcagggagggggcattcacaagggtggctcctggaggaatgtctgcggaggaaagttctgttactataacccttgtgtgcccctaaggagacctggcaggaggagggggaccacctgggtcactcaccccaggccttgtgtctcatagattacggaagcggctgtcggtgtctgagtcgtcccacacagagagtgactcaagccctccaatgacagtgcgacgccgctgctcaggcctcctggatgcgcctcggttcccggagggccctgaggaggccagcagcaccctcaggaggcaaccacaggagggtatatgggtcctgacacccccatctggagagggggtatctgggcctgtcactgaacactcaggggagcagcggccaaagctggatgaggaagctgttggccggagcagtggttccagtccaggtatggcccagtgggcggccaaacgacctaagctggaggatactgcagggcagggaggctcagcggcatcgcgggtctcactgcttacttgggcctacagctatggagacccgaggccgtgggacctcacagctggctgagggagccacagccaaggccatcagtgacctggctgtgcgtagggcccgccaccggctgctctctggggactcaacagagaagcgcactgctcgccctgtcaacaaagtgatcaagtccgcctcagccacagccctctcactcctcattccttcgggtgaggcccctggggagctgggataaaactcacaggaagggccttgtaatctctaggccttgggagggttctgcacgtggcaggtgtgtgtgtgtgtgttaagcacagatctgactgtggtctctgaaggtgtgtattggtgtctggggttgtgtatacatgtgccagaaagcaggacagcaccatgtcacaagtgcaggctttggggtagagagctcacactcaaatcctggctccatcactaacaggctcttgaccttgagcaagttgcttaacttctctaagcctcaagtttcttatccaaaaatgtggatataatagaggccagctgataggttgtgacatttaaatatatatgacaagcttatatagtccctgatacacacataaatgctagctgccatttctcatcaccaccaccgtctcttggggtctggacacgggagagggcttcacaggtcaggggctgtggggaaaatggacctaggctcaggctctgtctgtgactagagttgtgctgacatcaacagactggaccaggggccaggccaaagccctctgacccactaagtcctggcttctccttctccagaacaccacacctgctccccgttggccagccccatgtccccacattctcagtcgtccaacccatcatcccgggactcttctccaagcagggacttcttgccagcccttggcagcatgaggcctcccatcatcatccaccgagctggcaagaagtatggcttcaccctgcgggccattcgcgtctacatgggtgactccgatgtctacaccgtgcaccatatggtgtgggtatgtctgaccatccagacctgctgtctccctgcttcatcatccttccagcttcccctttgtggagcccatctgtccctgctcgggggtcaaagggtggtggtgaaggggctcacagcttaatgtccagaaccaggccccatacttcgtgttcaggctccagtctgagtactgttctcttcctggcacagcacgtggaggatggaggtccggccagtgaggcagggcttcgtcaaggtgacctcatcacccatgtcaatggggaacctgtgcatggcctggtgcacacggaggtggtggagctgatcctgaaggttagtgctgggcgtgctgcctgcatggtccctgaat

SEQ ID NO: 326128 - DNA, 320 bp, Homo sapiens
ggccatggggcatctctgccatctaaaaagacaccctctgaagaggacttcgagaccattaagctcatcagcaatggcgcctatgggtaaaggcaggggtcagggtgtggccaggactgaagccgggtcagcctttgatctcttccatgtgagagtgtatgctgcccagtcctctgggcagatgcctcggggtggaccttctcactcccagaagcctcctgggtgggcaggagttcagattcctctgacatccgatcattgttcctttcccagacaagattcccacgcctcttactaccacgcatcctccattccctgag

SEQ ID NO: 326129 - DNA, 5736 bp, Homo sapiens
taggcaggcggctgagccggcggcgggtggcctgcccaacgtgtgctgggtgggagaaggcgaggcggcagcgatgctgtctcttccgtgaggagcgcagaggaggtcgcggcgccggaggccccagaaggctcgaaggcgccgcgggctggggtcggtggcttagggagcccgtccggccatggtggccgcgggtggtggttggcgcggctgcgctgcggcccggggcagtgcggagccgggacagtcgcggcgctgacgcccgcgggccccagctgcagatatgaagcggagccgctgccgcgaccgaccgcagccgccgccgcccgaccgccgggaggatggagttcagcgggcagcggagctgtctcagtctttgccgccgcgccggcgagcgccgcccgggaggcagcggctggaggagcggacgggccccgcggggcccgagggcaaggagcaggatgtagtaactggagttagtcccctgctcttcaggaaactcagtaatcctgacatattttcatccactggaaaagttaaacttcagcgacaactgagtcaggatgattgtaagttatggagaggaaacctggccagctctctatcgggtaagcagctgctccctttgtccagcagtgtacatagcagtgtgggacaggtgacttggcagtcgtcaggagaagcatcaaacctggttcgaatgagaaaccagtcccttggacagtctgcaccttctcttactgctggcctgaaggagttgagccttccaagaagaggcagcttttgtcggacaagtaaccgcaagagcttgattgtgacctctagcacatcacctacactaccacggccacactcaccactccatggccacacaggtaacagtcctttggacagcccccggaatttctctccaaatgcacctgctcacttttcttttgttcctgcccgtaggactgatgggcggcgctggtctttggcctctttgccctcttcaggatatggaactaacactcctagctccactgtctcatcatcatgctcctcacaggaaaagctgcatcagttgcctttccagcctacagctgatgagctgcactttttgacgaagcatttcagcacagagagcgtaccagatgaggaaggacggcagtccccagccatgcggcctcgctcccggagcctcagtcccggacgatccccagtatcctttgacagtgaaataataatgatgaatcatgtttacaaagaaagattcccaaaggccaccgcacaaatggaagagcgactagcagagtttatttcctccaacactccagacagcgtgctgcccttggcagatggagccctgagctttattcatcatcaggtgattgagatggcccgagactgcctggataaatctcggagtggcctcattacatcacaatacttctacgaacttcaagagaatttggagaaacttttacaagatgctcatgagcgctcagagagctcagaagtggcttttgtgatgcagctggtgaaaaagctgatgattatcattgcccgcccagcacgtctcctggaatgcctggagtttgaccctgaagagttctaccaccttttagaagcagctgagggccacgccaaagagggacaagggattaaatgtgacattccccgctacatcgttagccagctgggcctcacccgggatcccctagaagaaatggcccagttgagcagctgtgacagtcctgacactccagagacagatgattctattgagggccatggggcatctctgccatctaaaaagacaccctctgaagaggacttcgagaccattaagctcatcagcaatggcgcctatggggctgtatttctggtgcggcacaagtccacccggcagcgctttgccatgaagaagatcaacaagcagaacctgatcctacggaaccagatccagcaggccttcgtggagcgtgacatactgactttcgctgagaacccctttgtggtcagcatgttctgctcctttgataccaagcgccacttgtgcatggtgatggagtacgttgaagggggagactgtgccactctgctgaagaatattggggccctgcctgtggacatggtgcgtctatactttgcggaaactgtgctggccctggagtacttacacaactatggcatcgtgcaccgtgacctcaagcctgacaacctcctaattacatccatggggcacatcaagctcacggactttggactgtccaaaatgggcctcatgagtctgacaacgaacttgtatgagggtcatattgaaaaggatgcccgggaattcctggacaagcaggtatgcgggaccccagaatacattgcgcctgaggtgatcctgcgccagggctatgggaagccagtggactggtgggccatgggcattatcctgtatgagttcctggtgggctgcgtccctttttttggagatactccggaggagctctttgggcaggtgatcagtgatgagattgtgtggcctgagggtgatgaggcactgcccccagacgcccaggacctcacctccaaactgctccaccagaaccctctggagagacttggcacaggcagtgcctatgaggtgaagcagcacccattctttactggtctggactggacaggacttctccgccagaaggctgaatttattcctcagttggagtcagaggatgatactagctattttgacacccgctcagagcgataccaccacatggactcggaggatgaggaagaagtgagtgaggatggctgccttgagatccgccagttctcttcctgctctccaaggttcaacaaggtgtacagcagcatggagcggctctcactgctcgaggagcgccggacaccacccccgaccaagcgcagcctgagtgaggagaaggaggaccattcagatggcctggcagggctcaaaggccgagaccggagctgggtgattggctcccctgagatattacggaagcggctgtcggtgtctgagtcgtcccacacagagagtgactcaagccctccaatgacagtgcgacgccgctgctcaggcctcctggatgcgcctcggttcccggagggccctgaggaggccagcagcaccctcaggaggcaaccacaggagggtatatgggtcctgacacccccatctggagagggggtatctgggcctgtcactgaacactcaggggagcagcggccaaagctggatgaggaagctgttggccggagcagtggttccagtccagctatggagacccgaggccgtgggacctcacagctggctgagggagccacagccaaggccatcagtgacctggctgtgcgtagggcccgccaccggctgctctctggggactcaacagagaagcgcactgctcgccctgtcaacaaagtgatcaagtccgcctcagccacagccctctcactcctcattccttcggaacaccacacctgctccccgttggccagccccatgtccccacattctcagtcgtccaacccatcatcccgggactcttctccaagcagggacttcttgccagcccttggcagcatgaggcctcccatcatcatccaccgagctggcaagaagtatggcttcaccctgcgggccattcgcgtctacatgggtgactccgatgtctacaccgtgcaccatatggtgtggcacgtggaggatggaggtccggccagtgaggcagggcttcgtcaaggtgacctcatcacccatgtcaatggggaacctgtgcatggcctggtgcacacggaggtggtggagctgatcctgaagagtggaaacaaggtggccatttcaacaactcccctggagaacacatccattaaagtggggccagctcggaagggcagctacaaggccaagatggcccgaaggagcaagaggagccgcggcaaggatgggcaagaaagcagaaaaaggagctccctgttccgcaagatcaccaagcaagcatccctgctccacaccagccgcagcctttcttcccttaaccgctccttgtcatcaggggagagtgggccaggctctcccacacacagccacagcctttccccccgatctcccactcaaggctaccgggtgacccccgatgctgtgcattcagtgggagggaattcatcacagagcagctcccccagctccagcgtgcccagttccccagccggctctgggcacacacggcccagctccctccacggtctggcacccaagctccaacgccagtaccgctctccacggcgcaagtcagcaggcagcatcccactgtcaccactggcccacaccccttctcccccacccccaacagcttcacctcagcggtccccatcgcccctgtctggccatgtagcccaggcctttcccacaaagcttcacttgtcacctcccctgggcaggcaactctcacggcccaagagtgcggagccaccccgttcaccactactcaagagggtgcagtcggctgagaaactggcagcagcacttgccgcctctgagaagaagctagccacttctcgcaagcacagccttgacctgccccactctgaactaaagaaggaactgccgcccagggaagtgagccctctggaggtagttggagccaggagtgtgctgtctggcaagggggccctgccagggaagggggtgctgcagcctgctccctcacgggccctaggcaccctccggcaggaccgagccgaacgacgggagtcgctgcagaagcaagaagccattcgtgaggtggactcctcagaggacgacaccgaggaagggcctgagaacagccagggtgcacaggagctgagcttggcacctcacccagaagtgagccagagtgtggcccctaaaggagcaggagagagtggggaagaggatcctttcccgtccagagaccctaggagcctgggcccaatggtcccaagcctattgacagggatcacactggggcctcccagaatggaaagtcccagtggtccccacaggaggctcgggagcccacaagccattgaggaggctgccagctcctcctcagcaggccccaacctaggtcagtctggagccacagaccccatccctcctgaaggttgctggaaggcccagcacctccacacccaggcactaacagcactttctcccagcacttcgggactcacccccaccagcagttgctctcctcccagctccacctctgggaagctgagcatgtggtcctggaaatcccttattgagggcccagacagggcatccccaagcagaaaggcaaccatggcaggtgggctagccaacctccaggatttggaaaacacaactccagcccagcctaagaacctgtctcccagggagcaggggaagacacagccacctagtgcccccagactggcccatccatcttatgaggatcccagccagggctggctatgggagtctgagtgtgcacaagcagtgaaagaggatccagccctgagcatcacccaagtgcctgatgcctcaggtgacagaaggcaggacgttccatgccgaggctgccccctcacccagaagtctgagcccagcctcaggaggggccaagaaccagggggccatcaaaagcatcgggatttggcattggttccagatgagcttttaaagcaaacatagcagttgtttgccatttcttgcactcagacctgtgtaatatatgctcctggaaacca

SEQ ID NO: 326130 - DNA, 6007 bp, Homo sapiens
taggcaggcggctgagccggcggcgggtggcctgcccaacgtgtgctgggtgggagaaggcgaggcggcagcgatgctgtctcttccgtgaggagcgcagaggaggtcgcggcgccggaggccccagaaggctcgaaggcgccgcgggctggggtcggtggcttagggagcccgtccggccatggtggccgcgggtggtggttggcgcggctgcgctgcggcccggggcagtgcggagccgggacagtcgcggcgctgacgcccgcgggccccagctgcagatatgaagcggagccgctgccgcgaccgaccgcagccgccgccgcccgaccgccgggaggatggagttcagcgggcagcggagctgtctcagtctttgccgccgcgccggcgagcgccgcccgggaggcagcggctggaggagcggacgggccccgcggggcccgagggcaaggagcaggatgtagtaactggagttagtcccctgctcttcaggaaactcagtaatcctgacatattttcatccactggaaaagttaaacttcagcgacaactgagtcaggatgattgtaagttatggagaggaaacctggccagctctctatcgggtaagcagctgctccctttgtccagcagtgtacatagcagtgtgggacaggtgacttggcagtcgtcaggagaagcatcaaacctggttcgaatgagaaaccagtcccttggacagtctgcaccttctcttactgctggcctgaaggagttgagccttccaagaagaggcagcttttgtcggacaagtaaccgcaagagcttgattgtgacctctagcacatcacctacactaccacggccacactcaccactccatggccacacaggtaacagtcctttggacagcccccggaatttctctccaaatgcacctgctcacttttcttttgttcctgcccgtaggactgatgggcggcgctggtctttggcctctttgccctcttcaggatatggaactaacactcctagctccactgtctcatcatcatgctcctcacaggaaaagctgcatcagttgcctttccagcctacagctgatgagctgcactttttgacgaagcatttcagcacagagagcgtaccagatgaggaaggacggcagtccccagccatgcggcctcgctcccggagcctcagtcccggacgatccccagtatcctttgacagtgaaataataatgatgaatcatgtttacaaagaaagattcccaaaggccaccgcacaaatggaagagcgactagcagagtttatttcctccaacactccagacagcgtgctgcccttggcagatggagccctgagctttattcatcatcaggtgattgagatggcccgagactgcctggataaatctcggagtggcctcattacatcacaatacttctacgaacttcaagagaatttggagaaacttttacaagatgctcatgagcgctcagagagctcagaagtggcttttgtgatgcagctggtgaaaaagctgatgattatcattgcccgcccagcacgtctcctggaatgcctggagtttgaccctgaagagttctaccaccttttagaagcagctgagggccacgccaaagagggacaagggattaaatgtgacattccccgctacatcgttagccagctgggcctcacccgggatcccctagaagaaatggcccagttgagcagctgtgacagtcctgacactccagagacagatgattctattgagggccatggggcatctctgccatctaaaaagacaccctctgaagaggacttcgagaccattaagctcatcagcaatggcgcctatggggctgtatttctggtgcggcacaagtccacccggcagcgctttgccatgaagaagatcaacaagcagaacctgatcctacggaaccagatccagcaggccttcgtggagcgtgacatactgactttcgctgagaacccctttgtggtcagcatgttctgctcctttgataccaagcgccacttgtgcatggtgatggagtacgttgaagggggagactgtgccactctgctgaagaatattggggccctgcctgtggacatggtgcgtctatactttgcggaaactgtgctggccctggagtacttacacaactatggcatcgtgcaccgtgacctcaagcctgacaacctcctaattacatccatggggcacatcaagctcacggactttggactgtccaaaatgggcctcatgagtctgacaacgaacttgtatgagggtcatattgaaaaggatgcccgggaattcctggacaagcaggtatgcgggaccccagaatacattgcgcctgaggtgatcctgcgccagggctatgggaagccagtggactggtgggccatgggcattatcctgtatgagttcctggtgggctgcgtccctttttttggagatactccggaggagctctttgggcaggtgatcagtgatgagattgtgtggcctgagggtgatgaggcactgcccccagacgcccaggacctcacctccaaactgctccaccagaaccctctggagagacttggcacaggcagtgcctatgaggtgaagcagcacccattctttactggtctggactggacaggacttctccgccagaaggctgaatttattcctcagttggagtcagaggatgatactagctattttgacacccgctcagagcgataccaccacatggactcggaggatgaggaagaagtgagtgaggatggctgccttgagatccgccagttctcttcctgctctccaaggttcaacaaggtgtacagcagcatggagcggctctcactgctcgaggagcgccggacaccacccccgaccaagcgcagcctgagtgaggagaaggaggaccattcagatggcctggcagggctcaaaggccgagaccggagctgggtgattggctcccctgagatattacggaagcggctgtcggtgtctgagtcgtcccacacagagagtgactcaagccctccaatgacagtgcgacgccgctgctcaggcctcctggatgcgcctcggttcccggagggccctgaggaggccagcagcaccctcaggaggcaaccacaggagggtatatgggtcctgacacccccatctggagagggggtatctgggcctgtcactgaacactcaggggagcagcggccaaagctggatgaggaagctgttggccggagcagtggttccagtccagctatggagacccgaggccgtgggacctcacagctggctgagggagccacagccaaggccatcagtgacctggctgtgcgtagggcccgccaccggctgctctctggggactcaacagagaagcgcactgctcgccctgtcaacaaagtgatcaagtccgcctcagccacagccctctcactcctcattccttcggaacaccacacctgctccccgttggccagccccatgtccccacattctcagtcgtccaacccatcatcccgggactcttctccaagcagggacttcttgccagcccttggcagcatgaggcctcccatcatcatccaccgagctggcaagaagtatggcttcaccctgcgggccattcgcgtctacatgggtgactccgatgtctacaccgtgcaccatatggtgtggcacgtggaggatggaggtccggccagtgaggcagggcttcgtcaaggtgacctcatcacccatgtcaatggggaacctgtgcatggcctggtgcacacggaggtggtggagctgatcctgaagagtggaaacaaggtggccatttcaacaactcccctggagaacacatccattaaagtggggccagctcggaagggcagctacaaggccaagatggcccgaaggagcaagaggagccgcggcaaggatgggcaagaaagcagaaaaaggagctccctgttccgcaagatcaccaagcaagcatccctgctccacaccagccgcagcctttcttcccttaaccgctccttgtcatcaggggagagtgggccaggctctcccacacacagccacagcctttccccccgatctcccactcaaggctaccgggtgacccccgatgctgtgcattcaggtacgaagggctccctgcagatcagtgacaacccctgggaaataggaaagttcctaggccctgtgtgcttctgacagatcccactctgagtctctcatttagcccaccccctgaaagatcctgtagtcttggggaggaattaattgatggggaagggggtagcttggtttctgggacataacagggctaagccctgtcttgcccttgagtcacttctaacagctaacactgctctgcttttgtctgtctgtctgtctgtctctgtacaaagtgggagggaattcatcacagagcagctcccccagctccagcgtgcccagttccccagccggctctgggcacacacggcccagctccctccacggtctggcacccaagctccaacgccagtaccgctctccacggcgcaagtcagcaggcagcatcccactgtcaccactggcccacaccccttctcccccacccccaacagcttcacctcagcggtccccatcgcccctgtctggccatgtagcccaggcctttcccacaaagcttcacttgtcacctcccctgggcaggcaactctcacggcccaagagtgcggagccaccccgttcaccactactcaagagggtgcagtcggctgagaaactggcagcagcacttgccgcctctgagaagaagctagccacttctcgcaagcacagccttgacctgccccactctgaactaaagaaggaactgccgcccagggaagtgagccctctggaggtagttggagccaggagtgtgctgtctggcaagggggccctgccagggaagggggtgctgcagcctgctccctcacgggccctaggcaccctccggcaggaccgagccgaacgacgggagtcgctgcagaagcaagaagccattcgtgaggtggactcctcagaggacgacaccgaggaagggcctgagaacagccagggtgcacaggagctgagcttggcacctcacccagaagtgagccagagtgtggcccctaaaggagcaggagagagtggggaagaggatcctttcccgtccagagaccctaggagcctgggcccaatggtcccaagcctattgacagggatcacactggggcctcccagaatggaaagtcccagtggtccccacaggaggctcgggagcccacaagccattgaggaggctgccagctcctcctcagcaggccccaacctaggtcagtctggagccacagaccccatccctcctgaaggttgctggaaggcccagcacctccacacccaggcactaacagcactttctcccagcacttcgggactcacccccaccagcagttgctctcctcccagctccacctctgggaagctgagcatgtggtcctggaaatcccttattgagggcccagacagggcatccccaagcagaaaggcaaccatggcaggtgggctagccaacctccaggatttggaaaacacaactccagcccagcctaagaacctgtctcccagggagcaggggaagacacagccacctagtgcccccagactggcccatccatcttatgaggatcccagccagggctggctatgggagtctgagtgtgcacaagcagtgaaagaggatccagccctgagcatcacccaagtgcctgatgcctcaggtgacagaaggcaggacgttccatgccgaggctgccccctcacccagaagtctgagcccagcctcaggaggggccaagaaccagggggccatcaaaagcatcgggatttggcattggttccagatgagcttttaaagcaaacatagcagttgtttgccatttcttgcactcagacctgtgtaatatatgctcctggaaacca

SEQ ID NO: 326131 - DNA, 6328 bp, Homo sapiens
taggcaggcggctgagccggcggcgggtggcctgcccaacgtgtgctgggtgggagaaggcgaggcggcagcgatgctgtctcttccgtgaggagcgcagaggaggtcgcggcgccggaggccccagaaggctcgaaggcgccgcgggctggggtcggtggcttagggagcccgtccggccatggtggccgcgggtggtggttggcgcggctgcgctgcggcccggggcagtgcggagccgggacagtcgcggcgctgacgcccgcgggccccagctgcagatatgaagcggagccgctgccgcgaccgaccgcagccgccgccgcccgaccgccgggaggatggagttcagcgggcagcggagctgtctcagtctttgccgccgcgccggcgagcgccgcccgggaggcagcggctggaggagcggacgggccccgcggggcccgagggcaaggagcaggatgtagtaactggagttagtcccctgctcttcaggaaactcagtaatcctgacatattttcatccactggaaaagttaaacttcagcgacaactgagtcaggatgattgtaagttatggagaggaaacctggccagctctctatcgggtaagcagctgctccctttgtccagcagtgtacatagcagtgtgggacaggtgacttggcagtcgtcaggagaagcatcaaacctggttcgaatgagaaaccagtcccttggacagtctgcaccttctcttactgctggcctgaaggagttgagccttccaagaagaggcagcttttgtcggacaagtaaccgcaagagcttgattgtgacctctagcacatcacctacactaccacggccacactcaccactccatggccacacaggtaacagtcctttggacagcccccggaatttctctccaaatgcacctgctcacttttcttttgttcctgcccgtaggactgatgggcggcgctggtctttggcctctttgccctcttcaggatatggaactaacactcctagctccactgtctcatcatcatgctcctcacaggaaaagctgcatcagttgcctttccagcctacagctgatgagctgcactttttgacgaagcatttcagcacagagagcgtaccagatgaggaaggacggcagtccccagccatgcggcctcgctcccggagcctcagtcccggacgatccccagtatcctttgacagtgaaataataatgatgaatcatgtttacaaagaaagattcccaaaggccaccgcacaaatggaagagcgactagcagagtttatttcctccaacactccagacagcgtgctgcccttggcagatggagccctgagctttattcatcatcaggtgattgagatggcccgagactgcctggataaatctcggagtggcctcattacatcacaatacttctacgaacttcaagagaatttggagaaacttttacaagatgctcatgagcgctcagagagctcagaagtggcttttgtgatgcagctggtgaaaaagctgatgattatcattgcccgcccagcacgtctcctggaatgcctggagtttgaccctgaagagttctaccaccttttagaagcagctgagggccacgccaaagagggacaagggattaaatgtgacattccccgctacatcgttagccagctgggcctcacccgggatcccctagaagaaatggcccagttgagcagctgtgacagtcctgacactccagagacagatgattctattgagggccatggggcatctctgccatctaaaaagacaccctctgaagaggacttcgagaccattaagctcatcagcaatggcgcctatggggctgtatttctggtgcggcacaagtccacccggcagcgctttgccatgaagaagatcaacaagcagaacctgatcctacggaaccagatccagcaggccttcgtggagcgtgacatactgactttcgctgagaacccctttgtggtcagcatgttctgctcctttgataccaagcgccacttgtgcatggtgatggagtacgttgaagggggagactgtgccactctgctgaagaatattggggccctgcctgtggacatggtgcgtctatactttgcggaaactgtgctggccctggagtacttacacaactatggcatcgtgcaccgtgacctcaagcctgacaacctcctaattacatccatggggcacatcaagctcacggactttggactgtccaaaatgggcctcatgagtctgacaacgaacttgtatgagggtcatattgaaaaggatgcccgggaattcctggacaagcaggtatgcgggaccccagaatacattgcgcctgaggtgatcctgcgccagggctatgggaagccagtggactggtgggccatgggcattatcctgtatgagttcctggtgggctgcgtccctttttttggagatactccggaggagctctttgggcaggtgatcagtgatgagattgtgtggcctgagggtgatgaggcactgcccccagacgcccaggacctcacctccaaactgctccaccagaaccctctggagagacttggcacaggcagtgcctatgaggtgaagcagcacccattctttactggtctggactggacaggacttctccgccagaaggctgaatttattcctcagttggagtcagaggatgatactagctattttgacacccgctcagagcgataccaccacatggactcggaggatgaggaagaagtgagtgaggatggctgccttgagatccgccagttctcttcctgctctccaaggttcaacaaggtgtacagcagcatggagcggctctcactgctcgaggagcgccggacaccacccccgaccaagcgcagcctgagtgaggagaaggaggaccattcagatggcctggcagggctcaaaggccgagaccggagctgggtgattggctcccctgagatattacggaagcggctgtcggtgtctgagtcgtcccacacagagagtgactcaagccctccaatgacagtgcgacgccgctgctcaggcctcctggatgcgcctcggttcccggagggccctgaggaggccagcagcaccctcaggaggcaaccacaggagggtatatgggtcctgacacccccatctggagagggggtatctgggcctgtcactgaacactcaggggagcagcggccaaagctggatgaggaagctgttggccggagcagtggttccagtccagctatggagacccgaggccgtgggacctcacagctggctgagggagccacagccaaggccatcagtgacctggctgtgcgtagggcccgccaccggctgctctctggggactcaacagagaagcgcactgctcgccctgtcaacaaagtgatcaagtccgcctcagccacagccctctcactcctcattccttcgggtgaggcccctggggagctgggataaaactcacaggaagggccttgtaatctctaggccttgggagggttctgcacgtggcaggtgtgtgtgtgtgtgttaagcacagatctgactgtggtctctgaaggtgtgtattggtgtctggggttgtgtatacatgtgccagaaagcaggacagcaccatgtcacaagtgcaggctttggggtagagagctcacactcaaatcctggctccatcactaacaggctcttgaccttgagcaagttgcttaacttctctaagcctcaagtttcttatccaaaaatgtggatataatagaggccagctgataggttgtgacatttaaatatatatgacaagcttatatagtccctgatacacacataaatgctagctgccatttctcatcaccaccaccgtctcttggggtctggacacgggagagggcttcacaggtcaggggctgtggggaaaatggacctaggctcaggctctgtctgtgactagagttgtgctgacatcaacagactggaccaggggccaggccaaagccctctgacccactaagtcctggcttctccttctccagaacaccacacctgctccccgttggccagccccatgtccccacattctcagtcgtccaacccatcatcccgggactcttctccaagcagggacttcttgccagcccttggcagcatgaggcctcccatcatcatccaccgagctggcaagaagtatggcttcaccctgcgggccattcgcgtctacatgggtgactccgatgtctacaccgtgcaccatatggtgtggcacgtggaggatggaggtccggccagtgaggcagggcttcgtcaaggtgacctcatcacccatgtcaatggggaacctgtgcatggcctggtgcacacggaggtggtggagctgatcctgaagagtggaaacaaggtggccatttcaacaactcccctggagaacacatccattaaagtggggccagctcggaagggcagctacaaggccaagatggcccgaaggagcaagaggagccgcggcaaggatgggcaagaaagcagaaaaaggagctccctgttccgcaagatcaccaagcaagcatccctgctccacaccagccgcagcctttcttcccttaaccgctccttgtcatcaggggagagtgggccaggctctcccacacacagccacagcctttccccccgatctcccactcaaggctaccgggtgacccccgatgctgtgcattcagtgggagggaattcatcacagagcagctcccccagctccagcgtgcccagttccccagccggctctgggcacacacggcccagctccctccacggtctggcacccaagctccaacgccagtaccgctctccacggcgcaagtcagcaggcagcatcccactgtcaccactggcccacaccccttctcccccacccccaacagcttcacctcagcggtccccatcgcccctgtctggccatgtagcccaggcctttcccacaaagcttcacttgtcacctcccctgggcaggcaactctcacggcccaagagtgcggagccaccccgttcaccactactcaagagggtgcagtcggctgagaaactggcagcagcacttgccgcctctgagaagaagctagccacttctcgcaagcacagccttgacctgccccactctgaactaaagaaggaactgccgcccagggaagtgagccctctggaggtagttggagccaggagtgtgctgtctggcaagggggccctgccagggaagggggtgctgcagcctgctccctcacgggccctaggcaccctccggcaggaccgagccgaacgacgggagtcgctgcagaagcaagaagccattcgtgaggtggactcctcagaggacgacaccgaggaagggcctgagaacagccagggtgcacaggagctgagcttggcacctcacccagaagtgagccagagtgtggcccctaaaggagcaggagagagtggggaagaggatcctttcccgtccagagaccctaggagcctgggcccaatggtcccaagcctattgacagggatcacactggggcctcccagaatggaaagtcccagtggtccccacaggaggctcgggagcccacaagccattgaggaggctgccagctcctcctcagcaggccccaacctaggtcagtctggagccacagaccccatccctcctgaaggttgctggaaggcccagcacctccacacccaggcactaacagcactttctcccagcacttcgggactcacccccaccagcagttgctctcctcccagctccacctctgggaagctgagcatgtggtcctggaaatcccttattgagggcccagacagggcatccccaagcagaaaggcaaccatggcaggtgggctagccaacctccaggatttggaaaacacaactccagcccagcctaagaacctgtctcccagggagcaggggaagacacagccacctagtgcccccagactggcccatccatcttatgaggatcccagccagggctggctatgggagtctgagtgtgcacaagcagtgaaagaggatccagccctgagcatcacccaagtgcctgatgcctcaggtgacagaaggcaggacgttccatgccgaggctgccccctcacccagaagtctgagcccagcctcaggaggggccaagaaccagggggccatcaaaagcatcgggatttggcattggttccagatgagcttttaaagcaaacatagcagttgtttgccatttcttgcactcagacctgtgtaatatatgctcctggaaacca

SEQ ID NO: 326132 - DNA, 5447 bp, Homo sapiens
taggcaggcggctgagccggcggcgggtggcctgcccaacgtgtgctgggtgggagaaggcgaggcggcagcgatgctgtctcttccgtgaggagcgcagaggaggtcgcggcgccggaggccccagaaggctcgaaggcgccgcgggctggggtcggtggcttagggagcccgtccggccatggtggccgcgggtggtggttggcgcggctgcgctgcggcccggggcagtgcggagccgggacagtcgcggcgctgacgcccgcgggccccagctgcagatatgaagcggagccgctgccgcgaccgaccgcagccgccgccgcccgaccgccgggaggatggagttcagcgggcagcggagctgtctcagtctttgccgccgcgccggcgagcgccgcccgggaggcagcggctggaggagcggacgggccccgcggggcccgagggcaaggagcaggatgtagtaactggagttagtcccctgctcttcaggaaactcagtaatcctgacatattttcatccactggaaaagttaaacttcagcgacaactgagtcaggatgattgtaagttatggagaggaaacctggccagctctctatcgggtaagcagctgctccctttgtccagcagtgtacatagcagtgtgggacaggtgacttggcagtcgtcaggagaagcatcaaacctggttcgaatgagaaaccagtcccttggacagtctgcaccttctcttactgctggcctgaaggagttgagccttccaagaagaggcagcttttgtcggacaagtaaccgcaagagcttgattgtgacctctagcacatcacctacactaccacggccacactcaccactccatggccacacaggtaacagtcctttggacagcccccggaatttctctccaaatgcacctgctcacttttcttttgttcctgcccgtaggactgatgggcggcgctggtctttggcctctttgccctcttcaggatatggaactaacactcctagctccactgtctcatcatcatgctcctcacaggaaaagctgcatcagttgcctttccagcctacagctgatgagctgcactttttgacgaagcatttcagcacagagagcgtaccagatgaggaaggacggcagtccccagccatgcggcctcgctcccggagcctcagtcccggacgatccccagtatcctttgacagtgaaataataatgatgaatcatgtttacaaagaaagattcccaaaggccaccgcacaaatggaagagcgactagcagagtttatttcctccaacactccagacagcgtgctgcccttggcagatggagccctgagctttattcatcatcaggtgattgagatggcccgagactgcctggataaatctcggagtggcctcattacatcacaatacttctacgaacttcaagagaatttggagaaacttttacaagatgctcatgagcgctcagagagctcagaagtggcttttgtgatgcagctggtgaaaaagctgatgattatcattgcccgcccagcacgtctcctggaatgcctggagtttgaccctgaagagttctaccaccttttagaagcagctgagggccacgccaaagagggacaagggattaaatgtgacattccccgctacatcgttagccagctgggcctcacccgggatcccctagaagaaatggcccagttgagcagctgtgacagtcctgacactccagagacagatgattctattgagggccatggggcatctctgccatctaaaaagacaccctctgaagaggacttcgagaccattaagctcatcagcaatggcgcctatggggctgtatttctggtgcggcacaagtccacccggcagcgctttgccatgaagaagatcaacaagcagaacctgatcctacggaaccagatccagcaggccttcgtggagcgtgacatactgactttcgctgagaacccctttgtggtcagcatgttctgctcctttgataccaagcgccacttgtgcatggtgatggagtacgttgaagggggagactgtgccactctgctgaagaatattggggccctgcctgtggacatggtgcgtctatactttgcggaaactgtgctggccctggagtacttacacaactatggcatcgtgcaccgtgacctcaagcctgacaacctcctaattacatccatggggcacatcaagctcacggactttggactgtccaaaatgggcctcatgagtctgacaacgaacttgtatgagggtcatattgaaaaggatgcccgggaattcctggacaagcaggtatgcgggaccccagaatacattgcgcctgaggtgatcctgcgccagggctatgggaagccagtggactggtgggccatgggcattatcctgtatgagttcctggtgggctgcgtccctttttttggagatactccggaggagctctttgggcaggtgatcagtgatgagattgtgtggcctgagggtgatgaggcactgcccccagacgcccaggacctcacctccaaactgctccaccagaaccctctggagagacttggcacaggcagtgcctatgaggtgaagcagcacccattctttactggtctggactggacaggacttctccgccagaaggctgaatttattcctcagttggagtcagaggatgatactagctattttgacacccgctcagagcgataccaccacatggactcggaggatgaggaagaagtgagtgaggatggctgccttgagatccgccagttctcttcctgctctccaaggttcaacaaggtgtacagcagcatggagcggctctcactgctcgaggagcgccggacaccacccccgaccaagcgcagcctgagtgaggagaaggaggaccattcagatggcctggcagggctcaaaggccgagaccggagctgggtgattggctcccctgagatattacggaagcggctgtcggtgtctgagtcgtcccacacagagagtgactcaagccctccaatgacagtgcgacgccgctgctcaggcctcctggatgcgcctcggttcccggagggccctgaggaggccagcagcaccctcaggaggcaaccacaggagggtatatgggtcctgacacccccatctggagagggggtatctgggcctgtcactgaacactcaggggagcagcggccaaagctggatgaggaagctgttggccggagcagtggttccagtccagctatggagacccgaggccgtgggacctcacagctggctgagggagccacagccaaggccatcagtgacctggctgtgcgtagggcccgccaccggctgctctctggggactcaacagagaagcgcactgctcgccctgtcaacaaagtgatcaagtccgcctcagccacagccctctcactcctcattccttcggaacaccacacctgctccccgttggccagccccatgtccccacattctcagtcgtccaacccatcatcccgggactcttctccaagcagggacttcttgccagcccttggcagcatgaggcctcccatcatcatccaccgagctggcaagaagtatggcttcaccctgcgggccattcgcgtctacatgggtgactccgatgtctacaccgtgcaccatatggtgtggcacgtggaggatggaggtccggccagtgaggcagggcttcgtcaaggtgacctcatcacccatgtcaatggggaacctgtgcatggcctggtgcacacggaggtggtggagctgatcctgaagagtggaaacaaggtggccatttcaacaactcccctggagaacacatccattaaagtggggccagctcggaagggcagctacaaggccaagatggcccgaaggagcaagaggagccgcggcaaggatgggcaagaaagcagaaaaaggagctccctgttccgcaagatcaccaagcaagcatccctgctccacaccagccgcagcctttcttcccttaaccgctccttgtcatcaggggagagtgggccaggctctcccacacacagccacagcctttccccccgatctcccactcaaggctaccgggtgacccccgatgctgtgcattcaggcaactctcacggcccaagagtgcggagccaccccgttcaccactactcaagagggtgcagtcggctgagaaactggcagcagcacttgccgcctctgagaagaagctagccacttctcgcaagcacagccttgacctgccccactctgaactaaagaaggaactgccgcccagggaagtgagccctctggaggtagttggagccaggagtgtgctgtctggcaagggggccctgccagggaagggggtgctgcagcctgctccctcacgggccctaggcaccctccggcaggaccgagccgaacgacgggagtcgctgcagaagcaagaagccattcgtgaggtggactcctcagaggacgacaccgaggaagggcctgagaacagccagggtgcacaggagctgagcttggcacctcacccagaagtgagccagagtgtggcccctaaaggagcaggagagagtggggaagaggatcctttcccgtccagagaccctaggagcctgggcccaatggtcccaagcctattgacagggatcacactggggcctcccagaatggaaagtcccagtggtccccacaggaggctcgggagcccacaagccattgaggaggctgccagctcctcctcagcaggccccaacctaggtcagtctggagccacagaccccatccctcctgaaggttgctggaaggcccagcacctccacacccaggcactaacagcactttctcccagcacttcgggactcacccccaccagcagttgctctcctcccagctccacctctgggaagctgagcatgtggtcctggaaatcccttattgagggcccagacagggcatccccaagcagaaaggcaaccatggcaggtgggctagccaacctccaggatttggaaaacacaactccagcccagcctaagaacctgtctcccagggagcaggggaagacacagccacctagtgcccccagactggcccatccatcttatgaggatcccagccagggctggctatgggagtctgagtgtgcacaagcagtgaaagaggatccagccctgagcatcacccaagtgcctgatgcctcaggtgacagaaggcaggacgttccatgccgaggctgccccctcacccagaagtctgagcccagcctcaggaggggccaagaaccagggggccatcaaaagcatcgggatttggcattggttccagatgagcttttaaagcaaacatagcagttgtttgccatttcttgcactcagacctgtgtaatatatgctcctggaaacca

SEQ ID NO: 326133 - DNA, 5765 bp, Homo sapiens
taggcaggcggctgagccggcggcgggtggcctgcccaacgtgtgctgggtgggagaaggcgaggcggcagcgatgctgtctcttccgtgaggagcgcagaggaggtcgcggcgccggaggccccagaaggctcgaaggcgccgcgggctggggtcggtggcttagggagcccgtccggccatggtggccgcgggtggtggttggcgcggctgcgctgcggcccggggcagtgcggagccgggacagtcgcggcgctgacgcccgcgggccccagctgcagatatgaagcggagccgctgccgcgaccgaccgcagccgccgccgcccgaccgccgggaggatggagttcagcgggcagcggagctgtctcagtctttgccgccgcgccggcgagcgccgcccgggaggcagcggctggaggagcggacgggccccgcggggcccgagggcaaggagcaggatgtagtaactggagttagtcccctgctcttcaggaaactcagtaatcctgacatattttcatccactggaaaagttaaacttcagcgacaactgagtcaggatgattgtaagttatggagaggaaacctggccagctctctatcgggtaagcagctgctccctttgtccagcagtgtacatagcagtgtgggacaggtgacttggcagtcgtcaggagaagcatcaaacctggttcgaatgagaaaccagtcccttggacagtctgcaccttctcttactgctggcctgaaggagttgagccttccaagaagaggcagcttttgtcggacaagtaaccgcaagagcttgattgtgacctctagcacatcacctacactaccacggccacactcaccactccatggccacacaggtaacagtcctttggacagcccccggaatttctctccaaatgcacctgctcacttttcttttgttcctgcccgtaggactgatgggcggcgctggtctttggcctctttgccctcttcaggatatggaactaacactcctagctccactgtctcatcatcatgctcctcacaggaaaagctgcatcagttgcctttccagcctacagctgatgagctgcactttttgacgaagcatttcagcacagagagcgtaccagatgaggaaggacggcagtccccagccatgcggcctcgctcccggagcctcagtcccggacgatccccagtatcctttgacagtgaaataataatgatgaatcatgtttacaaagaaagattcccaaaggccaccgcacaaatggaagagcgactagcagagtttatttcctccaacactccagacagcgtgctgcccttggcagatggagccctgagctttattcatcatcaggtgattgagatggcccgagactgcctggataaatctcggagtggcctcattacatcacaatacttctacgaacttcaagagaatttggagaaacttttacaagatgctcatgagcgctcagagagctcagaagtggcttttgtgatgcagctggtgaaaaagctgatgattatcattgcccgcccagcacgtctcctggaatgcctggagtttgaccctgaagagttctaccaccttttagaagcagctgagggccacgccaaagagggacaagggattaaatgtgacattccccgctacatcgttagccagctgggcctcacccgggatcccctagaagaaatggcccagttgagcagctgtgacagtcctgacactccagagacagatgattctattgagggccatggggcatctctgccatctaaaaagacaccctctgaagaggacttcgagaccattaagctcatcagcaatggcgcctatggggctgtatttctggtgcggcacaagtccacccggcagcgctttgccatgaagaagatcaacaagcagaacctgatcctacggaaccagatccagcaggccttcgtggagcgtgacatactgactttcgctgagaacccctttgtggtcagcatgttctgctcctttgataccaagcgccacttgtgcatggtgatggagtacgttgaagggggagactgtgccactctgctgaagaatattggggccctgcctgtggacatggtgcgtctatactttgcggaaactgtgctggccctggagtacttacacaactatggcatcgtgcaccgtgacctcaagcctgacaacctcctaattacatccatggggcacatcaagctcacggactttggactgtccaaaatgggcctcatgagtctgacaacgaacttgtatgagggtcatattgaaaaggatgcccgggaattcctggacaagcaggtatgcgggaccccagaatacattgcgcctgaggtgatcctgcgccagggctatgggaagccagtggactggtgggccatgggcattatcctgtatgagttcctggtgggctgcgtccctttttttggagatactccggaggagctctttgggcaggtgatcagtgatgagattgtgtggcctgagggtgatgaggcactgcccccagacgcccaggacctcacctccaaactgctccaccagaaccctctggagagacttggcacaggcagtgcctatgaggtgaagcagcacccattctttactggtctggactggacaggacttctccgccagaaggctgaatttattcctcagttggagtcagaggatgatactagctattttgacacccgctcagagcgataccaccacatggactcggaggatgaggaagaagtgagtgaggatggctgccttgagatccgccagttctcttcctgctctccaaggttcaacaaggtgtacagcagcatggagcggctctcactgctcgaggagcgccggacaccacccccgaccaagcgcagcctgagtgaggagaaggaggaccattcagatggcctggcagggctcaaaggccgagaccggagctgggtgattggctcccctgagatattacggaagcggctgtcggtgtctgagtcgtcccacacagagagtgactcaagccctccaatgacagtgcgacgccgctgctcaggcctcctggatgcgcctcggttcccggagggccctgaggaggccagcagcaccctcaggaggcaaccacaggagggtatatgggtcctgacacccccatctggagagggggtatctgggcctgtcactgaacactcaggggagcagcggccaaagctggatgaggaagctgttggccggagcagtggttccagtccagctatggagacccgaggccgtgggacctcacagctggctgagggagccacagccaaggccatcagtgacctggctgtgcgtagggcccgccaccggctgctctctggggactcaacagagaagcgcactgctcgccctgtcaacaaagtgatcaagtccgcctcagccacagccctctcactcctcattccttcggaacaccacacctgctccccgttggccagccccatgtccccacattctcagtcgtccaacccatcatcccgggactcttctccaagcagggacttcttgccagcccttggcagcatgaggcctcccatcatcatccaccgagctggcaagaagtatggcttcaccctgcgggccattcgcgtctacatgggtgactccgatgtctacaccgtgcaccatatggtgtggcacgtggaggatggaggtccggccagtgaggcagggcttcgtcaaggtgacctcatcacccatgtcaatggggaacctgtgcatggcctggtgcacacggaggtggtggagctgatcctgaagagtggaaacaaggtggccatttcaacaactcccctggagaacacatccattaaagtggggccagctcggaagggcagctacaaggccaagatggcccgaaggagcaagaggagccgcggcaaggatgggcaagaaagcagaaaaaggagctccctgttccgcaagatcaccaagcaagcatccctgctccacaccagccgcagcctttcttcccttaaccgctccttgtcatcaggggagagtgggccaggctctcccacacacagccacagcctttccccccgatctcccactcaaggctaccgggtgacccccgatgctgtgcattcagtgggagggaattcatcacagagcagctcccccagctccagcgtgcccagttccccagccggctctgggcacacacggcccagctccctccacggtctggcacccaagctccaacgccagtaccgctctccacggcgcaagtcagcaggcagcatcccactgtcaccactggcccacaccccttctcccccacccccaacagcttcacctcagcggtccccatcgcccctgtctggccatgtagcccaggcctttcccacaaagcttcacttgtcacctcccctgggcaggcaactctcacggcccaagagtgcggagccaccccgttcaccactactcaagagggtgcagtcggctgagaaactggcagcagcacttgccgcctctgagaagaagctagccacttctcgcaagcacagccttgacctgccccactctgaactaaagaaggaactgccgcccagggaagtgagccctctggaggtagttggagccaggagtgtgctgtctggcaagggggccctgccagggaagggggtgctgcagcctgctccctcacgggccctaggcaccctccggcaggaccgagccgaacgacgggagtcgctgcagaagcaagaagccattcgtgaggtggactcctcagaggacgacaccgaggaagggcctgagaacagccagggtgcacaggagctgagcttggcacctcacccagaagtgagccagagtgtggcccctaaaggagcaggagagagtggggaagaggatcctttcccgtccagagaccctaggagcctgggcccaatggtcccaagcctattgacagggatcacactggggcctcccagaatggaaagtcccagtggtccccacaggaggctcgggagcccacaagccattgaggaggctgccagctcctcctcagcaggccccaacctaggtcagtctggagccacagaccccatccctcctgaaggttgctggaaggcccagcacctccacacccaggcactaacagcactttctcccagcacttcgggactcacccccaccagcagttgctctcctcccagctccacctctgggaagctgagcatgtggtcctggaaatcccttattgagggcccagacagggcatccccaagcagaaaggcaaccatggcaggtgggctagccaacctccaggatttggaaaacacaactccagcccagcctaagaacctgtctcccagggagcaggggaagacacagccacctagtgcccccagactggcccatccatcttatgaggatcccagccagggctggctatgggagtctgagtgtgcacaagcagtgaaagaggatccagccctgagcatcacccaagtgcctgatgcctcaggtgacagaaggcaggacgttccatgccgaggctgccccctcacccagaagtctgagcccagcctcaggaggggccaagaaccagggggccatcaaaagcatcgggatttggcattggttccagatgagcttttaaagcaaacatagcagttgtttgccatttcttgcactcagacctgtgtaatatatgctcctggaaaccaaaaaaagtcgacggcggccgcaattttag

SEQ ID NO: 326134 - DNA, 2771 bp, Homo sapiens
taggcaggcggctgagccggcggcgggtggcctgcccaacgtgtgctgggtgggagaaggcgaggcggcagcgatgctgtctcttccgtgaggagcgcagaggaggtcgcggcgccggaggccccagaaggctcgaaggcgccgcgggctggggtcggtggcttagggagcccgtccggccatggtggccgcgggtggtggttggcgcggctgcgctgcggcccggggcagtgcggagccgggacagtcgcggcgctgacgcccgcgggccccagctgcagatatgaagcggagccgctgccgcgaccgaccgcagccgccgccgcccgaccgccgggaggatggagttcagcgggcagcggagctgtctcagtctttgccgccgcgccggcgagcgccgcccgggaggcagcggctggaggagcggacgggccccgcggggcccgagggcaaggagcaggatgtagtaactggagttagtcccctgctcttcaggaaactcagtaatcctgacatattttcatccactggaaaagttaaacttcagcgacaactgagtcaggatgattgtaagttatggagaggaaacctggccagctctctatcgggtaagcagctgctccctttgtccagcagtgtacatagcagtgtgggacaggtgacttggcagtcgtcaggagaagcatcaaacctggttcgaatgagaaaccagtcccttggacagtctgcaccttctcttactgctggcctgaaggagttgagccttccaagaagaggcagcttttgtcggacaagtaaccgcaagagcttgattgtgacctctagcacatcacctacactaccacggccacactcaccactccatggccacacaggtaacagtcctttggacagcccccggaatttctctccaaatgcacctgctcacttttcttttgttcctgcccgtaggactgatgggcggcgctggtctttggcctctttgccctcttcaggatatggaactaacactcctagctccactgtctcatcatcatgctcctcacaggaaaagctgcatcagttgcctttccagcctacagctgatgagctgcactttttgacgaagcatttcagcacagagagcgtaccagatgaggaaggacggcagtccccagccatgcggcctcgctcccggagcctcagtcccggacgatccccagtatcctttgacagtgaaataataatgatgaatcatgtttacaaagaaagattcccaaaggctcatgagcgctcagagagctcagaagtggcttttgtgatgcagctggtgaaaaagctgatgattatcattgcccgcccagcacgtctcctggaatgcctggagtttgaccctgaagagttctaccaccttttagaagcagctgagggccacgccaaagagggacaagggattaaatgtgacattccccgctacatcgttagccagctgggcctcacccgggatcccctagaagaaatggcccagttgagcagctgtgacagtcctgacactccagagacagatgattctattgagggccatggggcatctctgccatctaaaaagacaccctctgaagaggacttcgagaccattaagctcatcagcaatggcgcctatggggctgtatttctggtgcggcacaagtccacccggcagcgctttgccatgaagaagatcaacaagcagaacctgatcctacggaaccagatccagcaggccttcgtggagcgtgacatactgactttcgctgagaacccctttgtggtcagcatgttctgctcctttgataccaagcgccacttgtgcatggtgatggagtacgttgaaggtactgaggcaaaggtggcctggcatggaggccaaggcacagtctgagacttagccttaaacagggaccagcagctttgtacagaggtgaagtttcagggcccagctttccagtccacctttggcattggtttctgcctcaggatcacagagaccatttggccacagtgggcacaaagctccctgcctctaccatgagaggcattctgggataggatgtagcaggccagcagctatagaatcttgcaccccaaagcctgcacgctctctactgctggtatcagacagcaacagaggaggcagcagagctacaaaagcccaggattaggtgctaggaggtttgcatctggaccctcagaagaaaggaaagccattaattaccctgactggcttgcaaaggggacaccccttaaaaccaagcaaaatgctctgagaatagaacagaagagcaacatggggcatagttctggagggaggcagcagctttgccagtttcccttccctctcaccttctcactgtgtgtacagcctccaaagatactgtgcctagtcttgaagctgaagctgaacaaaactgtcctttagtgtttactgggtacatgctgggagttcatagtgttactttactcagaaactaaaagccagtaagaaggaagtaacatgaacagatgttaacatctcagccagatgtgtttacagtatgcagtattcctgtcctaaaaaacattaggctggtacaaaagtaattgcatgtttgccattacttttaataaaggcctgggttccttccctctctggcctgaaaaatgtccatgacagctattagcagattcactttactttccacccccctccataccctgtgtattttcatgctgctaataaaggcataccagagactgggcaatttacaaaagaa

SEQ ID NO: 326135 - DNA, 178 bp, Homo sapiens
atagcaggaccctgtgtctacaaaaattacaaaagtaaatctcacgtggtggtgcacatttgtggtcttagctgcttgagaggctcccttgagcccaggagtttaaggctgcagtgaggtatgattgagcccctgcattccagcttgggcaacagagcaaggccctgctctttaaaaa

SEQ ID NO: 326136 - DNA, 713 bp, Homo sapiens
tttctcccacctgtaaagtggggatgacaatactctccacctacctacctcacaggggtgttgtggggattcatgtggtaacattcgtacggcgctttaaacctcttagaagtggtgcgacataaacacagcattttattctttattgcacttcatgcatgtgaagatttgagggcaaaggaattccatatccaggcaaccaccaccacagtcacctgcaaaagctgagcagatgaaatacacacaaaggtacacttaggactttgtcatgattcctttctgtaatcttggctgaatcaaaatcttttgttcaaagaacattggaaatgtttttacaaattatcgacagctacaaacagtcttcaattctaccatgtatttgcagaaaagtggttctttcattgcctgaactcaccctggcatgttctgtgttgactccagagtgttacgttgcctatgtttgatttatttgagaagaataaatctcaggtatatggcaggtttcatagagttgaagggaaagtatttcattgatttttataagcagaagcctgccaacttgtaatgtctttttgaaaacaaaccttgcaaagatgtattgaaaagatgaagtagcaagaggatacttgtatcaaagcactctgtgcagtgttagactatatgcagttttattaatgcaacttttctggtgttttcagccactgcccagtgag

SEQ ID NO: 326137 - DNA, 718 bp, Homo sapiens
caacaaaatcacaatctgtctcgattactcatttattcaacccgcattcacctactgtgtgcacgagcttttctagggcactggggaggcagaagggactaaaacaaagtataaatctccctgggctgcaagcctcgggagggcaggtccgggggctctgtgtccccactgggcccccagcactgcgcagcgcacacagtgggcgctcaccaagcgctcgctaagggcaacgcgtgaatccgtgtcccgccagcagggcgtttacggcctggtggggcggaaacggacccgacaccaccgcggcgtcctggggcttctgggaatcccatcagcgcggccagagcggccggggacaggctccgaggcaggcccgacccgcctccccggcgccgccgtggctcgacggagaccagctagggtgagtgatcgagccacgcctggggtcccggcctgtcaccccgaagtccccgccgccttccaccctgtcaggctccaactctgggctccggcgcggtcccacctccggggggaactcccctccatcccctccatttccttcatcctcgactcccgctatcttttcggacctgcggcgctccccctggacgcgtcctcccgccggacgaccgtcctccgcctcaggggacgcgcccaggacgcacggcgccccctccccagccggaccggcggtctgggagcgcggatcccttcagctccc

SEQ ID NO: 326138 - DNA, 6276 bp, Homo sapiens
ctcgtagctccactctgcagcctcaaactcctgggctccagtgatcctctcacctcagcctcccaagtagctaagaccacaggcacatgctgccacccctgactaatttttcttttttaaaatttttttctcactgcgttgcccaggctggtctcaaactctttggctcaagccatccatcctcctacctcagcctcccaaagtgctgagattacaagcgtgaaccaccatgccaggagggaatgttctttcttgaacgtggctgccctgtcacctcagcattctttgcggcagctgtggcctaagcgtagccccttgctaacctcagctctttccttcccacctttcctggcctgcagctccatgtgcaagaagcttccggcaaccacctgaacccagagcccaaccagccggcccccagtgtggacctagacttcctggaagatgacatcctgggctctcctgcgacagggggcggcggcgggggcagtgggggcgctgaccagccctgtgacatcctccagcagagcctccaagaggccaacatcacggagcagacgctggaggccgaggctgagctggacctgggtcccttccagctgcccaccctgcagcctgcggatggcggggcaggcccgacgggcgctggaggggcagcggccgtggctgcggggccccaagccctcttcccaggcagcaccgacctgctggggctgcagggcccgcccaccgtgctgacccaccaggccctggtgccgccccaggacgtggtcaacaaggccctgagtgtgcagcccttcctgcagcctgtgggcctgggcaatgtgacactgcagcccatcccgggcctccaaggcctgcccaatggcagccctgggggtgccacggcggccacgctgggcctggcgcccatccaggtggtgggccagcccgtcatggcgctcaacacgcccacctcccagctcctggccaagcaggtgcccgtcagcggctacctggcctcggcggctggcccctcggagcccgtgacgctggcgtcggccggtgtctcgccacagggggctggcctggtcatccagaagaacctctcggccgctgtggccaccacgctcaatgggaactctgtgttcggaggcgcgggggccgcctcggctcccaccgggacgccctcgggacagccgctggcggtggccccaggcctcggctcgtcgccactggtcccggcgcccaacgtgatcctgcatcgcacacccacgcccatccagcccaagcccgcgggggtgctgccgcccaagctctaccagctgacgcccaagccgtttgcgcccgcgggcgccacgctcaccatccagggcgagccgggggcgctcccgcagcagcccaaggccccgcagaacctgacgttcatggcggcggggaaggcgggccagaacgtggtgctgtcgggcttccccgcgcctgcgctgcaagcgaacgtcttcaagcagccaccggccaccaccaccggagcggccccgccgcagccccccggggccctgagcaaacccatgagcgtccacctcctgaaccaaggcagcagcatcgtcatccccgcccagcacatgctgccgggccagaaccagttcctactgcctggcgccccggcggtccagctcccgcagcagctctcagccctgccggccaacgtgggcgggcagatcctggcggccgctgccccccacacaggtggacagctcatcgcgaaccccatcctcacaaaccagaacctggcgggcccactgagcctgggccccgtgttggccccccactccggggcccacagcgcgcacatcctctccgccgctcccatccaggtgggccagcctgcgctcttccagatgcccgtgtcgctggcggcgggcagcctgcccacgcagagccagccagcgcccgccgggccggccgccaccactgtcctccagggggtcaccctgccccccagcgccgtggccatgctcaacacccccgacggcctggtgcagccggccacccctgccgctgccaccggggaggccgcgcctgtcctcacggtgcagcctgccccccaggcgccccccgcggtcagcacacccctgcccctgggcctccagcagccgcaggcgcagcagcccccgcaggcccccaccccacaggccgccgccccgcctcaggccaccaccccccagcccagccctggcctggcgtctagcccggagaagatcgtcctggggcagccgccctctgccacccccacggccatcctcactcaggactccctgcagatgttcctgccccaggagaggagccagcagcccctctccgcagagggcccccacctctccgtgcctgcctcggtcatagtcagcgccccgcctcccgcccaagacccagccccagccacccccgtcgccaaaggagctggcctcggccctcaggcccccgacagccaggcttccccggctccggccccccagatcccggcagcggctccgctgaagggcccaggcccctcttcgtccccgtcactacctcaccaggcccctctgggggacagcccccacctgccctccccacaccccacccggcccccttcccgcccaccctcccggccacagagtgtgtcccgccctccctcagagccacccttgcacccttgccccccaccccaggcccccccaactctgcctggcatctttgtcatccaaaaccagctaggcgttcccccgcctgccagcaacccggcccctactgccccaggcccgccgcagccgcctctccgcccccagtcccagccgcctgagggaccgctgcccccagccccccacctccctccatcctccacctcctctgctgtggcctcctcctctgagacgtcctccaggttgccagcccctacgccatccgacttccagctccagttcccacccagccaggggccccacaagtcccccactccccctccaaccctccacctggtccctgagccggcagcaccccccccaccgcctcctcggaccttccagatggtgaccacccccttcccagcgctgccccagccgaaggctcttctcgagagatttcaccaggtgccgtccggaatcatcctccagaacaaggctgggggggcccctgccgccccgcagacctccaccagcctggggcccctcaccagccccgctgcgtctgtgctggtcagtgggcaggccccatctgggacccccactgcccccagccacgcccccgccccggcacccatggccgccacaggcctccctcctctgcttccagccgagaacaaggcttttgccagcaacctcccgaccctgaatgtggccaaggccgcttcctccgggccagggaagccctccgggctgcagtatgagagcaaactgagtggcctgaagaagccccccacgcttcagcccagcaaggaagcctgtttcctggagcatttgcacaaacaccagggctccgtcctgcaccccgactacaagacggccttcccctcctttgaggacgccctgcatcgcctcctgccctaccatgtctaccagggcgccctcccctcccccagtgactaccacaaagtggacgaggagtttgagacggtctccacgcagctgctgaaacgcacccaggccatgctcaataaatatcggctcctgctcctggaggagtcccggagggtgagcccctcagcggagatggtaatgatcgaccgaatgttcattcaggaggagaagaccacccttgccttggataaacagctggccaaggagaagccggacgagtacgtgtcttcctcccgctcgctcggcctccccatcgcagcctcttccgagggtcatcggcttcccggccacggccccctgtcgtcttcagctcccggggcctccacccagccccctccacacctgcccaccaagcttgtgatccggcacggcggggcaggcggctccccttcggtcacctgggcccgggcgtcctcctccctgtcctcctcttcctcctcctcctctgccgcctcctccttggacgccgacgaggacggccccatgccctcccgcaaccgcccgcccatcaagacctacgaggcccggagccgcatcgggctcaagctcaagatcaagcaggaagccgggctcagcaaggtcgtgcacaacacggccctggaccccgtgcaccagcccccgccaccccccgctaccctcaaggtggccgagcccccgccacggccgccaccaccaccgccgcccacgggccagatgaacggcacggtggaccacccgccgcctgccgcccccgagcgcaagcccctgggcaccgccccgcactgcccgcgcctgccactgcgcaagacctaccgcgagaacgtggggggccctggcgcgccggaggggacgcccgcaggcagggcacggggaggcagcccggcgccgctgcccgccaaagtggacgaggccaccagcgggctcatccgcgagctggcggccgtggaggacgagctgtaccagcgtatgctgaagggccccccgccagagcccgcagccagcgccgcccaaggcaccggggaccccgactgggaggcgcccgggctgccccctgccaagcggcgcaagtccgagtcgcccgacgtggaccaggccagcttctccagcgacagcccgcaggatgacacgctcaccgagcacctgcagagcgccatcgacagcatcctgaacctgcagcaggcccccggccggacgcccgcgccctcgtacccccacgctgcctcggccggcacccccgcatccccgccgcccctgcacaggcccgaggcctacccaccctccagtcacaacggtggcctcggcgccaggacgttgaccagataacaccgggccgcctccccttccccgtcccctcctcccgaagacgccgggacagtcgggtgtccgccctcagcctcctggggactcgagccggggatcccctgacggtttttcttgcctaagttatttgagtcacaaaggcctccttccctgccgcctgcttcagctgggttgctggggggtgggcgtggatttagggagggggctgtgatgtaaaacgtctcccctgccaaaggaggggcaaagtgctgtgtcagttcctgtttcttcccatttcctggcacactctgcccctctgtccgggggacacgcgcatgtgtttgccagggatggggccaccgggttgatgccaacgctccgggtgcctgtcttgtctgtgtggcttctcagatggtggagggtgctgggagctggcagggtccttccagacagtctcagcctctccccgccgcccccaacaggctgtcaaacaaaaccggagagggggtgggggagccagcctcccagcgtgctgtgcccgcaggcacccgtgtgacatccgcacgtccagctccgtgacctgtgtgtgtgtgtgtgcacaagtgagtgagagatttcgaacgcccacccctcgactttgaaatctgagcaaaacaagaaactggggtcttcctctcccccgaacctctccccagctagtcttccctctgttcttcctgcctccagccgcccgcgccagattttgaaatctcggagacaaaactagtactgtaagataaatttttttgtactgtatttattgtgtataacgatttttttaaaggagaattctgtacatttagaactcttgtaaattaaaaaccgatcctttttttaaaactgtaaaaaaaaaaaaaaaaaaaaaaaaaaaaaaaaggggggggggtaaaaatgttcttcccccagagggggggcccaacgtccagtagccgcagtaccccaggcctttctttggtcaacgaaggggggccccatatagggagaggctcggtataatataacgctaacagcgaccagtcggcccgtcttatacaaaaacgcgtcgtgtagatctgcggagaaaacactggcatacctaggagaactctttgtgggaagaggaacacctttaattatgtgtggcgggggggacaccaactaattggggcacaaactatctaccctctcaacaaaagattttgaaaacgcgccaatagggggaaaatgttttaaaaattttaaaaagggggaatacagttggtgtttaacaacaaaggcgagagtattgtagttgaggagtattggagaaagattagcggggataaaggagagagttgtatgtatggagacaattttttttttcccgggggcatatggtaaataaagagga

SEQ ID NO: 326139 - DNA, 6212 bp, Homo sapiens
ctcggagaccccgcgccgacggctgctcaaacatcaggctggcccccaagaggaccctttccaagtccccagctgggggccctgtgtagacctggagtggacacgcccctccttcccttcatgattcgtttgtagcgcagtggcgatggatgatgaggatgggagatgcttactagacgtgatttgtgacccacaggccctcaatgacttcttgcatggatccgagaagcttgacagtgatgacctcctggataatcccggggaggcccaaagtgccttctatgaaggtcctgggctccatgtgcaagaagcttccggcaaccacctgaacccagagcccaaccagccggcccccagtgtggacctagacttcctggaagatgacatcctgggctctcctgcgacagggggcggcggcgggggcagtgggggcgctgaccagccctgtgacatcctccagcagagcctccaagaggccaacatcacggagcagacgctggaggccgaggctgagctggacctgggtcccttccagctgcccaccctgcagcctgcggatggcggggcaggcccgacgggcgctggaggggcagcggccgtggctgcggggccccaagccctcttcccaggcagcaccgacctgctggggctgcagggcccgcccaccgtgctgacccaccaggccctggtgccgccccaggacgtggtcaacaaggccctgagtgtgcagcccttcctgcagcctgtgggcctgggcaatgtgacactgcagcccatcccgggcctccaaggcctgcccaatggcagccctgggggtgccacggcggccacgctgggcctggcgcccatccaggtggtgggccagcccgtcatggcgctcaacacgcccacctcccagctcctggccaagcaggtgcccgtcagcggctacctggcctcggcggctggcccctcggagcccgtgacgctggcgtcggccggtgtctcgccacagggggctggcctggtcatccagaagaacctctcggccgctgtggccaccacgctcaatgggaactctgtgttcggaggcgcgggggccgcctcggctcccaccgggacgccctcgggacagccgctggcggtggccccaggcctcggctcgtcgccactggtcccggcgcccaacgtgatcctgcatcgcacacccacgcccatccagcccaagcccgcgggggtgctgccgcccaagctctaccagctgacgcccaagccgtttgcgcccgcgggcgccacgctcaccatccagggcgagccgggggcgctcccgcagcagcccaaggccccgcagaacctgacgttcatggcggcggggaaggcgggccagaacgtggtgctgtcgggcttccccgcgcctgcgctgcaagcgaacgtcttcaagcagccaccggccaccaccaccggagcggccccgccgcagccccccggggccctgagcaaacccatgagcgtccacctcctgaaccaaggcagcagcatcgtcatccccgcccagcacatgctgccgggccagaaccagttcctactgcctggcgccccggcggtccagctcccgcagcagctctcagccctgccggccaacgtgggcgggcagatcctggcggccgctgccccccacacaggtggacagctcatcgcgaaccccatcctcacaaaccagaacctggcgggcccactgagcctgggccccgtgttggccccccactccggggcccacagcgcgcacatcctctccgccgctcccatccaggtgggccagcctgcgctcttccagatgcccgtgtcgctggcggcgggcagcctgcccacgcagagccagccagcgcccgccgggccggccgccaccactgtcctccagggggtcaccctgccccccagcgccgtggccatgctcaacacccccgacggcctggtgcagccggccacccctgccgctgccaccggggaggccgcgcctgtcctcacggtgcagcctgccccccaggcgccccccgcggtcagcacacccctgcccctgggcctccagcagccgcaggcgcagcagcccccgcaggcccccaccccacaggccgccgccccgcctcaggccaccaccccccagcccagccctggcctggcgtctagcccggagaagatcgtcctggggcagccgccctctgccacccccacggccatcctcactcaggactccctgcagatgttcctgccccaggagaggagccagcagcccctctccgcagagggcccccacctctccgtgcctgcctcggtcatagtcagcgccccgcctcccgcccaagacccagccccagccacccccgtcgccaaaggagctggcctcggccctcaggcccccgacagccaggcttccccggctccggccccccagatcccggcagcggctccgctgaagggcccaggcccctcttcgtccccgtcactacctcaccaggcccctctgggggacagcccccacctgccctccccacaccccacccggcccccttcccgcccaccctcccggccacagagtgtgtcccgccctccctcagagccacccttgcacccttgccccccaccccaggcccccccaactctgcctggcatctttgtcatccaaaaccagctaggcgttcccccgcctgccagcaacccggcccctactgccccaggcccgccgcagccgcctctccgcccccagtcccagccgcctgagggaccgctgcccccagccccccacctccctccatcctccacctcctctgctgtggcctcctcctctgagacgtcctccaggttgccagcccctacgccatccgacttccagctccagttcccacccagccaggggccccacaagtcccccactccccctccaaccctccacctggtccctgagccggcagcaccccccccaccgcctcctcggaccttccagatggtgaccacccccttcccagcgctgccccagccgaaggctcttctcgagagatttcaccaggtgccgtccggaatcatcctccagaacaaggctgggggggcccctgccgccccgcagacctccaccagcctggggcccctcaccagccccgctgcgtctgtgctggtcagtgggcaggccccatctgggacccccactgcccccagccacgcccccgccccggcacccatggccgccacaggcctccctcctctgcttccagccgagaacaaggcttttgccagcaacctcccgaccctgaatgtggccaaggccgcttcctccgggccagggaagccctccgggctgcagtatgagagcaaactgagtggcctgaagaagccccccacgcttcagcccagcaaggaagcctgtttcctggagcatttgcacaaacaccagggctccgtcctgcaccccgactacaagacggccttcccctcctttgaggacgccctgcatcgcctcctgccctaccatgtctaccagggcgccctcccctcccccagtgactaccacaaagtggacgaggagtttgagacggtctccacgcagctgctgaaacgcacccaggccatgctcaataaatatcggctcctgctcctggaggagtcccggagggtgagcccctcagcggagatggtaatgatcgaccgaatgttcattcaggaggagaagaccacccttgccttggataaacagctggccaaggagaagccggacgagtacgtgtcttcctcccgctcgctcggcctccccatcgcagcctcttccgagggtcatcggcttcccggccacggccccctgtcgtcttcagctcccggggcctccacccagccccctccacacctgcccaccaagcttgtgatccggcacggcggggcaggcggctccccttcggtcacctgggcccgggcgtcctcctccctgtcctcctcttcctcctcctcctctgccgcctcctccttggacgccgacgaggacggccccatgccctcccgcaaccgcccgcccatcaagacctacgaggcccggagccgcatcgggctcaagctcaagatcaagcaggaagccgggctcagcaaggtcgtgcacaacacggccctggaccccgtgcaccagcccccgccaccccccgctaccctcaaggtggccgagcccccgccacggccgccaccaccaccgccgcccacgggccagatgaacggcacggtggaccacccgccgcctgccgcccccgagcgcaagcccctgggcaccgccccgcactgcccgcgcctgccactgcgcaagacctaccgcgagaacgtggggggccctggcgcgccggaggggacgcccgcaggcagggcacggggaggcagcccggcgccgctgcccgccaaagtggacgaggccaccagcgggctcatccgcgagctggcggccgtggaggacgagctgtaccagcgtatgctgaagggccccccgccagagcccgcagccagcgccgcccaaggcaccggggaccccgactgggaggcgcccgggctgccccctgccaagcggcgcaagtccgagtcgcccgacgtggaccaggccagcttctccagcgacagcccgcaggatgacacgctcaccgagcacctgcagagcgccatcgacagcatcctgaacctgcagcaggcccccggccggacgcccgcgccctcgtacccccacgctgcctcggccggcacccccgcatccccgccgcccctgcacaggcccgaggcctacccaccctccagtcacaacggtggcctcggcgccaggacgttgaccagataacaccgggccgcctccccttccccgtcccctcctcccgaagacgccgggacagtcgggtgtccgccctcagcctcctggggactcgagccggggatcccctgacggtttttcttgcctaagttatttgagtcacaaaggcctccttccctgccgcctgcttcagctgggttgctggggggtgggcgtggatttagggagggggctgtgatgtaaaacgtctcccctgccaaaggaggggcaaagtgctgtgtcagttcctgtttcttcccatttcctggcacactctgcccctctgtccgggggacacgcgcatgtgtttgccagggatggggccaccgggttgatgccaacgctccgggtgcctgtcttgtctgtgtggcttctcagatggtggagggtgctgggagctggcagggtccttccagacagtctcagcctctccccgccgcccccaacaggctgtcaaacaaaaccggagagggggtgggggagccagcctcccagcgtgctgtgcccgcaggcacccgtgtgacatccgcacgtccagctccgtgacctgtgtgtgtgtgtgtgcacaagtgagtgagagatttcgaacgcccacccctcgactttgaaatctgagcaaaacaagaaactggggtcttcctctcccccgaacctctccccagctagtcttccctctgttcttcctgcctccagccgcccgcgccagattttgaaatctcggagacaaaactagtactgtaagataaatttttttgtactgtatttattgtgtataacgatttttttaaaggagaattctgtacatttagaactcttgtaaattaaaaaccgatcctttttttaaaactgtaaaaaaaaaaaaaaaaaaaaaaaaaaaaaaaaggggggggggtaaaaatgttcttcccccagagggggggcccaacgtccagtagccgcagtaccccaggcctttctttggtcaacgaaggggggccccatatagggagaggctcggtataatataacgctaacagcgaccagtcggcccgtcttatacaaaaacgcgtcgtgtagatctgcggagaaaacactggcatacctaggagaactctttgtgggaagaggaacacctttaattatgtgtggcgggggggacaccaactaattggggcacaaactatctaccctctcaacaaaagattttgaaaacgcgccaatagggggaaaatgttttaaaaattttaaaaagggggaatacagttggtgtttaacaacaaaggcgagagtattgtagttgaggagtattggagaaagattagcggggataaaggagagagttgtatgtatggagacaattttttttttcccgggggcatatggtaaataaagagga

SEQ ID NO: 326140 - DNA, 6592 bp, Homo sapiens
caacaaaatcacaatctgtctcgattactcatttattcaacccgcattcacctactgtgtgcacgagcttttctagggcactggggaggcagaagggactaaaacaaagtataaatctccctgggctgcaagcctcgggagggcaggtccgggggctctgtgtccccactgggcccccagcactgcgcagcgcacacagtgggcgctcaccaagcgctcgctaagggcaacgcgtgaatccgtgtcccgccagcagggcgtttacggcctggtggggcggaaacggacccgacaccaccgcggcgtcctggggcttctgggaatcccatcagcgcggccagagcggccggggacaggctccgaggcaggcccgacccgcctccccggcgccgccgtggctcgacggagaccagctaggctggcccccaagaggaccctttccaagtccccagctgggggccctgtgtagacctggagtggacacgcccctccttcccttcatgattcgtttgtagcgcagtggcgatggatgatgaggatgggagatgcttactagacgtgatttgtgacccacaggccctcaatgacttcttgcatggatccgagaagcttgacagtgatgacctcctggataatcccggggaggcccaaagtgccttctatgaaggtcctgggctccatgtgcaagaagcttccggcaaccacctgaacccagagcccaaccagccggcccccagtgtggacctagacttcctggaagatgacatcctgggctctcctgcgacagggggcggcggcgggggcagtgggggcgctgaccagccctgtgacatcctccagcagagcctccaagaggccaacatcacggagcagacgctggaggccgaggctgagctggacctgggtcccttccagctgcccaccctgcagcctgcggatggcggggcaggcccgacgggcgctggaggggcagcggccgtggctgcggggccccaagccctcttcccaggcagcaccgacctgctggggctgcagggcccgcccaccgtgctgacccaccaggccctggtgccgccccaggacgtggtcaacaaggccctgagtgtgcagcccttcctgcagcctgtgggcctgggcaatgtgacactgcagcccatcccgggcctccaaggcctgcccaatggcagccctgggggtgccacggcggccacgctgggcctggcgcccatccaggtggtgggccagcccgtcatggcgctcaacacgcccacctcccagctcctggccaagcaggtgcccgtcagcggctacctggcctcggcggctggcccctcggagcccgtgacgctggcgtcggccggtgtctcgccacagggggctggcctggtcatccagaagaacctctcggccgctgtggccaccacgctcaatgggaactctgtgttcggaggcgcgggggccgcctcggctcccaccgggacgccctcgggacagccgctggcggtggccccaggcctcggctcgtcgccactggtcccggcgcccaacgtgatcctgcatcgcacacccacgcccatccagcccaagcccgcgggggtgctgccgcccaagctctaccagctgacgcccaagccgtttgcgcccgcgggcgccacgctcaccatccagggcgagccgggggcgctcccgcagcagcccaaggccccgcagaacctgacgttcatggcggcggggaaggcgggccagaacgtggtgctgtcgggcttccccgcgcctgcgctgcaagcgaacgtcttcaagcagccaccggccaccaccaccggagcggccccgccgcagccccccggggccctgagcaaacccatgagcgtccacctcctgaaccaaggcagcagcatcgtcatccccgcccagcacatgctgccgggccagaaccagttcctactgcctggcgccccggcggtccagctcccgcagcagctctcagccctgccggccaacgtgggcgggcagatcctggcggccgctgccccccacacaggtggacagctcatcgcgaaccccatcctcacaaaccagaacctggcgggcccactgagcctgggccccgtgttggccccccactccggggcccacagcgcgcacatcctctccgccgctcccatccaggtgggccagcctgcgctcttccagatgcccgtgtcgctggcggcgggcagcctgcccacgcagagccagccagcgcccgccgggccggccgccaccactgtcctccagggggtcaccctgccccccagcgccgtggccatgctcaacacccccgacggcctggtgcagccggccacccctgccgctgccaccggggaggccgcgcctgtcctcacggtgcagcctgccccccaggcgccccccgcggtcagcacacccctgcccctgggcctccagcagccgcaggcgcagcagcccccgcaggcccccaccccacaggccgccgccccgcctcaggccaccaccccccagcccagccctggcctggcgtctagcccggagaagatcgtcctggggcagccgccctctgccacccccacggccatcctcactcaggactccctgcagatgttcctgccccaggagaggagccagcagcccctctccgcagagggcccccacctctccgtgcctgcctcggtcatagtcagcgccccgcctcccgcccaagacccagccccagccacccccgtcgccaaaggagctggcctcggccctcaggcccccgacagccaggcttccccggctccggccccccagatcccggcagcggctccgctgaagggcccaggcccctcttcgtccccgtcactacctcaccaggcccctctgggggacagcccccacctgccctccccacaccccacccggcccccttcccgcccaccctcccggccacagagtgtgtcccgccctccctcagagccacccttgcacccttgccccccaccccaggcccccccaactctgcctggcatctttgtcatccaaaaccagctaggcgttcccccgcctgccagcaacccggcccctactgccccaggcccgccgcagccgcctctccgcccccagtcccagccgcctgagggaccgctgcccccagccccccacctccctccatcctccacctcctctgctgtggcctcctcctctgagacgtcctccaggttgccagcccctacgccatccgacttccagctccagttcccacccagccaggggccccacaagtcccccactccccctccaaccctccacctggtccctgagccggcagcaccccccccaccgcctcctcggaccttccagatggtgaccacccccttcccagcgctgccccagccgaaggctcttctcgagagatttcaccaggtgccgtccggaatcatcctccagaacaaggctgggggggcccctgccgccccgcagacctccaccagcctggggcccctcaccagccccgctgcgtctgtgctggtcagtgggcaggccccatctgggacccccactgcccccagccacgcccccgccccggcacccatggccgccacaggcctccctcctctgcttccagccgagaacaaggcttttgccagcaacctcccgaccctgaatgtggccaaggccgcttcctccgggccagggaagccctccgggctgcagtatgagagcaaactgagtggcctgaagaagccccccacgcttcagcccagcaaggaagcctgtttcctggagcatttgcacaaacaccagggctccgtcctgcaccccgactacaagacggccttcccctcctttgaggacgccctgcatcgcctcctgccctaccatgtctaccagggcgccctcccctcccccagtgactaccacaaagtggacgaggagtttgagacggtctccacgcagctgctgaaacgcacccaggccatgctcaataaatatcggctcctgctcctggaggagtcccggagggtgagcccctcagcggagatggtaatgatcgaccgaatgttcattcaggaggagaagaccacccttgccttggataaacagctggccaaggagaagccggacgagtacgtgtcttcctcccgctcgctcggcctccccatcgcagcctcttccgagggtcatcggcttcccggccacggccccctgtcgtcttcagctcccggggcctccacccagccccctccacacctgcccaccaagcttgtgatccggcacggcggggcaggcggctccccttcggtcacctgggcccgggcgtcctcctccctgtcctcctcttcctcctcctcctctgccgcctcctccttggacgccgacgaggacggccccatgccctcccgcaaccgcccgcccatcaagacctacgaggcccggagccgcatcgggctcaagctcaagatcaagcaggaagccgggctcagcaaggtcgtgcacaacacggccctggaccccgtgcaccagcccccgccaccccccgctaccctcaaggtggccgagcccccgccacggccgccaccaccaccgccgcccacgggccagatgaacggcacggtggaccacccgccgcctgccgcccccgagcgcaagcccctgggcaccgccccgcactgcccgcgcctgccactgcgcaagacctaccgcgagaacgtggggggccctggcgcgccggaggggacgcccgcaggcagggcacggggaggcagcccggcgccgctgcccgccaaagtggacgaggccaccagcgggctcatccgcgagctggcggccgtggaggacgagctgtaccagcgtatgctgaagggccccccgccagagcccgcagccagcgccgcccaaggcaccggggaccccgactgggaggcgcccgggctgccccctgccaagcggcgcaagtccgagtcgcccgacgtggaccaggccagcttctccagcgacagcccgcaggatgacacgctcaccgagcacctgcagagcgccatcgacagcatcctgaacctgcagcaggcccccggccggacgcccgcgccctcgtacccccacgctgcctcggccggcacccccgcatccccgccgcccctgcacaggcccgaggcctacccaccctccagtcacaacggtggcctcggcgccaggacgttgaccagataacaccgggccgcctccccttccccgtcccctcctcccgaagacgccgggacagtcgggtgtccgccctcagcctcctggggactcgagccggggatcccctgacggtttttcttgcctaagttatttgagtcacaaaggcctccttccctgccgcctgcttcagctgggttgctggggggtgggcgtggatttagggagggggctgtgatgtaaaacgtctcccctgccaaaggaggggcaaagtgctgtgtcagttcctgtttcttcccatttcctggcacactctgcccctctgtccgggggacacgcgcatgtgtttgccagggatggggccaccgggttgatgccaacgctccgggtgcctgtcttgtctgtgtggcttctcagatggtggagggtgctgggagctggcagggtccttccagacagtctcagcctctccccgccgcccccaacaggctgtcaaacaaaaccggagagggggtgggggagccagcctcccagcgtgctgtgcccgcaggcacccgtgtgacatccgcacgtccagctccgtgacctgtgtgtgtgtgtgtgcacaagtgagtgagagatttcgaacgcccacccctcgactttgaaatctgagcaaaacaagaaactggggtcttcctctcccccgaacctctccccagctagtcttccctctgttcttcctgcctccagccgcccgcgccagattttgaaatctcggagacaaaactagtactgtaagataaatttttttgtactgtatttattgtgtataacgatttttttaaaggagaattctgtacatttagaactcttgtaaattaaaaaccgatcctttttttaaaactgtaaaaaaaaaaaaaaaaaaaaaaaaaaaaaaaaggggggggggtaaaaatgttcttcccccagagggggggcccaacgtccagtagccgcagtaccccaggcctttctttggtcaacgaaggggggccccatatagggagaggctcggtataatataacgctaacagcgaccagtcggcccgtcttatacaaaaacgcgtcgtgtagatctgcggagaaaacactggcatacctaggagaactctttgtgggaagaggaacacctttaattatgtgtggcgggggggacaccaactaattggggcacaaactatctaccctctcaacaaaagattttgaaaacgcgccaatagggggaaaatgttttaaaaattttaaaaagggggaatacagttggtgtttaacaacaaaggcgagagtattgtagttgaggagtattggagaaagattagcggggataaaggagagagttgtatgtatggagacaattttttttttcccgggggcatatggtaaataaagagga

SEQ ID NO: 326141 - DNA, 247 bp, Homo sapiens
actcctgcctcagcctcccaaagtgctgaatttacaggcgtgagccaccgcgccagccattttgtgtgattctaaattttttaaacttcccttgaatgttgccttttcagcctcccgtctctcttccatccccctcctttgtccatccctctcccacctacatcccatagctctgtccgtctctgaccacgtctttttccttttcgctgactttctcactcactgtctgtctctcattttctccaca

SEQ ID NO: 326142 - DNA, 400 bp, Homo sapiens
ctggcccccaagaggaccctttccaagtccccagctgggggccctgtgtagacctggagtggacacgcccctccttcccttcatgattcgtttgtagcgcaggtaaccagcgaagcatccctgttcattcctggaggggcaaccgtccctcattccacctccccagcaccaccttggcccctggatgaggaaggagcattccttcctggaagagcctggctaagcaatatctctggttctttcttctcccacctgggcctcctgggtcatctgggccatcaccctgcctctgcattagctgcaagcaaaatctttctctctgcccctttccccttttctccagattctttgcagaccatgcctttgcatgccttctgtgagcgggttggggagggaaggg

SEQ ID NO: 326143 - DNA, 6215 bp, Homo sapiens
gccgcatcagaggtcacacgtggctgtgaacccaggcctgtccctgtgtggccatccgtattctcggcagcccccgtgccgtggccatcaaccccgagccatggtacacagcatcatgctggtgtctctttgccttgacttggctggatgggctggtgggggctggcggctgggacgctgccctgcctgccctgctgacttttgaccttggatggggcgggtcttgttgcagcttgacagtgatgacctcctggataatcccggggaggcccaaagtgccttctatgaaggtcctgggctccatgtgcaagaagcttccggcaaccacctgaacccagagcccaaccagccggcccccagtgtggacctagacttcctggaagatgacatcctgggctctcctgcgacagggggcggcggcgggggcagtgggggcgctgaccagccctgtgacatcctccagcagagcctccaagaggccaacatcacggagcagacgctggaggccgaggctgagctggacctgggtcccttccagctgcccaccctgcagcctgcggatggcggggcaggcccgacgggcgctggaggggcagcggccgtggctgcggggccccaagccctcttcccaggcagcaccgacctgctggggctgcagggcccgcccaccgtgctgacccaccaggccctggtgccgccccaggacgtggtcaacaaggccctgagtgtgcagcccttcctgcagcctgtgggcctgggcaatgtgacactgcagcccatcccgggcctccaaggcctgcccaatggcagccctgggggtgccacggcggccacgctgggcctggcgcccatccaggtggtgggccagcccgtcatggcgctcaacacgcccacctcccagctcctggccaagcaggtgcccgtcagcggctacctggcctcggcggctggcccctcggagcccgtgacgctggcgtcggccggtgtctcgccacagggggctggcctggtcatccagaagaacctctcggccgctgtggccaccacgctcaatgggaactctgtgttcggaggcgcgggggccgcctcggctcccaccgggacgccctcgggacagccgctggcggtggccccaggcctcggctcgtcgccactggtcccggcgcccaacgtgatcctgcatcgcacacccacgcccatccagcccaagcccgcgggggtgctgccgcccaagctctaccagctgacgcccaagccgtttgcgcccgcgggcgccacgctcaccatccagggcgagccgggggcgctcccgcagcagcccaaggccccgcagaacctgacgttcatggcggcggggaaggcgggccagaacgtggtgctgtcgggcttccccgcgcctgcgctgcaagcgaacgtcttcaagcagccaccggccaccaccaccggagcggccccgccgcagccccccggggccctgagcaaacccatgagcgtccacctcctgaaccaaggcagcagcatcgtcatccccgcccagcacatgctgccgggccagaaccagttcctactgcctggcgccccggcggtccagctcccgcagcagctctcagccctgccggccaacgtgggcgggcagatcctggcggccgctgccccccacacaggtggacagctcatcgcgaaccccatcctcacaaaccagaacctggcgggcccactgagcctgggccccgtgttggccccccactccggggcccacagcgcgcacatcctctccgccgctcccatccaggtgggccagcctgcgctcttccagatgcccgtgtcgctggcggcgggcagcctgcccacgcagagccagccagcgcccgccgggccggccgccaccactgtcctccagggggtcaccctgccccccagcgccgtggccatgctcaacacccccgacggcctggtgcagccggccacccctgccgctgccaccggggaggccgcgcctgtcctcacggtgcagcctgccccccaggcgccccccgcggtcagcacacccctgcccctgggcctccagcagccgcaggcgcagcagcccccgcaggcccccaccccacaggccgccgccccgcctcaggccaccaccccccagcccagccctggcctggcgtctagcccggagaagatcgtcctggggcagccgccctctgccacccccacggccatcctcactcaggactccctgcagatgttcctgccccaggagaggagccagcagcccctctccgcagagggcccccacctctccgtgcctgcctcggtcatagtcagcgccccgcctcccgcccaagacccagccccagccacccccgtcgccaaaggagctggcctcggccctcaggcccccgacagccaggcttccccggctccggccccccagatcccggcagcggctccgctgaagggcccaggcccctcttcgtccccgtcactacctcaccaggcccctctgggggacagcccccacctgccctccccacaccccacccggcccccttcccgcccaccctcccggccacagagtgtgtcccgccctccctcagagccacccttgcacccttgccccccaccccaggcccccccaactctgcctggcatctttgtcatccaaaaccagctaggcgttcccccgcctgccagcaacccggcccctactgccccaggcccgccgcagccgcctctccgcccccagtcccagccgcctgagggaccgctgcccccagccccccacctccctccatcctccacctcctctgctgtggcctcctcctctgagacgtcctccaggttgccagcccctacgccatccgacttccagctccagttcccacccagccaggggccccacaagtcccccactccccctccaaccctccacctggtccctgagccggcagcaccccccccaccgcctcctcggaccttccagatggtgaccacccccttcccagcgctgccccagccgaaggctcttctcgagagatttcaccaggtgccgtccggaatcatcctccagaacaaggctgggggggcccctgccgccccgcagacctccaccagcctggggcccctcaccagccccgctgcgtctgtgctggtcagtgggcaggccccatctgggacccccactgcccccagccacgcccccgccccggcacccatggccgccacaggcctccctcctctgcttccagccgagaacaaggcttttgccagcaacctcccgaccctgaatgtggccaaggccgcttcctccgggccagggaagccctccgggctgcagtatgagagcaaactgagtggcctgaagaagccccccacgcttcagcccagcaaggaagcctgtttcctggagcatttgcacaaacaccagggctccgtcctgcaccccgactacaagacggccttcccctcctttgaggacgccctgcatcgcctcctgccctaccatgtctaccagggcgccctcccctcccccagtgactaccacaaagtggacgaggagtttgagacggtctccacgcagctgctgaaacgcacccaggccatgctcaataaatatcggctcctgctcctggaggagtcccggagggtgagcccctcagcggagatggtaatgatcgaccgaatgttcattcaggaggagaagaccacccttgccttggataaacagctggccaaggagaagccggacgagtacgtgtcttcctcccgctcgctcggcctccccatcgcagcctcttccgagggtcatcggcttcccggccacggccccctgtcgtcttcagctcccggggcctccacccagccccctccacacctgcccaccaagcttgtgatccggcacggcggggcaggcggctccccttcggtcacctgggcccgggcgtcctcctccctgtcctcctcttcctcctcctcctctgccgcctcctccttggacgccgacgaggacggccccatgccctcccgcaaccgcccgcccatcaagacctacgaggcccggagccgcatcgggctcaagctcaagatcaagcaggaagccgggctcagcaaggtcgtgcacaacacggccctggaccccgtgcaccagcccccgccaccccccgctaccctcaaggtggccgagcccccgccacggccgccaccaccaccgccgcccacgggccagatgaacggcacggtggaccacccgccgcctgccgcccccgagcgcaagcccctgggcaccgccccgcactgcccgcgcctgccactgcgcaagacctaccgcgagaacgtggggggccctggcgcgccggaggggacgcccgcaggcagggcacggggaggcagcccggcgccgctgcccgccaaagtggacgaggccaccagcgggctcatccgcgagctggcggccgtggaggacgagctgtaccagcgtatgctgaagggccccccgccagagcccgcagccagcgccgcccaaggcaccggggaccccgactgggaggcgcccgggctgccccctgccaagcggcgcaagtccgagtcgcccgacgtggaccaggccagcttctccagcgacagcccgcaggatgacacgctcaccgagcacctgcagagcgccatcgacagcatcctgaacctgcagcaggcccccggccggacgcccgcgccctcgtacccccacgctgcctcggccggcacccccgcatccccgccgcccctgcacaggcccgaggcctacccaccctccagtcacaacggtggcctcggcgccaggacgttgaccagataacaccgggccgcctccccttccccgtcccctcctcccgaagacgccgggacagtcgggtgtccgccctcagcctcctggggactcgagccggggatcccctgacggtttttcttgcctaagttatttgagtcacaaaggcctccttccctgccgcctgcttcagctgggttgctggggggtgggcgtggatttagggagggggctgtgatgtaaaacgtctcccctgccaaaggaggggcaaagtgctgtgtcagttcctgtttcttcccatttcctggcacactctgcccctctgtccgggggacacgcgcatgtgtttgccagggatggggccaccgggttgatgccaacgctccgggtgcctgtcttgtctgtgtggcttctcagatggtggagggtgctgggagctggcagggtccttccagacagtctcagcctctccccgccgcccccaacaggctgtcaaacaaaaccggagagggggtgggggagccagcctcccagcgtgctgtgcccgcaggcacccgtgtgacatccgcacgtccagctccgtgacctgtgtgtgtgtgtgtgcacaagtgagtgagagatttcgaacgcccacccctcgactttgaaatctgagcaaaacaagaaactggggtcttcctctcccccgaacctctccccagctagtcttccctctgttcttcctgcctccagccgcccgcgccagattttgaaatctcggagacaaaactagtactgtaagataaatttttttgtactgtatttattgtgtataacgatttttttaaaggagaattctgtacatttagaactcttgtaaattaaaaaccgatcctttttttaaaactgtaaaaaaaaaaaaaaaaaaaaaaaaaaaaaaaaggggggggggtaaaaatgttcttcccccagagggggggcccaacgtccagtagccgcagtaccccaggcctttctttggtcaacgaaggggggccccatatagggagaggctcggtataatataacgctaacagcgaccagtcggcccgtcttatacaaaaacgcgtcgtgtagatctgcggagaaaacactggcatacctaggagaactctttgtgggaagaggaacacctttaattatgtgtggcgggggggacaccaactaattggggcacaaactatctaccctctcaacaaaagattttgaaaacgcgccaatagggggaaaatgttttaaaaattttaaaaagggggaatacagttggtgtttaacaacaaaggcgagagtattgtagttgaggagtattggagaaagattagcggggataaaggagagagttgtatgtatggagacaattttttttttcccgggggcatatggtaaataaagagga

SEQ ID NO: 326144 - DNA, 616 bp, Homo sapiens
tcggatcttcgttgtgtgagtgggtaagagatgaactggggggaggggtgtgtgtttgggcagtgagcaagccggcaagagaatgtgagtgggcggccagttggttggcaagtgagaggctgtggagaggttgctgctgggacgggctgtgcaattaaacagttgagcagatcttaatagcagactggggcggtgctctccgcaggcctgcggggagcagggagcaggggaagcaagcgagctggaagcatctttgggcacagagctagatacgaatttcagaagcacataacctgaggaatagaatgcaaccagaggagggagaaatagagattccaggcagcgtttcctaaacttaaaaagttttgaatacccagttttgccttgttctggggacctctggcaatgttgttcaagggaggaatttttaatttcatagaaaagtgaattttaccaccacaagagaacatgagaccaaggtcataaatccctttgtttggagtgtccgttctgaactccttgtatacttttatttgcaggaagaggctataccagcaagtattatggttttactgggtggggcggcaaggccaggaagagatggagatgctgttaa

SEQ ID NO: 326145 - DNA, 446 bp, Homo sapiens
ctcccctcaatgggaagtagaatctctttctccacctcttcaatatggctggccctggaacttcccttggcacacagaatgcagcagaattggcttcatgttgtttctaagccttggcctcagaggccttgcatgcttcctaaccctggctctaggaaacttgctgctgtcatgtaagcaagcccaggctaacctactgaatgttggtgtgtcccagtcaaatccagcactgcaaccaatagccaggcagccaccagacatgtgagtggggccacctcacaccagccaacctccaccaagtcatcagatgtatgagtgagaacagcccagaacaactgagcccgtccagaccagcggaacaaccaagctgaccagtagacttaggagcagtaaacagatgattgttatggaagccattctgtttagggtgtgtgtgttattgcttg

SEQ ID NO: 326146 - DNA, 347 bp, Homo sapiens
tttttttgagacagagtctctgtcgcccaggctggagtgcagtggcacgatctcggctcactgcaaactccacgtcccaggttcaagccattctcctgcctcagcctcccgtgtagctgggactacaggcgccagccatcatgcctggctaattttttttgtatttttagtagagacggggtttcatcgtgttagccaggatgttctcaatctcctgacctcatgatctgcccacctcagcctcccaaagtgctgggattacaggtgtgagccatcgcgcctggccgacaaaagttgtcttactcatcaatgcagcctcgacacttagcatgagatcttgcacatgg

SEQ ID NO: 326147 - DNA, 370 bp, Homo sapiens
agctttcaaaacacactgttaaaatggtcctcaaagtgaagacataatcaggcttagcaattctctttggtgattttatttgatctgtaaccaagcagcttcagctgtagctttaaataaactgaggggtggagccgggtgagaatcggggatttggtgaagatgtttcgttcccagggcacttccacaaactcacagggaggccgcaggatttttttaattttcaaagaaaatacagtggcactgaacatctgtcctattaatgcttaactattagctaagattgttaagtttcaaattaggctgtgctgcattctctttgatgaaatatctgggaagctgagcttgcggaggtttgggtgataagaag

SEQ ID NO: 326148 - DNA, 406 bp, Homo sapiens
catgccttgttccaaaccttttgtggtagtttaaaaggatacacaataaaaattacaatatgcacacagagacacacatacatacaaactattttgcaatctgcttcttccacttacctttatgttactattatctttccgagtgggtaactttgcaaaaagatttgaatatgaaagtggctttgtaaatgtgaagttgtgatgctagtattcccattaggatactgaaatcttagaagacatgcacctatactcaggccgtgatttgggtgggaatcacagcacatgtgtaacgagtgctcaggacactcacagtgcaggtgcaaaggcaagatgcacagtcaagccttcctccagttgaggtctgagaatcacctgctttcattagggatactttttcttcttt

SEQ ID NO: 326149 - DNA, 1258 bp, Homo sapiens
aggacaagtactatataacagttggcacaacccaccccacaacagaagagaacacatttttctcaagcatatgtggaatagtttccaggagaaaccatgtgttaggccacaaaacaaatcttaatgaaatgtaaaagactgaaacacaaagtaccatttcaagtcacatagaatgaaacaagaaatgaaaaacaaggaaaactggaaaattcacaaatacattttattgtaagcaacacactcctgatctatcaatgggtgaagcaagaattcacaaggtaaattagaaaacatcttgagacaaatgaaaacaaagacatggcataccaaaatttatgagatgttgctgtagtctaaattttgtctcctaggctgggcacggtggctcacacctgtaatcccagcactttgggaggccaaggtgggtggatcacaaggtcaggagattgagaccatcctggctaaggtggtgaaaccctgtctctacttaaaaaaaaaaaaaaaatcagcccagtgtggtgctgggtgcctgtagtcccagttatccaggaggctgaggcaggagaatggtgtgaacctgggaggcagagcttgcagtgagccaagatcacaccactgcattccagcctgggtgacagagtgagactccatgtcaaaaataaataaataaataaataaataaataaataaataaataaataaataaattttgtctcctcaacttgcgtatgttgacatcttaactcccaaagtgattgtattaggagctgggaattttgggacatgatgaagtcatgagggctctgcagaatgggattacccccctcatggaagacaccccaaagatatttcatgccacttctactgtatttggttacttcaagaagatggctctctgtgaaccaggaaaagggccctcatctgacactgaatctgactgtaccttgagctttgacctaatctccagaactcggagaaataaatttatgttgtttattaaccaccagtctatggtattttgttatagcagcctgaatggacagatacagtgaaagtagtgaaaagaaggcaactcatagcagtaactactcaaattcaaaaagaagaaagatctcaaagactaagccaaggaatgtttcacagaattcagcctaaaaagaaaagtgctggaaaggatgtaaattaaataatgtatgagataagcaaaaagcttcaatatccagctacaaggcattctagaatgagagaatagaaaaaa

SEQ ID NO: 326150 - DNA, 781 bp, Homo sapiens
ccactgcattccagcctaggcaacagagcaagatcctgtcaaaaaaaaaaaaaaaggagaaaattctcttggcagtgggtaagagtagttattagggttgtagatttcctgtctggaattagagaaagaagggtcatattttctgttattttgtgtatctacctctaagtggactgtttgcctcttgtcacgaattagtagcctcttcagtttaccatcatgtgctcttattttctctgcatacagtgaagtgattgtcattacaatttataatcctgacctggtacttttatatttaattgggctgatattttctaattcttcccagtgtacaaaggttttatgctttgttgttgttgttgagacaggctaggtgctttggatgtggagaattaaatgagcatggcattttcagaggatacttgttggagattgcttgggtaggatggatgtagtcaggtaatggggcctagaaattcagactgaagcatttggtattgatgtgatgggaactggcagcccttgagagattttagctgagaagtgatgtaaaatctgtttggaagactttgagtagaggagattagaggcaaggttaggatgtagggtatgttgcaatagtaattaagacttaagaatcggcccagtggcatgtacctgtagtcctagctactctggaggccgaggcaggaggatcacttgaggctgcaattagctgtgattgtgcctgtgaatagccactgcactccaacctaggcaatataatgagattctgtctctt

SEQ ID NO: 326151 - DNA, 572 bp, Homo sapiens
ccactgcattccagcctaggcaacagagcaagatcctgtcaaaaaaaaaaaaaaaggagaaaattctcttggcagtgggtaagagtagttattagggttgtagatttcctgtctggaattagagaaagaagggtcatattttctgttattttgtgtatctacctctaagtggactgtttgcctcttgtcacgaattagtagcctcttcagtttaccatcatgtgctcttattttctctgcatacagtgaagtgattgtcattacaatttataatcctgacctggtacttttatatttaattgggctgatattttctaattcttcccagtgtacaaaggttttatgctttgttgttgttgttgagacaggctaggtgctttggatgtggagaattaaatgagcatggcattttcagaggatacttgttggagattgcttgggtaggatggatgtagtcaggtaatggggcctagaggacaaagagaagaggagacagctacagtaagagatggtcactacacttctccgaagacaggaagtaagtggcaccgctctactttgcagagctgcca

SEQ ID NO: 326152 - DNA, 523 bp, Homo sapiens
tagtagagggatgatgctaataattaggctgtgggtggttgtggttgattcaaattatgtgtttttttggaaagtcatgtcagtggtagtaatataattgttgggccgattaattttagcattggagtaggtttaggttatgtacgtagtctaggccatatgtgttggagattgagactagtagggctaggctatgtgttttgtcagggggttgagaattcagactgaagcatttggtattgatgtgatgggaactggcagcccttgagagattttagctgagaagtgatgtaaaatctgtttggaagactttgagtagaggagattagaggcaaggttaggatgtagggtatgttgcaatagtaattaagacttaagaatcggcccagtggcatgtacctgtagtcctagctactctggaggccgaggcaggaggatcacttgaggctgcaattagctgtgattgtgcctgtgaatagccactgcactccaacctaggcaatataatgagattctgtctctt

SEQ ID NO: 326153 - DNA, 458 bp, Homo sapiens
tgtctagaacaatgattgtaaacaaaatccctttccaaggataaccctcctgaaacttatgaatattatgaagagaagatgctaaaagttaccaaaaaataaataaaagagatcacatacaatgaatctaggataagaatggaaaaaatggcaaaagcattctcaacaacataagacagtggagtggctgggcacgtggatcatggctgtaagcccagcactctgggaggatgaggcgagtggattgcttattaagtgcaggagttcacgaccagcctgggtaacatagtaaaaccccgtccctaataaaaatataaaaaattagccaggcatggtggtgggcgcctgtatgggaggccgaggtgggaaataacctgagcctgggaggtcaaggcttcagtgagccaagaatgtgccactgcactctagcctggacaatcagagtgagactctgactc

SEQ ID NO: 326154 - DNA, 1684 bp, Homo sapiens
tgatgaattcagtggcagtgaattgagaccggagggaatctggcccctagaggctggtacttgggcccgaaacccccatctccggcggagagaccgtccgaggtaattgtctgccacgagtgcacattctgaaaacaggagattttagttcctaaaaatgggaagaacctacattgtagaagagactgttggccagtatctttcaaacataaatctccaaggaaaggcttttgtctctggccttttaataggacagtgttcgtcacaaaaggattatgtgattcttgccactagaacgccacccaaagaggagcaaagtgagaacctcaaacatcccaaagctaagttggataacttggatgaagaatgggccacagaacatgcctgccaggtatccagaatgctaccagggggacttttagttcttggagtatttattattactactttagaactggcaaatgattttcaaaatgccctgcgtagactaatgtttgctgtggaaaagtctataaatagaaagagattgtggaatttcacagaggaggaagtctcagaacgagtgacacttcacatttgtgcttctacaaaaaaaatattttgtcgaacttatgatatccatgatccaaagagttcagcaagaccagcagattggaagtatcaaagtggattatcatcctcatggctttctttagagtgtacagttcacattaatattcacatcccactttctgctacttctgtcagctatactctggagaaaaatacaaagaatggacttacacgctgggccaaggaaatagaaaatggtgtttatttgattaatggacaagttaaagatgaagattgtgacctattagaaggacagaaaaaatcttctagaggaaatactcaagcaactagtcattcttttgatgtcagagtgctaacgcagttgctcctgaattcagaccacagatccacagccacagtccagatatgtagcggttctgtaaaccttaagggtgctgtgaaatgcagagcttatatccacagcagtaaacccaaagttaaagatgctgtgcaggcagtaaagagggatatattgaacacagttgctgatcgttgtgaaatgctatttgaggatctgcttttgaatgaaattccagaaaaaaaagattctgaaaaagagttccacgtcctcccttatcgagtctttgttccccttcctggatccactgtaatgttgtgtgattataaatttgacgatgagtcagctgaagaaatcagggaccattttatggagatgttggatcacacaattcaaatagaagatttggaaattgcagaggaaacaaacacagcttgtatgagttcttctatgaatagtcaagcttcattggacaacacagatgatgaacaaccaaaacaaccaattaaaactacaatgttattgaaaattcagcaaaacataggtgtgattgcagcatttacagttgcagtccttgctgcgggtatctcctttcattacttcagtgattagggtgaggcacaaagagtttcttgatcatccagagaacattgacagacaattatgaataataaagatgttaacaatccatctgtatttaaaacactagcagccagatctgctgccatgatgcctatttggtgtgtttctgattaaaatgaaatcacaagctgc

SEQ ID NO: 326155 - DNA, 509 bp, Homo sapiens
aatttaattcacctacaattgataatgaacaaattcagtatgttatataaaaaacaagtagaaagaaaatggtgatgatcgtatagttttttataatgttctttaaagctcagtttcatgtgttaatccttattttatgtggaatttattattattataccctttcagcttgtatgagttcttctatgaatagtcaagcttcattggacaacacagatgatgaacaaccaaaacaaccaattaaaactacaatgttattgaaaattcagcaaaacataggtgtgattgcagcatttacagttgcagtccttgctgcgggtatctcctttcattacttcagtgattagggtgaggcacaaagagtttcttgatcatccagagaacattgacagacaattatgaataataaagatgttaacaatccatctgtatttaaaacactagcagccagatctgctgccatgatgcctatttggtgtgtttctgattaaaatgaaatcacaagctgc

SEQ ID NO: 326156 - DNA, 418 bp, Homo sapiens
atagagatggattaacagtaggaagagtttaatattacaagaacaaaggaagcaaaacagcaatttggaaagtttagcttgtatgagttcttctatgaatagtcaagcttcattggacaacacagatgatgaacaaccaaaacaaccaattaaaactacaatgttattgaaaattcagcaaaacataggtgtgattgcagcatttacagttgcagtccttgctgcgggtatctcctttcattacttcagtgattagggtgaggcacaaagagtttcttgatcatccagagaacattgacagacaattatgaataataaagatgttaacaatccatctgtatttaaaacactagcagccagatctgctgccatgatgcctatttggtgtgtttctgattaaaatgaaatcacaagctgc

SEQ ID NO: 326157 - DNA, 600 bp, Homo sapiens
tgatgaattcagtggcagtgaattgagaccggagggaatctggcccctagaggctggtacttgggcccgaaacccccatctccggcggagagaccgtccgaggtaattgtctgccacgagtgcacattctgaaaacaggtaagtcagcctaagtgtagtgtgtgtgtgtgtgtgtgtgtgtgtgtgctctcttttcaagagaaaaaggaagggacagtgttggaaccatatggacagtcactccggcacacacttctgacgaacttaccttgtgtgaaacggcgtacctaaatggtttttggtggtggggaggtggcactgagtgattcagtacccgggaatttaaggacccgggttaattcttcaggaggagaattaaaagaaaccggtagcactttgagtgtagcctatgttttaaatttttcgttgcagaaacggttacctaacattatattgtttttaaaacttgtatggttccagatcataattctgtagttttaaagctcaatccgtagattgtttcgtgtttactcttatgaaagaatttgttaaattattcattgtaaataatgcattcccagtgtcgtctctctgcagttc

SEQ ID NO: 326158 - DNA, 3249 bp, Homo sapiens
tgatgaattcagtggcagtgaattgagaccggagggaatctggcccctagaggctggtacttgggcccgaaacccccatctccggcggagagaccgtccgaggtaattgtctgccacgagtgcacattctgaaaacaggagattttagttcctaaaaatgggaagaacctacattgtagaagagactgttggccagtatctttcaaacataaatctccaaggaaaggcttttgtctctggccttttaataggacagtgttcgtcacaaaaggattatgtgattcttgccactagaacgccacccaaagaggagcaaagtgagaacctcaaacatcccaaagctaagttggataacttggatgaagaatgggccacagaacatgcctgccaggtatccagaatgctaccagggggacttttagttcttggagtatttattattactactttagaactggcaaatgattttcaaaatgccctgcgtagactaatgtttgctgtggaaaagtctataaatagaaagagattgtggaatttcacagaggaggaagtctcagaacgagtgacacttcacatttgtgcttctacaaaaaaaatattttgtcgaacttatgatatccatgatccaaagagttcagcaagaccagcagattggaagtatcaaagtggattatcatcctcatggctttctttagagtgtacagttcacattaatattcacatcccactttctgctacttctgtcagctatactctggagaaaaatacaaagaatggacttacacgctgggccaaggaaatagaaaatggtgtttatttgattaatggacaagttaaagatgaagattgtgacctattagaaggacagaaaaaatcttctagaggaaatactcaagcaactagtcattcttttgatgtcagagtgctaacgcagttgctcctgaattcagaccacagatccacagccacagtccagatatgtagcggttctgtaaaccttaagggtgctgtgaaatgcagagcttatatccacagcagtaaacccaaagttaaagatgctgtgcaggcagtaaagagggatatattgaacacagttgctgatcgttgtgaaatgctatttgaggatctgcttttgaatgaaattccagaaaaaaaagattctgaaaaagagttccacgtcctcccttatcgagtctttgttccccttcctggatccactgtaatgttgtgtgattataaatttgacgatgagtcagctgaagaaatcagggaccattttatggagatgttggatcacacaattcaaatagaagatttggaaattgcagaggaaacaaacacagcttgtatgagttcttctatgaatagtcaagcttcattggacaacacagatgatgaacaaccaaaacaaccaattaaaactacaatgttattgaaaattcagcaaaacataggtgtgattgcagcatttacagttgcagtccttgctgcgggtatctcctttcattacttcagtgattagggtgaggcacaaagagtttcttgatcatccagagaacattgacagacaattatgaataataaagatgttaacaatccatctgtatttaaaacactagcagccagatctgctgccatgatgcctatttggtgtgtttctgattaaaatgaaatcacaagctgccttgtttagcctgctttacattgtaggtggcccgcatttccagaaataacgttatgcatctagatggaagctgcatgtaacaaatcattattatctatttttaaaagcttcaaaatgatgggatatgatcatagattttagtcttactaatctgaatcacatattaatcaggacattaaaaactttaacagaggcatgatggctcacacgtataatcctaatgctttgagaggctgaggtaggagcatcacctggggctgggagggagttggagaccagcctggatgacataatgagattctgtctctactggaaaaaaaaaaaattagctggacatggtggcaatcagctctagtcccaactacttggaggctgaagcaggaagatcacgtgagcccaggagtttgaggctgcagcgagctatgatcacatcactgtactccagcctgggtgacaaaatgagacattgtctctaaaatacataagtaaatttaaaaaaaaaagaataataatttgaacagtgaatgttgatgtaacatcttaataatagagcaccagaaaaatttctaccaaatgagacaacaactttaggataagttcatcctctaggagctttctaatgtgcactcagttcctgtatactgtgtgttttgttctgatcaaggggtagggaacctttccagagaagtcccattagtaagaaatgacataaaatacgtgctttctcaggttactgtataactgttataatatatttaatatataaaattaagacttttgcttccagcaagtatgttagactagatattataaaacaactagatcctgaataaaatctgcttttaataggttcactggaagtaggagaattttcaagaaccatacttcgacatttcctctgccacaaaaaatgaacgcattttaagttaggagtcatgaatactgtattgaccatacaagtggattatggttgtctggatggcagataccaatagcaacattgtcatatgcagtttgcctcaaatcagaaacaagaagacatcggaatctgagatgctgccctagagaggacagttaaagaaggttcagtggtcctcagtttgcagtgctctagctcctggcagaagcaagagggaaacattcctaatttagttccaagattcctacagattattatcaagtagtagtattttatgactagagatcacaggcacaagttgaaacaaactaacatgacaagaaagctatagaaaaaataaacattgaactcagttcttcaaggtttcatcaccaacataaggaatgaagttggaaccacaggcagatctgaaaaagaaccaaatagagctcctaaaaatgagaaatatttattgaaataagaaaaaagccctcagacatgttgaatattttattagactcagctgaagagacaagtgaactaaactataagctggatctaaagaaattacccagtgagcagtgaggagaaacaaggagctagaaaacattggaaagttaagagagttcgagggaagaattataaagactaggagtcctagaaagag

SEQ ID NO: 326159 - DNA, 3777 bp, Homo sapiens
tgatgaattcagtggcagtgaattgagaccggagggaatctggcccctagaggctggtacttgggcccgaaacccccatctccggcggagagaccgtccgaggtaattgtctgccacgagtgcacattctgaaaacaggagattttagttcctaaaaatgggaagaacctacattgtagaagagactgttggccagtatctttcaaacataaatctccaaggaaaggcttttgtctctggccttttaataggacagtgttcgtcacaaaaggattatgtgattcttgccactagaacgccacccaaagaggagcaaagtgagaacctcaaacatcccaaagctaagttggataacttggatgaagaatgggccacagaacatgcctgccaggtatccagaatgctaccagggggacttttagttcttggagtatttattattactactttagaactggcaaatgattttcaaaatgccctgcgtagactaatgtttgctgtggaaaagtctataaatagaaagagattgtggaatttcacagaggaggaagtctcagaacgagtgacacttcacatttgtgcttctacaaaaaaaatattttgtcgaacttatgatatccatgatccaaagagttcagcaagaccagcagattggaagtatcaaagtggattatcatcctcatggctttctttagagtgtacagttcacattaatattcacatcccactttctgctacttctgtcagctatactctggagaaaaatacaaagaatggacttacacgctgggccaaggaaatagaaaatggtgtttatttgattaatggacaagttaaagatgaagattgtgacctattagaaggacagaaaaaatcttctagaggaaatactcaagcaactagtcattcttttgatgtcagagtgctaacgcagttgctcctgaattcagaccacagatccacagccacagtccagatatgtagcggttctgtaaaccttaagggtgctgtgaaatgcagagcttatatccacagcagtaaacccaaagttaaagatgctgtgcaggcagtaaagagggatatattgaacacagttgctgatcgttgtgaaatgctatttgaggatctgcttttgaatgaaattccagaaaaaaaagattctgaaaaagagttccacgtcctcccttatcgagtctttgttccccttcctggatccactgtaatgttgtgtgattataaatttgacgatgagtcagctgaagaaatcagggaccattttatggagatgttggatcacacaattcaaatagaagatttggaaattgcagaggaaacaaacacagcttgtatgagttcttctatgaatagtcaagcttcattggacaacacagatgatgaacaaccaaaacaaccaattaaaactacaatgttattgaaaattcagcaaaacataggtgtgattgcagcatttacagttgcagtccttgctgcgggtatctcctttcattacttcagtgattagggtgaggcacaaagagtttcttgatcatccagagaacattgacagacaattatgaataataaagatgttaacaatccatctgtatttaaaacactagcagccagatctgctgccatgatgcctatttggtgtgtttctgattaaaatgaaatcacaagctgccttgtttagcctgctttacattgtaggtggcccgcatttccagaaataacgttatgcatctagatggaagctgcatgtaacaaatcattattatctatttttaaaagcttcaaaatgatgggatatgatcatagattttagtcttactaatctgaatcacatattaatcaggacattaaaaactttaacagaggcatgatggctcacacgtataatcctaatgctttgagaggctgaggtaggagcatcacctggggctgggagggagttggagaccagcctggatgacataatgagattctgtctctactggaaaaaaaaaaaattagctggacatggtggcaatcagctctagtcccaactacttggaggctgaagcaggaagatcacgtgagcccaggagtttgaggctgcagcgagctatgatcacatcactgtactccagcctgggtgacaaaatgagacattgtctctaaaatacataagtaaatttaaaaaaaaaagaataataatttgaacagtgaatgttgatgtaacatcttaataatagagcaccagaaaaatttctaccaaatgagacaacaactttaggataagttcatcctctaggagctttctaatgtgcactcagttcctgtatactgtgtgttttgttctgatcaaggggtagggaacctttccagagaagtcccattagtaagaaatgacataaaatacgtgctttctcaggttactgtataactgttataatatatttaatatataaaattaagacttttgcttccagcaagtatgttagactagatattataaaacaactagatcctgaataaaatctgcttttaataggttcactggaagtaggagaattttcaagaaccatacttcgacatttcctctgccacaatggattatggttgtctggatggcagataccaatagcaacattgtcatatgcagtttgcctcaaatcagaaacaagaagacatcggaatctgagatgctgccctagagaggacagttaaagaaggttcagtggtcctcagtttgcagtgctctagctcctggcagaagcaagagggaaacattcctaatttagttccaagattcctacagattattatcaagtagtagtattttatgactagagatcacaggcacaagttgaaacaaactaacatgacaagaaagctatagaaaaaataaacattgaactcagttcttcaaggtttcatcaccaacataaggaatgaagttggaaccacaggcagatctgaaaaagaaccaaatagagctcctaaaaatgagaaatatttattgaaataagaaaaaagccctcagacatgttgaatattttattagactcagctgaagagacaagtgaactaaactataagctggatctaaagaaattacccagtgagcagtgaggagaaacaaggagctagaaaacattggaaagttaagagagttcgagggaagaattataaagactaggagtcctagaaagagaaaatttagagaataaaggagaggcagtacttgaaagataacacaattttacaaatttgttggaaaaacatgaattcataaattcaggaagcacaatatataccaaacatatatttaaataaaatccaggcctagactcaaggtattgtaaatgacaagataccaaatacaagattttaaaagcaaccatggggagaaaaagatcagtgaaagcaagacagtcaaatacttagtaggcttcctaacagcaacaatgtacccaaaagagggtagaattctgagaaaaactattagcttagaatttgcaacaagcgaaactgaaacaaacagatgctcagatgaaaaacagatgttatcctcagcacaacttcagtaaagagactacaaaaggatgatcttcaagaagggaaatgattctaaaaggattatctgaaattgaaaaactagtaagcaaataaatgataaacataagtaaatttaaactgttgtttgtataaaacaattataatgaagtgtttataagaaattgtaaacaaatgtaaaactaaataaacattgttatgcaacattaaaaaaaaaaa

SEQ ID NO: 326160 - DNA, 3185 bp, Homo sapiens
tgatgaattcagtggcagtgaattgagaccggagggaatctggcccctagaggctggtacttgggcccgaaacccccatctccggcggagagaccgtccgaggtaattgtctgccacgagtgcacattctgaaaacaggagattttagttcctaaaaatgggaagaacctacattgtagaagagactgttggccagtatctttcaaacataaatctccaaggaaaggcttttgtctctggccttttaataggacagagaacctcaaacatcccaaagctaagttggataacttggatgaagaatgggccacagaacatgcctgccaggtatccagaatgctaccagggggacttttagttcttggagtatttattattactactttagaactggcaaatgattttcaaaatgccctgcgtagactaatgtttgctgtggaaaagtctataaatagaaagagattgtggaatttcacagaggaggaagtctcagaacgagtgacacttcacatttgtgcttctacaaaaaaaatattttgtcgaacttatgatatccatgatccaaagagttcagcaagaccagcagattggaagtatcaaagtggattatcatcctcatggctttctttagagtgtacagttcacattaatattcacatcccactttctgctacttctgtcagctatactctggagaaaaatacaaagaatggacttacacgctgggccaaggaaatagaaaatggtgtttatttgattaatggacaagttaaagatgaagattgtgacctattagaaggacagaaaaaatcttctagaggaaatactcaagcaactagtcattcttttgatgtcagagtgctaacgcagttgctcctgaattcagaccacagatccacagccacagtccagatatgtagcggttctgtaaaccttaagggtgctgtgaaatgcagagcttatatccacagcagtaaacccaaagttaaagatgctgtgcaggcagtaaagagggatatattgaacacagttgctgatcgttgtgaaatgctatttgaggatctgcttttgaatgaaattccagaaaaaaaagattctgaaaaagagttccacgtcctcccttatcgagtctttgttccccttcctggatccactgtaatgttgtgtgattataaatttgacgatgagtcagctgaagaaatcagggaccattttatggagatgttggatcacacaattcaaatagaagatttggaaattgcagaggaaacaaacacagcttgtatgagttcttctatgaatagtcaagcttcattggacaacacagatgatgaacaaccaaaacaaccaattaaaactacaatgttattgaaaattcagcaaaacataggtgtgattgcagcatttacagttgcagtccttgctgcgggtatctcctttcattacttcagtgattagggtgaggcacaaagagtttcttgatcatccagagaacattgacagacaattatgaataataaagatgttaacaatccatctgtatttaaaacactagcagccagatctgctgccatgatgcctatttggtgtgtttctgattaaaatgaaatcacaagctgccttgtttagcctgctttacattgtaggtggcccgcatttccagaaataacgttatgcatctagatggaagctgcatgtaacaaatcattattatctatttttaaaagcttcaaaatgatgggatatgatcatagattttagtcttactaatctgaatcacatattaatcaggacattaaaaactttaacagaggcatgatggctcacacgtataatcctaatgctttgagaggctgaggtaggagcatcacctggggctgggagggagttggagaccagcctggatgacataatgagattctgtctctactggaaaaaaaaaaaattagctggacatggtggcaatcagctctagtcccaactacttggaggctgaagcaggaagatcacgtgagcccaggagtttgaggctgcagcgagctatgatcacatcactgtactccagcctgggtgacaaaatgagacattgtctctaaaatacataagtaaatttaaaaaaaaaagaataataatttgaacagtgaatgttgatgtaacatcttaataatagagcaccagaaaaatttctaccaaatgagacaacaactttaggataagttcatcctctaggagctttctaatgtgcactcagttcctgtatactgtgtgttttgttctgatcaaggggtagggaacctttccagagaagtcccattagtaagaaatgacataaaatacgtgctttctcaggttactgtataactgttataatatatttaatatataaaattaagacttttgcttccagcaagtatgttagactagatattataaaacaactagatcctgaataaaatctgcttttaataggttcactggaagtaggagaattttcaagaaccatacttcgacatttcctctgccacaaaaaatgaacgcattttaagttaggagtcatgaatactgtattgaccatacaagtggattatggttgtctggatggcagataccaatagcaacattgtcatatgcagtttgcctcaaatcagaaacaagaagacatcggaatctgagatgctgccctagagaggacagttaaagaaggttcagtggtcctcagtttgcagtgctctagctcctggcagaagcaagagggaaacattcctaatttagttccaagattcctacagattattatcaagtagtagtattttatgactagagatcacaggcacaagttgaaacaaactaacatgacaagaaagctatagaaaaaataaacattgaactcagttcttcaaggtttcatcaccaacataaggaatgaagttggaaccacaggcagatctgaaaaagaaccaaatagagctcctaaaaatgagaaatatttattgaaataagaaaaaagccctcagacatgttgaatattttattagactcagctgaagagacaagtgaactaaactataagctggatctaaagaaattacccagtgagcagtgaggagaaacaaggagctagaaaacattggaaagttaagagagttcgagggaagaattataaagactaggagtcctagaaagag

SEQ ID NO: 326161 - DNA, 3417 bp, Homo sapiens
ttctttctttctttctttctttctttctttctttctttctttctttcctttctttctttctcttcttttccctccctccttcccttcctttcttcctttgtttctttccttctctcctctcctcttttctcctctcctcttcctctacttcctctcctttccttttccttttccttttctctctccttccttccttcctttcttcctttcttccttcttttttttaatgagagacagggtctctctctgtcacccagcctggaatgcaataatgcagttgtagctcactgcagccttgaactcttggtcctaagtgatcctcctgcctcagcctcctgagtagctgggattacaggcacctgccaccacgcctgactaatttttgtatttttagtagaaacggggtttcaccatgttggccacgttggtctccaactcctgacctcaagtgatctgcccacctcagcctcccaaagtgctgggattacaggcatgagccaccgcgcctggagataagtttatttttcataggagtatcatttaggttccttgcaaagaccaggggttttgaggtaaagcagaatttggtaagagcaattttgtgccagatcaaccagaaaatgaaaaaatattgaccttttaagctttatttctattagtttttgtatgtacttctaaaatatgtatcactgataccagtgacaaacctatctaaatattgataatatttcttttccttttaggattctgaaaaagagttccacgtcctcccttatcgagtctttgttccccttcctggatccactgtaatgttgtgtgattataaatttgacgatgagtcagctgaagaaatcagggaccattttatggagatgttggatcacacaattcaaatagaagatttggaaattgcagaggaaacaaacacagcttgtatgagttcttctatgaatagtcaagcttcattggacaacacagatgatgaacaaccaaaacaaccaattaaaactacaatgttattgaaaattcagcaaaacataggtgtgattgcagcatttacagttgcagtccttgctgcgggtatctcctttcattacttcagtgattagggtgaggcacaaagagtttcttgatcatccagagaacattgacagacaattatgaataataaagatgttaacaatccatctgtatttaaaacactagcagccagatctgctgccatgatgcctatttggtgtgtttctgattaaaatgaaatcacaagctgccttgtttagcctgctttacattgtaggtggcccgcatttccagaaataacgttatgcatctagatggaagctgcatgtaacaaatcattattatctatttttaaaagcttcaaaatgatgggatatgatcatagattttagtcttactaatctgaatcacatattaatcaggacattaaaaactttaacagaggcatgatggctcacacgtataatcctaatgctttgagaggctgaggtaggagcatcacctggggctgggagggagttggagaccagcctggatgacataatgagattctgtctctactggaaaaaaaaaaaattagctggacatggtggcaatcagctctagtcccaactacttggaggctgaagcaggaagatcacgtgagcccaggagtttgaggctgcagcgagctatgatcacatcactgtactccagcctgggtgacaaaatgagacattgtctctaaaatacataagtaaatttaaaaaaaaaagaataataatttgaacagtgaatgttgatgtaacatcttaataatagagcaccagaaaaatttctaccaaatgagacaacaactttaggataagttcatcctctaggagctttctaatgtgcactcagttcctgtatactgtgtgttttgttctgatcaaggggtagggaacctttccagagaagtcccattagtaagaaatgacataaaatacgtgctttctcaggttactgtataactgttataatatatttaatatataaaattaagacttttgcttccagcaagtatgttagactagatattataaaacaactagatcctgaataaaatctgcttttaataggttcactggaagtaggagaattttcaagaaccatacttcgacatttcctctgccacaaaaaatgaacgcattttaagttaggagtcatgaatactgtattgaccatacaagtggattatggttgtctggatggcagataccaatagcaacattgtcatatgcagtttgcctcaaatcagaaacaagaagacatcggaatctgagatgctgccctagagaggacagttaaagaaggttcagtggtcctcagtttgcagtgctctagctcctggcagaagcaagagggaaacattcctaatttagttccaagattcctacagattattatcaagtagtagtattttatgactagagatcacaggcacaagttgaaacaaactaacatgacaagaaagctatagaaaaaataaacattgaactcagttcttcaaggtttcatcaccaacataaggaatgaagttggaaccacaggcagatctgaaaaagaaccaaatagagctcctaaaaatgagaaatatttattgaaataagaaaaaagccctcagacatgttgaatattttattagactcagctgaagagacaagtgaactaaactataagctggatctaaagaaattacccagtgagcagtgaggagaaacaaggagctagaaaacattggaaagttaagagagttcgagggaagaattataaagactaggagtcctagaaagagaaaatttagagaataaaggagaggcagtacttgaaagataacacaattttacaaatttgttggaaaaacatgaattcataaattcaggaagcacaatatataccaaacatatatttaaataaaatccaggcctagactcaaggtattgtaaatgacaagataccaaatacaagattttaaaagcaaccatggggagaaaaagatcagtgaaagcaagacagtcaaatacttagtaggcttcctaacagcaacaatgtacccaaaagagggtagaattctgagaaaaactattagcttagaatttgcaacaagcgaaactgaaacaaacagatgctcagatgaaaaacagatgttatcctcagcacaacttcagtaaagagactacaaaaggatgatcttcaagaagggaaatgattctaaaaggattatctgaaattgaaaaactagtaagcaaataaatgataaacataagtaaatttaaactgttgtttgtataaaacaattataatgaagtgtttataagaaattgtaaacaaatgtaaaactaaataaacattgttatgcaacattaaaaaaaaaaa

SEQ ID NO: 326162 - DNA, 2655 bp, Homo sapiens
aatttaattcacctacaattgataatgaacaaattcagtatgttatataaaaaacaagtagaaagaaaatggtgatgatcgtatagttttttataatgttctttaaagctcagtttcatgtgttaatccttattttatgtggaatttattattattataccctttcagcttgtatgagttcttctatgaatagtcaagcttcattggacaacacagatgatgaacaaccaaaacaaccaattaaaactacaatgttattgaaaattcagcaaaacataggtgtgattgcagcatttacagttgcagtccttgctgcgggtatctcctttcattacttcagtgattagggtgaggcacaaagagtttcttgatcatccagagaacattgacagacaattatgaataataaagatgttaacaatccatctgtatttaaaacactagcagccagatctgctgccatgatgcctatttggtgtgtttctgattaaaatgaaatcacaagctgccttgtttagcctgctttacattgtaggtggcccgcatttccagaaataacgttatgcatctagatggaagctgcatgtaacaaatcattattatctatttttaaaagcttcaaaatgatgggatatgatcatagattttagtcttactaatctgaatcacatattaatcaggacattaaaaactttaacagaggcatgatggctcacacgtataatcctaatgctttgagaggctgaggtaggagcatcacctggggctgggagggagttggagaccagcctggatgacataatgagattctgtctctactggaaaaaaaaaaaattagctggacatggtggcaatcagctctagtcccaactacttggaggctgaagcaggaagatcacgtgagcccaggagtttgaggctgcagcgagctatgatcacatcactgtactccagcctgggtgacaaaatgagacattgtctctaaaatacataagtaaatttaaaaaaaaaagaataataatttgaacagtgaatgttgatgtaacatcttaataatagagcaccagaaaaatttctaccaaatgagacaacaactttaggataagttcatcctctaggagctttctaatgtgcactcagttcctgtatactgtgtgttttgttctgatcaaggggtagggaacctttccagagaagtcccattagtaagaaatgacataaaatacgtgctttctcaggttactgtataactgttataatatatttaatatataaaattaagacttttgcttccagcaagtatgttagactagatattataaaacaactagatcctgaataaaatctgcttttaataggttcactggaagtaggagaattttcaagaaccatacttcgacatttcctctgccacaaaaaatgaacgcattttaagttaggagtcatgaatactgtattgaccatacaagtggattatggttgtctggatggcagataccaatagcaacattgtcatatgcagtttgcctcaaatcagaaacaagaagacatcggaatctgagatgctgccctagagaggacagttaaagaaggttcagtggtcctcagtttgcagtgctctagctcctggcagaagcaagagggaaacattcctaatttagttccaagattcctacagattattatcaagtagtagtattttatgactagagatcacaggcacaagttgaaacaaactaacatgacaagaaagctatagaaaaaataaacattgaactcagttcttcaaggtttcatcaccaacataaggaatgaagttggaaccacaggcagatctgaaaaagaaccaaatagagctcctaaaaatgagaaatatttattgaaataagaaaaaagccctcagacatgttgaatattttattagactcagctgaagagacaagtgaactaaactataagctggatctaaagaaattacccagtgagcagtgaggagaaacaaggagctagaaaacattggaaagttaagagagttcgagggaagaattataaagactaggagtcctagaaagagaaaatttagagaataaaggagaggcagtacttgaaagataacacaattttacaaatttgttggaaaaacatgaattcataaattcaggaagcacaatatataccaaacatatatttaaataaaatccaggcctagactcaaggtattgtaaatgacaagataccaaatacaagattttaaaagcaaccatggggagaaaaagatcagtgaaagcaagacagtcaaatacttagtaggcttcctaacagcaacaatgtacccaaaagagggtagaattctgagaaaaactattagcttagaatttgcaacaagcgaaactgaaacaaacagatgctcagatgaaaaacagatgttatcctcagcacaacttcagtaaagagactacaaaaggatgatcttcaagaagggaaatgattctaaaaggattatctgaaattgaaaaactagtaagcaaataaatgataaacataagtaaatttaaactgttgtttgtataaaacaattataatgaagtgtttataagaaattgtaaacaaatgtaaaactaaataaacattgttatgcaacattaaaaaaaaaaa

SEQ ID NO: 326163 - DNA, 2006 bp, Homo sapiens
  misc_feature (6)..(6): n is a, c, g, or t
aaatcnggcttttaataggttccactggaagtaggagaattttccaagaacccatacttcgacatttcctctgcccacaaaaaatgaacgcattttaagtaggagcatcacctggggctgggagggagttggagaccagcctggatgacataatgagattctgtctctactggaaaaaaaaaaaattagctggacatggtggcaatcagctctagtcccaactacttggaggctgaagcaggaagatcacgtgagcccaggagtttgaggctgcagcgagctatgatcacatcactgtactccagcctgggtgacaaaatgagacattgtctctaaaatacataagtaaatttaaaaaaaaaagaataataatttgaacagtgaatgttgatgtaacatcttaataatagagcaccagaaaaatttctaccaaatgagacaacaactttaggataagttcatcctctaggagctttctaatgtgcactcagttcctgtatactgtgtgttttgttctgatcaaggggtagggaacctttccagagaagtcccattagtaagaaatgacataaaatacgtgctttctcaggttactgtataactgttataatatatttaatatataaaattaagacttttgcttccagcaagtatgttagactagatattataaaacaactagatcctgaataaaatctgcttttaataggttcactggaagtaggagaattttcaagaaccatacttcgacatttcctctgccacaaaaaatgaacgcattttaagttaggagtcatgaatactgtattgaccatacaagtggattatggttgtctggatggcagataccaatagcaacattgtcatatgcagtttgcctcaaatcagaaacaagaagacatcggaatctgagatgctgccctagagaggacagttaaagaaggttcagtggtcctcagtttgcagtgctctagctcctggcagaagcaagagggaaacattcctaatttagttccaagattcctacagattattatcaagtagtagtattttatgactagagatcacaggcacaagttgaaacaaactaacatgacaagaaagctatagaaaaaataaacattgaactcagttcttcaaggtttcatcaccaacataaggaatgaagttggaaccacaggcagatctgaaaaagaaccaaatagagctcctaaaaatgagaaatatttattgaaataagaaaaaagccctcagacatgttgaatattttattagactcagctgaagagacaagtgaactaaactataagctggatctaaagaaattacccagtgagcagtgaggagaaacaaggagctagaaaacattggaaagttaagagagttcgagggaagaattataaagactaggagtcctagaaagagaaaatttagagaataaaggagaggcagtacttgaaagataacacaattttacaaatttgttggaaaaacatgaattcataaattcaggaagcacaatatataccaaacatatatttaaataaaatccaggcctagactcaaggtattgtaaatgacaagataccaaatacaagattttaaaagcaaccatggggagaaaaagatcagtgaaagcaagacagtcaaatacttagtaggcttcctaacagcaacaatgtacccaaaagagggtagaattctgagaaaaactattagcttagaatttgcaacaagcgaaactgaaacaaacagatgctcagatgaaaaacagatgttatcctcagcacaacttcagtaaagagactacaaaaggatgatcttcaagaagggaaatgattctaaaaggattatctgaaattgaaaaactagtaagcaaataaatgataaacataagtaaatttaaactgttgtttgtataaaacaattataatgaagtgtttataagaaattgtaaacaaatgtaaaactaaataaacattgttatgcaacattaaaaaaaaaaa

SEQ ID NO: 326164 - DNA, 283 bp, Homo sapiens
attttttagtttattttttgatagtttatattcttttagttaccaataatgccttttttggttatttctgtccttaattagtgaagaatattttgtcgaacttatgatatccatgatccaaaggtaagaaatttactctttaaagatttttctgtgtcacaaagtattttcaatcaaaattcagcttttatttagttttaataatttccattgccatcacttcctattgatgcctacaaacaactgtagtttttattttgaaatatgattaattttattacag

SEQ ID NO: 326165 - DNA, 3830 bp, Homo sapiens
tgatgaattcagtggcagtgaattgagaccggagggaatctggcccctagaggctggtacttgggcccgaaacccccatctccggcggagagaccgtccgaggtaattgtctgccacgagtgcacattctgaaaacaggagattttagttcctaaaaatgggaagaacctacattgtagaagagactgttggccagtatctttcaaacataaatctccaaggaaaggcttttgtctctggccttttaataggacagtgttcgtcacaaaaggattatgtgattcttgccactagaacgccacccaaagaggagcaaagtgagaacctcaaacatcccaaagctaagttggataacttggatgaagaatgggccacagaacatgcctgccaggtatccagaatgctaccagggggacttttagttcttggagtatttattattactactttagaactggcaaatgattttcaaaatgccctgcgtagactaatgtttgctgtggaaaagtctataaatagaaagagattgtggaatttcacagaggaggaagtctcagaacgagtgacacttcacatttgtgcttctacaaaaaaaatattttgtcgaacttatgatatccatgatccaaagagttcagcaagaccagcagattggaagtatcaaagtggattatcatcctcatggctttctttagagtgtacagttcacattaatattcacatcccactttctgctacttctgtcagctatactctggagaaaaatacaaagaatggacttacacgctgggccaaggaaatagaaaatggtgtttatttgattaatggacaagttaaagatgaagattgtgacctattagaaggacagaaaaaatcttctagaggaaatactcaagcaactagtcattcttttgatgtcagagtgctaacgcagttgctcctgaattcagaccacagatccacagccacagtccagatatgtagcggttctgtaaaccttaagggtgctgtgaaatgcagagcttatatccacagcagtaaacccaaagttaaagatgctgtgcaggcagtaaagagggatatattgaacacagttgctgatcgttgtgaaatgctatttgaggatctgcttttgaatgaaattccagaaaaaaaagattctgaaaaagagttccacgtcctcccttatcgagtctttgttccccttcctggatccactgtaatgttgtgtgattataaatttgacgatgagtcagctgaagaaatcagggaccattttatggagatgttggatcacacaattcaaatagaagatttggaaattgcagaggaaacaaacacagcttgtatgagttcttctatgaatagtcaagcttcattggacaacacagatgatgaacaaccaaaacaaccaattaaaactacaatgttattgaaaattcagcaaaacataggtgtgattgcagcatttacagttgcagtccttgctgcgggtatctcctttcattacttcagtgattagggtgaggcacaaagagtttcttgatcatccagagaacattgacagacaattatgaataataaagatgttaacaatccatctgtatttaaaacactagcagccagatctgctgccatgatgcctatttggtgtgtttctgattaaaatgaaatcacaagctgccttgtttagcctgctttacattgtaggtggcccgcatttccagaaataacgttatgcatctagatggaagctgcatgtaacaaatcattattatctatttttaaaagcttcaaaatgatgggatatgatcatagattttagtcttactaatctgaatcacatattaatcaggacattaaaaactttaacagaggcatgatggctcacacgtataatcctaatgctttgagaggctgaggtaggagcatcacctggggctgggagggagttggagaccagcctggatgacataatgagattctgtctctactggaaaaaaaaaaaattagctggacatggtggcaatcagctctagtcccaactacttggaggctgaagcaggaagatcacgtgagcccaggagtttgaggctgcagcgagctatgatcacatcactgtactccagcctgggtgacaaaatgagacattgtctctaaaatacataagtaaatttaaaaaaaaaagaataataatttgaacagtgaatgttgatgtaacatcttaataatagagcaccagaaaaatttctaccaaatgagacaacaactttaggataagttcatcctctaggagctttctaatgtgcactcagttcctgtatactgtgtgttttgttctgatcaaggggtagggaacctttccagagaagtcccattagtaagaaatgacataaaatacgtgctttctcaggttactgtataactgttataatatatttaatatataaaattaagacttttgcttccagcaagtatgttagactagatattataaaacaactagatcctgaataaaatctgcttttaataggttcactggaagtaggagaattttcaagaaccatacttcgacatttcctctgccacaaaaaatgaacgcattttaagttaggagtcatgaatactgtattgaccatacaagtggattatggttgtctggatggcagataccaatagcaacattgtcatatgcagtttgcctcaaatcagaaacaagaagacatcggaatctgagatgctgccctagagaggacagttaaagaaggttcagtggtcctcagtttgcagtgctctagctcctggcagaagcaagagggaaacattcctaatttagttccaagattcctacagattattatcaagtagtagtattttatgactagagatcacaggcacaagttgaaacaaactaacatgacaagaaagctatagaaaaaataaacattgaactcagttcttcaaggtttcatcaccaacataaggaatgaagttggaaccacaggcagatctgaaaaagaaccaaatagagctcctaaaaatgagaaatatttattgaaataagaaaaaagccctcagacatgttgaatattttattagactcagctgaagagacaagtgaactaaactataagctggatctaaagaaattacccagtgagcagtgaggagaaacaaggagctagaaaacattggaaagttaagagagttcgagggaagaattataaagactaggagtcctagaaagagaaaatttagagaataaaggagaggcagtacttgaaagataacacaattttacaaatttgttggaaaaacatgaattcataaattcaggaagcacaatatataccaaacatatatttaaataaaatccaggcctagactcaaggtattgtaaatgacaagataccaaatacaagattttaaaagcaaccatggggagaaaaagatcagtgaaagcaagacagtcaaatacttagtaggcttcctaacagcaacaatgtacccaaaagagggtagaattctgagaaaaactattagcttagaatttgcaacaagcgaaactgaaacaaacagatgctcagatgaaaaacagatgttatcctcagcacaacttcagtaaagagactacaaaaggatgatcttcaagaagggaaatgattctaaaaggattatctgaaattgaaaaactagtaagcaaataaatgataaacataagtaaatttaaactgttgtttgtataaaacaattataatgaagtgtttataagaaattgtaaacaaatgtaaaactaaataaacattgttatgcaacattaaaaaaaaaaa

SEQ ID NO: 326166 - DNA, 3211 bp, Homo sapiens
tgatgaattcagtggcagtgaattgagaccggagggaatctggcccctagaggctggtacttgggcccgaaacccccatctccggcggagagaccgtccgaggtaattgtctgccacgagtgcacattctgaaaacaggagattttagttcctaaaaatgggaagaacctacattgtagaagagactgttggccagtatctttcaaacataaatctccaaggaaaggcttttgtctctggccttttaataggacagaacgccacccaaagaggagcaaagtgagaacctcaaacatcccaaagctaagttggataacttggatgaagaatgggccacagaacatgcctgccaggtatccagaatgctaccagggggacttttagttcttggagtatttattattactactttagaactggcaaatgattttcaaaatgccctgcgtagactaatgtttgctgtggaaaagtctataaatagaaagagattgtggaatttcacagaggaggaagtctcagaacgagtgacacttcacatttgtgcttctacaaaaaaaatattttgtcgaacttatgatatccatgatccaaagagttcagcaagaccagcagattggaagtatcaaagtggattatcatcctcatggctttctttagagtgtacagttcacattaatattcacatcccactttctgctacttctgtcagctatactctggagaaaaatacaaagaatggacttacacgctgggccaaggaaatagaaaatggtgtttatttgattaatggacaagttaaagatgaagattgtgacctattagaaggacagaaaaaatcttctagaggaaatactcaagcaactagtcattcttttgatgtcagagtgctaacgcagttgctcctgaattcagaccacagatccacagccacagtccagatatgtagcggttctgtaaaccttaagggtgctgtgaaatgcagagcttatatccacagcagtaaacccaaagttaaagatgctgtgcaggcagtaaagagggatatattgaacacagttgctgatcgttgtgaaatgctatttgaggatctgcttttgaatgaaattccagaaaaaaaagattctgaaaaagagttccacgtcctcccttatcgagtctttgttccccttcctggatccactgtaatgttgtgtgattataaatttgacgatgagtcagctgaagaaatcagggaccattttatggagatgttggatcacacaattcaaatagaagatttggaaattgcagaggaaacaaacacagcttgtatgagttcttctatgaatagtcaagcttcattggacaacacagatgatgaacaaccaaaacaaccaattaaaactacaatgttattgaaaattcagcaaaacataggtgtgattgcagcatttacagttgcagtccttgctgcgggtatctcctttcattacttcagtgattagggtgaggcacaaagagtttcttgatcatccagagaacattgacagacaattatgaataataaagatgttaacaatccatctgtatttaaaacactagcagccagatctgctgccatgatgcctatttggtgtgtttctgattaaaatgaaatcacaagctgccttgtttagcctgctttacattgtaggtggcccgcatttccagaaataacgttatgcatctagatggaagctgcatgtaacaaatcattattatctatttttaaaagcttcaaaatgatgggatatgatcatagattttagtcttactaatctgaatcacatattaatcaggacattaaaaactttaacagaggcatgatggctcacacgtataatcctaatgctttgagaggctgaggtaggagcatcacctggggctgggagggagttggagaccagcctggatgacataatgagattctgtctctactggaaaaaaaaaaaattagctggacatggtggcaatcagctctagtcccaactacttggaggctgaagcaggaagatcacgtgagcccaggagtttgaggctgcagcgagctatgatcacatcactgtactccagcctgggtgacaaaatgagacattgtctctaaaatacataagtaaatttaaaaaaaaaagaataataatttgaacagtgaatgttgatgtaacatcttaataatagagcaccagaaaaatttctaccaaatgagacaacaactttaggataagttcatcctctaggagctttctaatgtgcactcagttcctgtatactgtgtgttttgttctgatcaaggggtagggaacctttccagagaagtcccattagtaagaaatgacataaaatacgtgctttctcaggttactgtataactgttataatatatttaatatataaaattaagacttttgcttccagcaagtatgttagactagatattataaaacaactagatcctgaataaaatctgcttttaataggttcactggaagtaggagaattttcaagaaccatacttcgacatttcctctgccacaaaaaatgaacgcattttaagttaggagtcatgaatactgtattgaccatacaagtggattatggttgtctggatggcagataccaatagcaacattgtcatatgcagtttgcctcaaatcagaaacaagaagacatcggaatctgagatgctgccctagagaggacagttaaagaaggttcagtggtcctcagtttgcagtgctctagctcctggcagaagcaagagggaaacattcctaatttagttccaagattcctacagattattatcaagtagtagtattttatgactagagatcacaggcacaagttgaaacaaactaacatgacaagaaagctatagaaaaaataaacattgaactcagttcttcaaggtttcatcaccaacataaggaatgaagttggaaccacaggcagatctgaaaaagaaccaaatagagctcctaaaaatgagaaatatttattgaaataagaaaaaagccctcagacatgttgaatattttattagactcagctgaagagacaagtgaactaaactataagctggatctaaagaaattacccagtgagcagtgaggagaaacaaggagctagaaaacattggaaagttaagagagttcgagggaagaattataaagactaggagtcctagaaagag

SEQ ID NO: 326167 - DNA, 605 bp, Homo sapiens
tctggacaatgctggatgtaaagaaaactgtgaagctacctctaagcatattgtttgtgaatactgtgtaccatttagaggataacatgggggattcacatgaagttatgtgaaaatattttataaggaataatacctaagtgcctctcttaagttctccagtagaatgtattttcaatttttgccacaagggggagaagttatttttatagtaatatgtacatttttttattttaaaaatagaattcacacaactttacagcatctatgaacattttgctatcccaattatgtgtgtgtgtgcatgtgtgtaaacaagattctgaaagtcttgcatgagaaaaatttcaaaggaaattaataacaaaaccaaaacagttttgaagaacatgtgcacagtggacacaggaattgaacaaagtttaccatgattaacattatgttttcttagttatatatcacattgaattcctttatcaactctaataagaatctactgattagtgttctacattctgctttttaaagaaaaatttttgaaacaatcagacttaacagaagggttgtaaatactgtacaaataaaatttttcccttttgagaata

SEQ ID NO: 326168 - DNA, 905 bp, Homo sapiens
ctccattttttaaggtttttaagtttgagtctctattaagaattagtgggaaagaacacaaaactaattgtcaaactaaggcatgaagattgtggttatagtccaagctaaggtagccagcccctcattaatggaaataaaaattaatagtcgtcagttttctctatcctcgtatattaaaactttgattttgttttcagttataggtaaaagctatgactatggtatagatatgtggtctgtaggttgcaccttatacgaactctatactggaaaaattttattccctggcaaaaccaataaccatatgctgaagcttgcaatggatctcaaaggaaagatgccaaataagatgattcgaaaaggtgtgttcaaagatcagcattttgatcaaaatctcaacttcatgtacatagaagttgataaagtaacagagagggtaagtgttttaaatgcagcatgcaatagttattttattgttaactgagtactaaatcatacgagctggtgaattaaaaaaaaaacaaaaacccaaaagtaagtatttcctttttgctgtcgaccaattcctaaataaaacacatcagaccatggaaaagatggagggattttaaaatgtttttctagcataattaatttatttttattataggtcatatttaggccctcgtcacatcttctttggattactttcttggtctggcttcccatccagctttcttattgctgctagagtgatgtttctgaaaacatatctggtcatgttcctatccctgcttaaaaacctttgttggctccctgttacctatgaaataatatttaagttcctcagaatgacaaatccaactgctttcttcagttttcagacctctcttcagtacattcagaacccccacctttccaca

SEQ ID NO: 326169 - DNA, 455 bp, Homo sapiens
agaagagaatttttcagaaatatatgtaatctttgctgtttggggggtaaaattaatgcttgtctccctgaggaatatggaaaataatcagattttaggggtttaaataatatttttaaattgtaaatgggatttttttattcacccaggcacctaattacaacaagcatgcacattttggtgcattcaagaatggaaaatcagaatagcagcattgattcttctggtgcagctcagtggaagatgatgacaaccagaagacatgagctaagggtaagggactgttctgaagaacctttccatttagtgatcaagatatggaagctgatttctgaaaatgctcagtgtgtactctaattatttatggtaccatttgaattgtaacttgcattttagcagtgcatgtttctaattgacttactgggaaactgaataaaatatgcctcttattatca

SEQ ID NO: 326170 - DNA, 398 bp, Homo sapiens
tccacttcccctaccctccaccgtccgggagccgccgccaccgccgccgaggagtcaggaagttcaagatggccgccgcggagacccagtcgctacgggagcagccagagatggaagatgctaattctgaaaagagtataaatgaagaaaatggagaagtatcagaagaccagtctcaaaataagcacagtcgtcacaaaaaaaagaagcataaacacagaagtaaacataagaaacataaacattcctcagaagaagacaaggataaaaaacataaacataagcataaacataaaataaaaaaaaaacctcgggggtcttttggggcgcccggccccatcgttttccccccgggtgggtcccggtaagtttccccatttcccccttagtgggcgttt

SEQ ID NO: 326171 - DNA, 6889 bp, Homo sapiens
tccacttcccctaccctccaccgtccgggagccgccgccaccgccgccgaggagtcaggaagttcaagatggccgccgcggagacccagtcgctacgggagcagccagagatggaagatgctaattctgaaaagagtataaatgaagaaaatggagaagtatcagaagaccagtctcaaaataagcacagtcgtcacaaaaaaaagaagcataaacacagaagtaaacataagaaacataaacattcctcagaagaagacaaggataaaaaacataaacataagcataaacataagaaacacaaaagaaaagaggttattgatgcttctgataaagagggtatgtctccagcaaaaagaactaaacttgatgatttagctttgctagaagacttggaaaaacagagagccttgattaaggccgaacttgataatgagttaatggaaggaaaggtccagtctggtatggggctcattttgcaaggttatgagtctggctctgaagaagagggggaaattcatgaaaaggcaagaaatggaaataggtctagtactagatcttcaagtacaaaggggaaacttgaacttgtggacaataaaattactacaaagaaacgaagtaaaagcagatccaaagaacggactagacataggtctgataaaaagaaaagtaaggggggtattgaaatcgttaaagagaaaacaactaggagcaagtcaaaggagaggaaaaaatctaaaagcccatccaaaagaagtaagtctcaagatcaagcaaggaaatcaaaatcccctacccttagaaggcgatctcaagagaaaattggtaaggccagatctcctactgatgataaggttaaaattgaagataaaagtaaatcaaaagataggaaaaaatccccaattataaatgaaagtagaagtcgcgatcgaggtaaaaaatccagatccccagttgatttaagaggtaaatccaaagacagaaggtcacggtccaaagagagaaaatcaaaacggtctgaaactgataaagaaaagaagccaattaaatctccctctaaagatgcttcatctgggaaagaaaataggtcacccagcagaagacctggtcgtagtcctaaaagaagaagtttgtctccaaaaccacgtgataaatcaagaagaagcaggtctccacttttgaatgatagaagatctaagcagagcaaatccccctcgcggacactgtctcctgggagaagagccaagagccgatccttagaaagaaaacgacgagaaccagagaggagacgactttcttctccaagaacacgacctcgagatgatatcctcagtagacgtgaaagatcaaaagatgccagccccatcaatagatggtctccaacccgaagaagaagtagatctcccattagaaggaggtctcgttccccactcagacgtagcaggtctccaagaagaagaagcagatctcctcggagaagggacagaggtcggaggagcagatcacgcttgcgaaggcggtctcgatcacgcggtggtcgtagacgaaggagcagaagcaaagtaaaggaagataaatttaaaggaagtctttctgaaggaatgaaagttgagcaggaatcttcgtctgatgataaccttgaagactttgatgtagaggaagaagatgaagaagccctaatagaacagagaagaatccaaaggcaggcaattgttcagaaatataaataccttgctgaagatagcaacatgtctgtgccatctgaaccaagcagcccccagagcagtacgagaacacgatcaccatctccagatgacattctggagcgagtagctgctgatgttaaagagtatgaacgggaaaatgttgatacatttgaggcctcagtgaaagccaagcataatctaatgacagttgaacagaataatggttcatctcagaagaagttgttggcacctgatatgtttacagaatctgatgatatgtttgctgcgtattttgatagtgctcgtcttcgggccgctggcattggaaaagatttcaaagagaatcccaacctcagagataactggaccgatgcagaaggctattatcgtgtgaacataggtgaagtcctagataaacgttacaatgtgtatggctacactgggcaaggtgtattcagtaatgttgtacgagccagagataatgcaagagccaaccaagaagtggctgtaaagatcatcagaaacaatgagctcatgcaaaagactggtttaaaagaattagagttcttgaaaaaacttaatgatgctgatcctgatgacaaatttcattgtctgagactcttcaggcacttctatcacaagcagcatctttgtctggtattcgagcctctcagcatgaacttacgagaggtgttaaaaaaatatggtaaagatgttggtcttcatattaaagctgtaagatcctatagtcagcagttgttcctggcattgaaactccttaaaagatgcaatatcctacatgcagatatcaagccagacaatatcctggttaatgaatccaaaactattttaaagctttgcgattttgggtcggcttcacatgttgcggataatgacataacaccttatcttgtcagtagattttatcgtgctcctgaaatcattataggtaaaagctatgactatggtatagatatgtggtctgtaggttgcaccttatacgaactctatactggaaaaattttattccctggcaaaaccaataaccatatgctgaagcttgcaatggatctcaaaggaaagatgccaaataagatgattcgaaaaggtgtgttcaaagatcagcattttgatcaaaatctcaacttcatgtacatagaagttgataaagtaacagagagggagaaagttactgttatgagcaccattaatccaactaaggacctgttggctgacttgattgggtgccagagacttcctgaagaccaacgtaagaaagtacaccagctaaaggacttgttggaccagattctgatgttggacccagctaaacgaattagcatcaaccaggccctacagcacgccttcatccaggaaaaaatttaaacaagatgaagaaactccaagggtttgagtaaatacaaagactgaagaaatttcacagcagtttattaatgtatataaacttataaatatttctccagcaaatttgaggaagcatgatatatttgaattaacaccaagggtgatatttcttttagagatgttagttaatctgttttgtgtcttacgtgaaatttcactgtagactgttttaaattgccaagactgcacaaaattacagtgctaatgtatatggttgcagttcacataaagacaaaagcatctgttatgaaatgagtagtaatattgggtggttgatttgttcttagcagacttggcttcattttggtcttgagataaaatggccagcataaatgctgtttatattcacgttttcctaggtgtgtgtgtgcaggccacagcagcatgcccttggtgtagtcagtgccgaaaggggtctgttccttcttgagcctgcctgcagggatggtctccttttaaagcaggttgtgtgcagcattcagtacactgaaggtaagctaaaccatcaacatctctggtgttttaagatgttattttattggaacaactgacaaatgagggatgttagctttgtggcagaattccctgcatgtgtgataactgatcttgttttattttttggcattgcaactgtggcatagttacaatttctgtttgttcatcacatttaaaattggaagagaacgcgcttgatggatagagcgccttcagtgtactgtttcttattaactttactttttttaaatcaacttgctatagactttatatacattttgttaaatatagttcctagtgacatagaaacgatgcgtagttttcatttactaattacaaatgttgaggcctaattctgaaagtcctcatatttaaaggctagacaacgtaatgaaatttttaactatttgtatgtcattttgaaagtgtactgctttatggtaaaagtgtttttcatttgttcattgttttcattatttgtgatcatgttgtctttcaatacaggcataaaccttccactcttgaacaaagcagctgctttttaaaagcggtaattgcttctttaccttttatttcttttgtaaatgaagcttttctttaagaatgtgactttaaagtgttgtctattgcataaaacagttgacactcacttattgtaaagtgaagattgttctactgcatgtgaagtggaccatgcagatttctgtatgttctcagtatgcatcactagataataaagtcttttgtgaacaaggcatttgtagccatttttaaaagtttttgtcttcagtgctggtaagtcaggtaaaccataaatagttaaaagcaaccttttgtttttttcctgaaagtttttaattgaaagtattattagttaaagatgtaaacctagccaaaattaccagtttattaataattaggatcctaattatttcaaaaaatcctacaaatattgtcagctttcagtgtagtgagattattcctgtaggttatggggtataattcaggatttaactaatgtttctgctattttctcacttttccttttgatggtgcggaaagagaaaaaggaaaacggggcacaggccattcgacgccttctccaaggggtctgatttgctgagacaccagcttcaccttcttaacaaggcacctaattacaacaagcatgcacattttggtgcattcaagaatggaaaatcagaatagcagcattgattcttctggtgggttttgctccatttaaagacatgaaatgaactacagccaggaaggtgatagatgatataataagccacctctgaacctacaccccgtctcttcacggtttagacttactaaaataaatacaaggtgcagctcagtggaagatgatgacaaccagaagacatgagctaaggtttctgtcctataaaagatttattaaaaaacaatccttcatttattttttgtctaattttttagttttcagcattatgatttgggttttattggtgtttggtatttagaattagtgctgttgtggagtgcgtctgtaaagtgcttgttttatcatacttcctgcctctcccctcccccagtttctcctcccctaaaataaaaatagtggtcaactttagtaatataaaaggctgctggatgctgagattccacataacacatggttgtcaaaattggatgttaaggattcttagaaaaacagcaaccaccagaatagcatatatctaaaagtagtcttcagctttaggcagatgcaaaagaatacaaactggaatattaagaatactgttcaactcctttagtatctgttccccaacttaccctgtagaaacctcgttattaaccagtgttccagtcttaaagtagacaaaatattcagagccattttttttaagggaaatgaaaaagatactctgggttttttatactccccaatttagcatatctagactacctatttgaaaggaaccctatcaactgtcttatgtacgttacatgattttcctacactctgtaattttgctgaggtgcaatttggaactctgcaagacctactagattgaatttatttagtgaatgctcctgaataaatgtgcattcctcttttagagtagctgtatgcttttcaaatgctatctgccgtgaattttttgcttttattatactttatggcaaaagtgatatcaagtgattgtcagacttgagggctcatagaagtgttaggtacggctctcaaagatgttacagttttttctagggttgggagaatagttgagatctggaaagcatagacattttttacactctggatagactttattcttgaagatcatcagaaatgaggttggaatttcgaggttttgagcagggggagcatcttatattcacccttaaatcgttattaatacatcctgttttcttcattccctgatagctatctcatttcactctactgtctcaaaattttgttttaaaataatagaaatgttttgccattattaagtaccactttattcctaacaaaaataagtactcaggacttttttttcaaaatgaaatatttatgtactgttttatggtatgtggtagagtaagtaaaatgtaatgttctcagttttgttccatatttgcattcctcttatgctttacctgtattttatcatttgtaagcagaactctagctatatggggtagaaataaaatctctgagatgaaacaaaggaatcaacatgataaaatttaggcgaagtagttaagaaatggcccttttgaatgttgaagataggaaagaaagccatatattcaaatatgtaattttcctcatttagttataatgacatctttaccaattgggcttcataaatgtgtttctttcttaatagtatcctagttccagcatatattcaacatgaattttatcattctcctcctaatggaatgtcttccttatagaaatgttcacgacaaattcatttgtgttttttacatgtcaataatgtatgctaaattaaaatgttttccagttattctgatagatgtcattatggcatccttaatttttcttctccttctgtatatagggtaagggactgttctgaagaacctttccatttagtgatcaagatatggaagctgatttctgaaaatgctcagtgtgtactctaattatttatggtaccatttgaattgtaacttgcattttagcagtgcatgtttctaattgacttactgggaaactgaataaaatatgcctcttattatca

SEQ ID NO: 326172 - DNA, 4381 bp, Homo sapiens
tccacttcccctaccctccaccgtccgggagccgccgccaccgccgccgaggagtcaggaagttcaagatggccgccgcggagacccagtcgctacgggagcagccagagatggaagatgctaattctgaaaagagtataaatgaagaaaatggagaagtatcagaagaccagtctcaaaataagcacagtcgtcacaaaaaaaagaagcataaacacagaagtaaacataagaaacataaacattcctcagaagaagacaaggataaaaaacataaacataagcataaacataagaaacacaaaagaaaagaggttattgatgcttctgataaagagggtatgtctccagcaaaaagaactaaacttgatgatttagctttgctagaagacttggaaaaacagagagccttgattaaggccgaacttgataatgagttaatggaaggaaaggtccagtctggtatggggctcattttgcaaggttatgagtctggctctgaagaagagggggaaattcatgaaaaggcaagaaatggaaataggtctagtactagatcttcaagtacaaaggggaaacttgaacttgtggacaataaaattactacaaagaaacgaagtaaaagcagatccaaagaacggactagacataggtctgataaaaagaaaagtaaggggggtattgaaatcgttaaagagaaaacaactaggagcaagtcaaaggagaggaaaaaatctaaaagcccatccaaaagaagtaagtctcaagatcaagcaaggaaatcaaaatcccctacccttagaaggcgatctcaagagaaaattggtaaggccagatctcctactgatgataaggttaaaattgaagataaaagtaaatcaaaagataggaaaaaatccccaattataaatgaaagtagaagtcgcgatcgaggtaaaaaatccagatccccagttgatttaagaggtaaatccaaagacagaaggtcacggtccaaagagagaaaatcaaaacggtctgaaactgataaagaaaagaagccaattaaatctccctctaaagatgcttcatctgggaaagaaaataggtcacccagcagaagacctggtcgtagtcctaaaagaagaagtttgtctccaaaaccacgtgataaatcaagaagaagcaggtctccacttttgaatgatagaagatctaagcagagcaaatccccctcgcggacactgtctcctgggagaagagccaagagccgatccttagaaagaaaacgacgagaaccagagaggagacgactttcttctccaagaacacgacctcgagatgatatcctcagtagacgtgaaagatcaaaagatgccagccccatcaatagatggtctccaacccgaagaagaagtagatctcccattagaaggaggtctcgttccccactcagacgtagcaggtctccaagaagaagaagcagatctcctcggagaagggacagaggtcggaggagcagatcacgcttgcgaaggcggtctcgatcacgcggtggtcgtagacgaaggagcagaagcaaagtaaaggaagataaatttaaaggaagtctttctgaaggaatgaaagttgagcaggaatcttcgtctgatgataaccttgaagactttgatgtagaggaagaagatgaagaagccctaatagaacagagaagaatccaaaggcaggcaattgttcagaaatataaataccttgctgaagatagcaacatgtctgtgccatctgaaccaagcagcccccagagcagtacgagaacacgatcaccatctccagatgacattctggagcgagtagctgctgatgttaaagagtatgaacgggaaaatgttgatacatttgaggcctcagtgaaagccaagcataatctaatgacagttgaacagaataatggttcatctcagaagaagttgttggcacctgatatgtttacagaatctgatgatatgtttgctgcgtattttgatagtgctcgtcttcgggccgctggcattggaaaagatttcaaagagaatcccaacctcagagataactggaccgatgcagaaggctattatcgtgtgaacataggtgaagtcctagataaacgttacaatgtgtatggctacactgggcaaggtgtattcagtaatgttgtacgagccagagataatgcaagagccaaccaagaagtggctgtaaagatcatcagaaacaatgagctcatgcaaaagactggtttaaaagaattagagttcttgaaaaaacttaatgatgctgatcctgatgacaaatttcattgtctgagactcttcaggcacttctatcacaagcagcatctttgtctggtattcgagcctctcagcatgaacttacgagaggtgttaaaaaaatatggtaaagatgttggtcttcatattaaagctgtaagatcctatagtcagcagttgttcctggcattgaaactccttaaaagatgcaatatcctacatgcagatatcaagccagacaatatcctggttaatgaatccaaaactattttaaagctttgcgattttgggtcggcttcacatgttgcggataatgacataacaccttatcttgtcagtagattttatcgtgctcctgaaatcattataggtaaaagctatgactatggtatagatatgtggtctgtaggttgcaccttatacgaactctatactggaaaaattttattccctggcaaaaccaataaccatatgctgaagcttgcaatggatctcaaaggaaagatgccaaataagatgattcgaaaaggtgtgttcaaagatcagcattttgatcaaaatctcaacttcatgtacatagaagttgataaagtaacagagagggagaaagttactgttatgagcaccattaatccaactaaggacctgttggctgacttgattgggtgccagagacttcctgaagaccaacgtaagaaagtacaccagctaaaggacttgttggaccagattctgatgttggacccagctaaacgaattagcatcaaccaggccctacagcacgccttcatccaggaaaaaatttaaacaagatgaagaaactccaagggtttgagtaaatacaaagactgaagaaatttcacagcagtttattaatgtatataaacttataaatatttctccagcaaatttgaggaagcatgatatatttgaattaacaccaagggtgatatttcttttagagatgttagttaatctgttttgtgtcttacgtgaaatttcactgtagactgttttaaattgccaagactgcacaaaattacagtgctaatgtatatggttgcagttcacataaagacaaaagcatctgttatgaaatgagtagtaatattgggtggttgatttgttcttagcagacttggcttcattttggtcttgagataaaatggccagcataaatgctgtttatattcacgttttcctaggtgtgtgtgtgcaggccacagcagcatgcccttggtgtagtcagtgccgaaaggggtctgttccttcttgagcctgcctgcagggatggtctccttttaaagcaggttgtgtgcagcattcagtacactgaaggtaagctaaaccatcaacatctctggtgttttaagatgttattttattggaacaactgacaaatgagggatgttagctttgtggcagaattccctgcatgtgtgataactgatcttgttttattttttggcattgcaactgtggcatagttacaatttctgtttgttcatcacatttaaaattggaagagaacgcgcttgatggatagagcgccttcagtgtactgtttcttattaactttactttttttaaatcaacttgctatagactttatatacattttgttaaatatagttcctagtgacatagaaacgatgcgtagttttcatttactaattacaaatgttgaggcctaattctgaaagtcctcatatttaaaggctagacaacgtaatgaaatttttaactatttgtatgtcattttgaaagtgtactgctttatggtaaaagtgtttttcatttgttcattgttttcattatttgtgatcatgttgtctttcaatacaggcataaaccttccactcttgaacaaagcagctgctttttaaaagcggtaattgcttctttaccttttatttcttttgtaaatgaagcttttctttaagaatgtgactttaaagtgttgtctattgcataaaacagttgacactcacttattgtaaagtgaagattgttctactgcatgtgaagtggaccatgcagatttctgtatgttctcagtatgcatcactagataataaagtcttttgtgaacaagg

SEQ ID NO: 326173 - DNA, 5081 bp, Homo sapiens
tccacttcccctaccctccaccgtccgggagccgccgccaccgccgccgaggagtcaggaagttcaagatggccgccgcggagacccagtcgctacgggagcagccagagatggaagatgctaattctgaaaagagtataaatgaagaaaatggagaagtatcagaagaccagtctcaaaataagcacagtcgtcacaaaaaaaagaagcataaacacagaagtaaacataagaaacataaacattcctcagaagaagacaaggataaaaaacataaacataagcataaacataagaaacacaaaagaaaagaggttattgatgcttctgataaagagggtatgtctccagcaaaaagaactaaacttgatgatttagctttgctagaagacttggaaaaacagagagccttgattaaggccgaacttgataatgagttaatggaaggaaaggtccagtctggtatggggctcattttgcaaggttatgagtctggctctgaagaagagggggaaattcatgaaaaggcaagaaatggaaataggtctagtactagatcttcaagtacaaaggggaaacttgaacttgtggacaataaaattactacaaagaaacgaagtaaaagcagatccaaagaacggactagacataggtctgataaaaagaaaagtaaggggggtattgaaatcgttaaagagaaaacaactaggagcaagtcaaaggagaggaaaaaatctaaaagcccatccaaaagaagtaagtctcaagatcaagcaaggaaatcaaaatcccctacccttagaaggcgatctcaagagaaaattggtaaggccagatctcctactgatgataaggttaaaattgaagataaaagtaaatcaaaagataggaaaaaatccccaattataaatgaaagtagaagtcgcgatcgaggtaaaaaatccagatccccagttgatttaagaggtaaatccaaagacagaaggtcacggtccaaagagagaaaatcaaaacggtctgaaactgataaagaaaagaagccaattaaatctccctctaaagatgcttcatctgggaaagaaaataggtcacccagcagaagacctggtcgtagtcctaaaagaagaagtttgtctccaaaaccacgtgataaatcaagaagaagcaggtctccacttttgaatgatagaagatctaagcagagcaaatccccctcgcggacactgtctcctgggagaagagccaagagccgatccttagaaagaaaacgacgagaaccagagaggagacgactttcttctccaagaacacgacctcgagatgatatcctcagtagacgtgaaagatcaaaagatgccagccccatcaatagatggtctccaacccgaagaagaagtagatctcccattagaaggaggtctcgttccccactcagacgtagcaggtctccaagaagaagaagcagatctcctcggagaagggacagaggtcggaggagcagatcacgcttgcgaaggcggtctcgatcacgcggtggtcgtagacgaaggagcagaagcaaagtaaaggaagataaatttaaaggaagtctttctgaaggaatgaaagttgagcaggaatcttcgtctgatgataaccttgaagactttgatgtagaggaagaagatgaagaagccctaatagaacagagaagaatccaaaggcaggcaattgttcagaaatataaataccttgctgaagatagcaacatgtctgtgccatctgaaccaagcagcccccagagcagtacgagaacacgatcaccatctccagatgacattctggagcgagtagctgctgatgttaaagagtatgaacgggaaaatgttgatacatttgaggcctcagtgaaagccaagcataatctaatgacagttgaacagaataatggttcatctcagaagaagttgttggcacctgatatgtttacagaatctgatgatatgtttgctgcgtattttgatagtgctcgtcttcgggccgctggcattggaaaagatttcaaagagaatcccaacctcagagataactggaccgatgcagaaggctattatcgtgtgaacataggtgaagtcctagataaacgttacaatgtgtatggctacactgggcaaggtgtattcagtaatgttgtacgagccagagataatgcaagagccaaccaagaagtggctgtaaagatcatcagaaacaatgagctcatgcaaaagactggtttaaaagaattagagttcttgaaaaaacttaatgatgctgatcctgatgacaaatttcattgtctgagactcttcaggcacttctatcacaagcagcatctttgtctggtattcgagcctctcagcatgaacttacgagaggtgttaaaaaaatatggtaaagatgttggtcttcatattaaagctgtaagatcctatagtcagcagttgttcctggcattgaaactccttaaaagatgcaatatcctacatgcagatatcaagccagacaatatcctggttaatgaatccaaaactattttaaagctttgcgattttgggtcggcttcacatgttgcggataatgacataacaccttatcttgtcagtagattttatcgtgctcctgaaatcattataggtaaaagctatgactatggtatagatatgtggtctgtaggttgcaccttatacgaactctatactggaaaaattttattccctggcaaaaccaataaccatatgctgaagcttgcaatggatctcaaaggaaagatgccaaataagatgattcgaaaaggtgtgttcaaagatcagcattttgatcaaaatctcaacttcatgtacatagaagttgataaagtaacagagagggagaaagttactgttatgagcaccattaatccaactaaggacctgttggctgacttgattgggtgccagagacttcctgaagaccaacgtaagaaagtacaccagctaaaggacttgttggaccagattctgatgttggacccagctaaacgaattagcatcaaccaggccctacagcacgccttcatccaggaaaaaatttaaacaagatgaagaaactccaagggtttgagtaaatacaaagactgaagaaatttcacagcagtttattaatgtatataaacttataaatatttctccagcaaatttgaggaagcatgatatatttgaattaacaccaagggtgatatttcttttagagatgttagttaatctgttttgtgtcttacgtgaaatttcactgtagactgttttaaattgccaagactgcacaaaattacagtgctaatgtatatggttgcagttcacataaagacaaaagcatctgttatgaaatgagtagtaatattgggtggttgatttgttcttagcagacttggcttcattttggtcttgagataaaatggccagcataaatgctgtttatattcacgttttcctaggtgtgtgtgtgcaggccacagcagcatgcccttggtgtagtcagtgccgaaaggggtctgttccttcttgagcctgcctgcagggatggtctccttttaaagcaggttgtgtgcagcattcagtacactgaaggtaagctaaaccatcaacatctctggtgttttaagatgttattttattggaacaactgacaaatgagggatgttagctttgtggcagaattccctgcatgtgtgataactgatcttgttttattttttggcattgcaactgtggcatagttacaatttctgtttgttcatcacatttaaaattggaagagaacgcgcttgatggatagagcgccttcagtgtactgtttcttattaactttactttttttaaatcaacttgctatagactttatatacattttgttaaatatagttcctagtgacatagaaacgatgcgtagttttcatttactaattacaaatgttgaggcctaattctgaaagtcctcatatttaaaggctagacaacgtaatgaaatttttaactatttgtatgtcattttgaaagtgtactgctttatggtaaaagtgtttttcatttgttcattgttttcattatttgtgatcatgttgtctttcaatacaggcataaaccttccactcttgaacaaagcagctgctttttaaaagcggtaattgcttctttaccttttatttcttttgtaaatgaagcttttctttaagaatgtgactttaaagtgttgtctattgcataaaacagttgacactcacttattgtaaagtgaagattgttctactgcatgtgaagtggaccatgcagatttctgtatgttctcagtatgcatcactagataataaagtcttttgtgaacaaggcatttgtagccatttttaaaagtttttgtcttcagtgctggtaagtcaggtaaaccataaatagttaaaagcaaccttttgtttttttcctgaaagtttttaattgaaagtattattagttaaagatgtaaacctagccaaaattaccagtttattaataattaggatcctaattatttcaaaaaatcctacaaatattgtcagctttcagtgtagtgagattattcctgtaggttatggggtataattcaggatttaactaatgtttctgctattttctcacttttccttttgatggtgcggaaagagaaaaaggaaaacggggcacaggccattcgacgccttctccaaggggtctgatttgctgagacaccagcttcaccttcttaacaaggcacctaattacaacaagcatgcacattttggtgcattcaagaatggaaaatcagaatagcagcattgattcttctggtgcagctcagtggaagatgatgacaaccagaagacatgagctaagggtaagggactgttctgaagaacctttccatttagtgatcaagatatggaagctgatttctgaaaatgctcagtgtgtactctaattatttatggtaccatttgaattgtaacttgcattttagcagtgcatgtttctaattgacttactgggaaactgaataaaatatgcctcttattatca

SEQ ID NO: 326174 - DNA, 5208 bp, Homo sapiens
tccacttcccctaccctccaccgtccgggagccgccgccaccgccgccgaggagtcaggaagttcaagatggccgccgcggagacccagtcgctacgggagcagccagagatggaagatgctaattctgaaaagagtataaatgaagaaaatggagaagtatcagaagaccagtctcaaaataagcacagtcgtcacaaaaaaaagaagcataaacacagaagtaaacataagaaacataaacattcctcagaagaagacaaggataaaaaacataaacataagcataaacataagaaacacaaaagaaaagaggttattgatgcttctgataaagagggtatgtctccagcaaaaagaactaaacttgatgatttagctttgctagaagacttggaaaaacagagagccttgattaaggccgaacttgataatgagttaatggaaggaaaggtccagtctggtatggggctcattttgcaaggttatgagtctggctctgaagaagagggggaaattcatgaaaaggcaagaaatggaaataggtctagtactagatcttcaagtacaaaggggaaacttgaacttgtggacaataaaattactacaaagaaacgaagtaaaagcagatccaaagaacggactagacataggtctgataaaaagaaaagtaaggggggtattgaaatcgttaaagagaaaacaactaggagcaagtcaaaggagaggaaaaaatctaaaagcccatccaaaagaagtaagtctcaagatcaagcaaggaaatcaaaatcccctacccttagaaggcgatctcaagagaaaattggtaaggccagatctcctactgatgataaggttaaaattgaagataaaagtaaatcaaaagataggaaaaaatccccaattataaatgaaagtagaagtcgcgatcgaggtaaaaaatccagatccccagttgatttaagaggtaaatccaaagacagaaggtcacggtccaaagagagaaaatcaaaacggtctgaaactgataaagaaaagaagccaattaaatctccctctaaagatgcttcatctgggaaagaaaataggtcacccagcagaagacctggtcgtagtcctaaaagaagaagtttgtctccaaaaccacgtgataaatcaagaagaagcaggtctccacttttgaatgatagaagatctaagcagagcaaatccccctcgcggacactgtctcctgggagaagagccaagagccgatccttagaaagaaaacgacgagaaccagagaggagacgactttcttctccaagaacacgacctcgagatgatatcctcagtagacgtgaaagatcaaaagatgccagccccatcaatagatggtctccaacccgaagaagaagtagatctcccattagaaggaggtctcgttccccactcagacgtagcaggtctccaagaagaagaagcagatctcctcggagaagggacagaggtcggaggagcagatcacgcttgcgaaggcggtctcgatcacgcggtggtcgtagacgaaggagcagaagcaaagtaaaggaagataaatttaaaggaagtctttctgaaggaatgaaagttgagcaggaatcttcgtctgatgataaccttgaagactttgatgtagaggaagaagatgaagaagccctaatagaacagagaagaatccaaaggcaggcaattgttcagaaatataaataccttgctgaagatagcaacatgtctgtgccatctgaaccaagcagcccccagagcagtacgagaacacgatcaccatctccagatgacattctggagcgagtagctgctgatgttaaagagtatgaacgggaaaatgttgatacatttgaggcctcagtgaaagccaagcataatctaatgacagttgaacagaataatggttcatctcagaagaagttgttggcacctgatatgtttacagaatctgatgatatgtttgctgcgtattttgatagtgctcgtcttcgggccgctggcattggaaaagatttcaaagagaatcccaacctcagagataactggaccgatgcagaaggctattatcgtgtgaacataggtgaagtcctagataaacgttacaatgtgtatggctacactgggcaaggtgtattcagtaatgttgtacgagccagagataatgcaagagccaaccaagaagtggctgtaaagatcatcagaaacaatgagctcatgcaaaagactggtttaaaagaattagagttcttgaaaaaacttaatgatgctgatcctgatgacaaatttcattgtctgagactcttcaggcacttctatcacaagcagcatctttgtctggtattcgagcctctcagcatgaacttacgagaggtgttaaaaaaatatggtaaagatgttggtcttcatattaaagctgtaagatcctatagtcagcagttgttcctggcattgaaactccttaaaagatgcaatatcctacatgcagatatcaagccagacaatatcctggttaatgaatccaaaactattttaaagctttgcgattttgggtcggcttcacatgttgcggataatgacataacaccttatcttgtcagtagattttatcgtgctcctgaaatcattataggtaaaagctatgactatggtatagatatgtggtctgtaggttgcaccttatacgaactctatactggaaaaattttattccctggcaaaaccaataaccatatgctgaagcttgcaatggatctcaaaggaaagatgccaaataagatgattcgaaaaggtgtgttcaaagatcagcattttgatcaaaatctcaacttcatgtacatagaagttgataaagtaacagagagggagaaagttactgttatgagcaccattaatccaactaaggacctgttggctgacttgattgggtgccagagacttcctgaagaccaacgtaagaaagtacaccagctaaaggacttgttggaccagattctgatgttggacccagctaaacgaattagcatcaaccaggccctacagcacgccttcatccaggaaaaaatttaaacaagatgaagaaactccaagggtttgagtaaatacaaagactgaagaaatttcacagcagtttattaatgtatataaacttataaatatttctccagcaaatttgaggaagcatgatatatttgaattaacaccaagggtgatatttcttttagagatgttagttaatctgttttgtgtcttacgtgaaatttcactgtagactgttttaaattgccaagactgcacaaaattacagtgctaatgtatatggttgcagttcacataaagacaaaagcatctgttatgaaatgagtagtaatattgggtggttgatttgttcttagcagacttggcttcattttggtcttgagataaaatggccagcataaatgctgtttatattcacgttttcctaggtgtgtgtgtgcaggccacagcagcatgcccttggtgtagtcagtgccgaaaggggtctgttccttcttgagcctgcctgcagggatggtctccttttaaagcaggttgtgtgcagcattcagtacactgaaggtaagctaaaccatcaacatctctggtgttttaagatgttattttattggaacaactgacaaatgagggatgttagctttgtggcagaattccctgcatgtgtgataactgatcttgttttattttttggcattgcaactgtggcatagttacaatttctgtttgttcatcacatttaaaattggaagagaacgcgcttgatggatagagcgccttcagtgtactgtttcttattaactttactttttttaaatcaacttgctatagactttatatacattttgttaaatatagttcctagtgacatagaaacgatgcgtagttttcatttactaattacaaatgttgaggcctaattctgaaagtcctcatatttaaaggctagacaacgtaatgaaatttttaactatttgtatgtcattttgaaagtgtactgctttatggtaaaagtgtttttcatttgttcattgttttcattatttgtgatcatgttgtctttcaatacaggcataaaccttccactcttgaacaaagcagctgctttttaaaagcggtaattgcttctttaccttttatttcttttgtaaatgaagcttttctttaagaatgtgactttaaagtgttgtctattgcataaaacagttgacactcacttattgtaaagtgaagattgttctactgcatgtgaagtggaccatgcagatttctgtatgttctcagtatgcatcactagataataaagtcttttgtgaacaaggcatttgtagccatttttaaaagtttttgtcttcagtgctggtaagtcaggtaaaccataaatagttaaaagcaaccttttgtttttttcctgaaagtttttaattgaaagtattattagttaaagatgtaaacctagccaaaattaccagtttattaataattaggatcctaattatttcaaaaaatcctacaaatattgtcagctttcagtgtagtgagattattcctgtaggttatggggtataattcaggatttaactaatgtttctgctattttctcacttttccttttgatggtgcggaaagagaaaaaggaaaacggggcacaggccattcgacgccttctccaaggggtctgatttgctgagacaccagcttcaccttcttaacaaggcacctaattacaacaagcatgcacattttggtgcattcaagaatggaaaatcagaatagcagcattgattcttctggtgggttttgctccatttaaagacatgaaatgaactacagccaggaaggtgatagatgatataataagccacctctgaacctacaccccgtctcttcacggtttagacttactaaaataaatacaaggtgcagctcagtggaagatgatgacaaccagaagacatgagctaagggtaagggactgttctgaagaacctttccatttagtgatcaagatatggaagctgatttctgaaaatgctcagtgtgtactctaattatttatggtaccatttgaattgtaacttgcattttagcagtgcatgtttctaattgacttactgggaaactgaataaaatatgcctcttattatca

SEQ ID NO: 326175 - DNA, 4512 bp, Homo sapiens
tccacttcccctaccctccaccgtccgggagccgccgccaccgccgccgaggagtcaggaagttcaagatggccgccgcggagacccagtcgctacgggagcagccagagatggaagatgctaattctgaaaagagtataaatgaagaaaatggagaagtatcagaagaccagtctcaaaataagcacagtcgtcacaaaaaaaagaagcataaacacagaagtaaacataagaaacataaacattcctcagaagaagacaaggataaaaaacataaacataagcataaacataagaaacacaaaagaaaagaggttattgatgcttctgataaagagggtatgtctccagcaaaaagaactaaacttgatgatttagctttgctagaagacttggaaaaacagagagccttgattaaggccgaacttgataatgagttaatggaaggaaaggtccagtctggtatggggctcattttgcaaggttatgagtctggctctgaagaagagggggaaattcatgaaaaggcaagaaatggaaataggtctagtactagatcttcaagtacaaaggggaaacttgaacttgtggacaataaaattactacaaagaaacgaagtaaaagcagatccaaagaacggactagacataggtctgataaaaagaaaagtaaggggggtattgaaatcgttaaagagaaaacaactaggagcaagtcaaaggagaggaaaaaatctaaaagcccatccaaaagaagtaagtctcaagatcaagcaaggaaatcaaaatcccctacccttagaaggcgatctcaagagaaaattggtaaggccagatctcctactgatgataaggttaaaattgaagataaaagtaaatcaaaagataggaaaaaatccccaattataaatgaaagtagaagtcgcgatcgaggtaaaaaatccagatccccagttgatttaagaggtaaatccaaagacagaaggtcacggtccaaagagagaaaatcaaaacggtctgaaactgataaagaaaagaagccaattaaatctccctctaaagatgcttcatctgggaaagaaaataggtcacccagcagaagacctggtcgtagtcctaaaagaagaagtttgtctccaaaaccacgtgataaatcaagaagaagcaggtctccacttttgaatgatagaagatctaagcagagcaaatccccctcgcggacactgtctcctgggagaagagccaagagccgatccttagaaagaaaacgacgagaaccagagaggagacgactttcttctccaagaacacgacctcgagatgatatcctcagtagacgtgaaagatcaaaagatgccagccccatcaatagatggtctccaacccgaagaagaagtagatctcccattagaaggaggtctcgttccccactcagacgtagcaggtctccaagaagaagaagcagatctcctcggagaagggacagaggtcggaggagcagatcacgcttgcgaaggcggtctcgatcacgcggtggtcgtagacgaaggagcagaagcaaagtaaaggaagataaatttaaaggaagtctttctgaaggaatgaaagttgagcaggaatcttcgtctgatgataaccttgaagactttgatgtagaggaagaagatgaagaagccctaatagaacagagaagaatccaaaggcaggcaattgttcagaaatataaataccttgctgaagatagcaacatgtctgtgccatctgaaccaagcagcccccagagcagtacgagaacacgatcaccatctccagatgacattctggagcgagtagctgctgatgttaaagagtatgaacgggaaaatgttgatacatttgaggcctcagtgaaagccaagcataatctaatgacagttgaacagaataatggttcatctcagaagaagttgttggcacctgatatgtttacagaatctgatgatatgtttgctgcgtattttgatagtgctcgtcttcgggccgctggcattggaaaagatttcaaagagaatcccaacctcagagataactggaccgatgcagaaggctattatcgtgtgaacataggtgaagtcctagataaacgttacaatgtgtatggctacactgggcaaggtgtattcagtaatgttgtacgagccagagataatgcaagagccaaccaagaagtggctgtaaagatcatcagaaacaatgagctcatgcaaaagactggtttaaaagaattagagttcttgaaaaaacttaatgatgctgatcctgatgacaaatttcattgtctgagactcttcaggcacttctatcacaagcagcatctttgtctggtattcgagcctctcagcatgaacttacgagaggtgttaaaaaaatatggtaaagatgttggtcttcatattaaagctgtaagatcctatagtcagcagttgttcctggcattgaaactccttaaaagatgcaatatcctacatgcagatatcaagccagacaatatcctggttaatgaatccaaaactattttaaagctttgcgattttgggtcggcttcacatgttgcggataatgacataacaccttatcttgtcagtagattttatcgtgctcctgaaatcattataggtaaaagctatgactatggtatagatatgtggtctgtaggttgcaccttatacgaactctatactggaaaaattttattccctggcaaaaccaataaccatatgctgaagcttgcaatggatctcaaaggaaagatgccaaataagatgattcgaaaaggtgtgttcaaagatcagcattttgatcaaaatctcaacttcatgtacatagaagttgataaagtaacagagagggagaaagttactgttatgagcaccattaatccaactaaggacctgttggctgacttgattgggtgccagagacttcctgaagaccaacgtaagaaagtacaccagctaaaggacttgttggaccagattctgatgttggacccagctaaacgaattagcatcaaccaggccctacagcacgccttcatccaggaaaaaatttaaacaagatgaagaaactccaagggtttgagtaaatacaaagactgaagaaatttcacagcagtttattaatgtatataaacttataaatatttctccagcaaatttgaggaagcatgatatatttgaattaacaccaagggtgatatttcttttagagatgttagttaatctgttttgtgtcttacgtgaaatttcactgtagactgttttaaattgccaagactgcacaaaattacagtgctaatgtatatggttgcagttcacataaagacaaaagcatctgttatgaaatgagtagtaatattgggtggttgatttgttcttagcagacttggcttcattttggtcttgagataaaatggccagcataaatgctgtttatattcacgttttcctaggtgtgtgtgtgcaggccacagcagcatgcccttggtgtagtcagtgccgaaaggggtctgttccttcttgagcctgcctgcagggatggtctccttttaaagcaggttgtgtgcagcattcagtacactgaaggtaagctaaaccatcaacatctctggtgttttaagatgttattttattggaacaactgacaaatgagggatgttagctttgtggcagaattccctgcatgtgtgataactgatcttgttttattttttggcattgcaactgtggcatagttacaatttctgtttgttcatcacatttaaaattggaagagaacgcgcttgatggatagagcgccttcagtgtactgtttcttattaactttactttttttaaatcaacttgctatagactttatatacattttgttaaatatagttcctagtgacatagaaacgatgcgtagttttcatttactaattacaaatgttgaggcctaattctgaaagtcctcatatttaaaggctagacaacgtaatgaaatttttaactatttgtatgtcattttgaaagtgtactgctttatggtaaaagtgtttttcatttgttcattgttttcattatttgtgatcatgttgtctttcaatacaggcataaaccttccactcttgaacaaagcagctgctttttaaaagcggtaattgcttctttaccttttatttcttttgtaaatgaagcttttctttaagaatgtgactttaaagtgttgtctattgcataaaacagttgacactcacttattgtaaagtgaagattgttctactgcatgtgaagtggaccatgcagatttctgtatgttctcagtatgcatcactagataataaagtcttttgtgaacaaggaaaaaaaaaaaatgaaaaaaaaaaaaaagggggggcggaataaaagtttcccttgggggggggccaaattttaggggttaccaagattttttggtacaaaaggggggcccatataggggagggcggaattt

SEQ ID NO: 326176 - DNA, 3956 bp, Homo sapiens
tccacttcccctaccctccaccgtccgggagccgccgccaccgccgccgaggagtcaggaagttcaagatggccgccgcggagacccagtcgctacgggagcagccagagatggaagatgctaattctgaaaagagtataaatgaagaaaatggagaagtatcagaagaccagtctcaaaataagcacagtcgtcacaaaaaaaagaagcataaacacagaagtaaacataagaaacataaacattcctcagaagaagacaaggataaaaaacataaacataagcataaacataagaaacacaaaagaaaagaggttattgatgcttctgataaagagggtatgtctccagcaaaaagaactaaacttgatgatttagctttgctagaagacttggaaaaacagagagccttgattaaggccgaacttgataatgagttaatggaaggaaaggtccagtctggtatggggctcattttgcaaggttatgagtctggctctgaagaagagggggaaattcatgaaaaggcaagaaatggaaataggtctagtactagatcttcaagtacaaaggggaaacttgaacttgtggacaataaaattactacaaagaaacgaagtaaaagcagatccaaagaacggactagacataggtctgataaaaagaaaagtaaggggggtattgaaatcgttaaagagaaaacaactaggagcaagtcaaaggagaggaaaaaatctaaaagcccatccaaaagaagtaagtctcaagatcaagcaaggaaatcaaaatcccctacccttagaaggcgatctcaagagaaaattggtaaggccagatctcctactgatgataaggttaaaattgaagataaaagtaaatcaaaagataggaaaaaatccccaattataaatgaaagtagaagtcgcgatcgaggtaaaaaatccagatccccagttgatttaagaggtaaatccaaagacagaaggtcacggtccaaagagagaaaatcaaaacggtctgaaactgataaagaaaagaagccaattaaatctccctctaaagatgcttcatctgggaaagaaaataggtcacccagcagaagacctggtcgtagtcctaaaagaagaagtttgtctccaaaaccacgtgataaatcaagaagaagcaggtctccacttttgaatgatagaagatctaagcagagcaaatccccctcgcggacactgtctcctgggagaagagccaagagccgatccttagaaagaaaacgacgagaaccagagaggagacgactttcttctccaagaacacgacctcgagatgatatcctcagtagacgtgaaagatcaaaagatgccagccccatcaatagatggtctccaacccgaagaagaagtagatctcccattagaaggaggtctcgttccccactcagacgtagcaggtctccaagaagaagaagcagatctcctcggagaagggacagaggtcggaggagcagatcacgcttgcgaaggcggtctcgatcacgcggtggtcgtagacgaaggagcagaagcaaagtaaaggaagataaatttaaaggaagtctttctgaaggaatgaaagttgagcaggaatcttcgtctgatgataaccttgaagactttgatgtagaggaagaagatgaagaagccctaatagaacagagaagaatccaaaggcaggcaattgttcagaaatataaataccttgctgaagatagcaacatgtctgtgccatctgaaccaagcagcccccagagcagtacgagaacacgatcaccatctccagatgacattctggagcgagtagctgctgatgttaaagagtatgaacgggaaaatgttgatacatttgaggcctcagtgaaagccaagcataatctaatgacagttgaacagaataatggttcatctcagaagaagttgttggcacctgatatgtttacagaatctgatgatatgtttgctgcgtattttgatagtgctcgtcttcgggccgctggcattggaaaagatttcaaagagaatcccaacctcagagataactggaccgatgcagaaggctattatcgtgtgaacataggtgaagtcctagataaacgttacaatgtgtatggctacactgggcaaggtgtattcagtaatgttgtacgagccagagataatgcaagagccaaccaagaagtggctgtaaagatcatcagaaacaatgagctcatgcaaaagactggtttaaaagaattagagttcttgaaaaaacttaatgatgctgatcctgatgacaaatttcattgtctgagactcttcaggcacttctatcacaagcagcatctttgtctggtattcgagcctctcagcatgaacttacgagaggtgttaaaaaaatatggtaaagatgttggtcttcatattaaagctgtaagatcctatagtcagcagttgttcctggcattgaaactccttaaaagatgcaatatcctacatgcagatatcaagccagacaatatcctggttaatgaatccaaaactattttaaagctttgcgattttgggtcggcttcacatgttgcggataatgacataacaccttatcttgtcagtagattttatcgtgctcctgaaatcattataggtaaaagctatgactatggtatagatatgtggtctgtaggttgcaccttatacgaactctatactggaaaaattttattccctggcaaaaccaataaccatatgctgaagcttgcaatggatctcaaaggaaagatgccaaataagatgattcgaaaaggtgtgttcaaagatcagcattttgatcaaaatctcaacttcatgtacatagaagttgataaagtaacagagagggagaaagttactgttatgagcaccattaatccaactaaggacctgttggctgacttgattgggtgccagagacttcctgaagaccaacgtaagaaagtacaccagctaaaggacttgttggaccagattctgatgttggacccagctaaacgaattagcatcaaccaggccctacagcacgccttcatccaggaaaaaatttaaacaagatgaagaaactccaagggtttgagtaaatacaaagactgaagaaatttcacagcagtttattaatgtatataaacttataaatatttctccagcaaatttgaggaagcatgatatatttgaattaacaccaagggtgatatttcttttagagatgttagttaatctgttttgtgtcttacgtgaaatttcactgtagactgttttaaattgccaagactgcacaaaattacagtgctaatgtatatggttgcagttcacataaagacaaaagcatctgttatgaaatgagtagtaatattgggtggttgatttgttcttagcagacttggcttcattttggtcttgagataaaatggccagcataaatgctgtttatattcacgttttcctaggtgtgtgtgtgcaggccacagcagcatgcccttggtgtagtcagtgccgaaaggggtctgttccttcttgagcctgcctgcagggatggtctccttttaaagcaggttgtgtgcagcattcagtacactgaaggtaagctaaaccatcaacatctctggtgttttaagatgttattttattggaacaactgacaaatgagggatgttagctttgtggcagaattccctgcatgtgtgataactgatcttgttttattttttggcatcctttgtggcagcacgtgctgccacaaaggatgccacctctcttcctgtcaccgacacttcctcagcatccacaggtcacgccacccctcttcctgtcaccgacacttcctcagcatccacaggtcacgccacctctcttcatgtcaccgacacttcctcagcatccacaggtcacgccacccctcttccttcccttaaa

SEQ ID NO: 326177 - DNA, 5927 bp, Homo sapiens
tccacttcccctaccctccaccgtccgggagccgccgccaccgccgccgaggagtcaggaagttcaagatggccgccgcggagacccagtcgctacgggagcagccagagatggaagatgctaattctgaaaagagtataaatgaagaaaatggagaagtatcagaagaccagtctcaaaataagcacagtcgtcacaaaaaaaagaagcataaacacagaagtaaacataagaaacataaacattcctcagaagaagacaaggataaaaaacataaacataagcataaacataagaaacacaaaagaaaagaggttattgatgcttctgataaagagggtatgtctccagcaaaaagaactaaacttgatgatttagctttgctagaagacttggaaaaacagagagccttgattaaggccgaacttgataatgagttaatggaaggaaaggtccagtctggtatggggctcattttgcaaggttatgagtctggctctgaagaagagggggaaattcatgaaaaggcaagaaatggaaataggtctagtactagatcttcaagtacaaaggggaaacttgaacttgtggacaataaaattactacaaagaaacgaagtaaaagcagatccaaagaacggactagacataggtctgataaaaagaaaagtaaggggggtattgaaatcgttaaagagaaaacaactaggagcaagtcaaaggagaggaaaaaatctaaaagcccatccaaaagaagtaagtctcaagatcaagcaaggaaatcaaaatcccctacccttagaaggcgatctcaagagaaaattggtaaggccagatctcctactgatgataaggttaaaattgaagataaaagtaaatcaaaagataggaaaaaatccccaattataaatgaaagtagaagtcgcgatcgaggtaaaaaatccagatccccagttgatttaagaggtaaatccaaagacagaaggtcacggtccaaagagagaaaatcaaaacggtctgaaactgataaagaaaagaagccaattaaatctccctctaaagatgcttcatctgggaaagaaaataggtcacccagcagaagacctggtcgtagtcctaaaagaagaagtttgtctccaaaaccacgtgataaatcaagaagaagcaggtctccacttttgaatgatagaagatctaagcagagcaaatccccctcgcggacactgtctcctgggagaagagccaagagccgatccttagaaagaaaacgacgagaaccagagaggagacgactttcttctccaagaacacgacctcgagatgatatcctcagtagacgtgaaagatcaaaagatgccagccccatcaatagatggtctccaacccgaagaagaagtagatctcccattagaaggaggtctcgttccccactcagacgtagcaggtctccaagaagaagaagcagatctcctcggagaagggacagaggtcggaggagcagatcacgcttgcgaaggcggtctcgatcacgcggtggtcgtagacgaaggagcagaagcaaagtaaaggaagataaatttaaaggaagtctttctgaaggaatgaaagttgagcaggaatcttcgtctgatgataaccttgaagactttgatgtagaggaagaagatgaagaagccctaatagaacagagaagaatccaaaggcaggcaattgttcagaaatataaataccttgctgaagatagcaacatgtctgtgccatctgaaccaagcagcccccagagcagtacgagaacacgatcaccatctccagatgacattctggagcgagtagctgctgatgttaaagagtatgaacgggaaaatgttgatacatttgaggcctcagtgaaagccaagcataatctaatgacagttgaacagaataatggttcatctcagaagaagttgttggcacctgatatgtttacagaatctgatgatatgtttgctgcgtattttgatagtgctcgtcttcgggccgctggcattggaaaagatttcaaagagaatcccaacctcagagataactggaccgatgcagaaggctattatcgtgtgaacataggtgaagtcctagataaacgttacaatgtgtatggctacactgggcaaggtgtattcagtaatgttgtacgagccagagataatgcaagagccaaccaagaagtggctgtaaagatcatcagaaacaatgagctcatgcaaaagactggtttaaaagaattagagttcttgaaaaaacttaatgatgctgatcctgatgacaaatttcattgtctgagactcttcaggcacttctatcacaagcagcatctttgtctggtattcgagcctctcagcatgaacttacgagaggtgttaaaaaaatatggtaaagatgttggtcttcatattaaagctgtaagatcctatagtcagcagttgttcctggcattgaaactccttaaaagatgcaatatcctacatgcagatatcaagccagacaatatcctggttaatgaatccaaaactattttaaagctttgcgattttgggtcggcttcacatgttgcggataatgacataacaccttatcttgtcagtagattttatcgtgctcctgaaatcattataggtaaaagctatgactatggtatagatatgtggtctgtaggttgcaccttatacgaactctatactggaaaaattttattccctggcaaaaccaataaccatatgctgaagcttgcaatggatctcaaaggaaagatgccaaataagatgattcgaaaaggtgtgttcaaagatcagcattttgatcaaaatctcaacttcatgtacatagaagttgataaagtaacagagagggagaaagttactgttatgagcaccattaatccaactaaggacctgttggctgacttgattgggtgccagagacttcctgaagaccaacgtaagaaagtacaccagctaaaggacttgttggaccagattctgatgttggacccagctaaacgaattagcatcaaccaggccctacagcacgccttcatccaggaaaaaatttaaacaagatgaagaaactccaagggtttgagtaaatacaaagactgaagaaatttcacagcagtttattaatgtgtgtgtgtgcaggccacagcagcatgcccttggtgtagtcagtgccgaaaggggtctgttccttcttgagcctgcctgcagggatggtctccttttaaagcaggttgtgtgcagcattcagtacactgaaggcataaaccttccactcttgaacaaagcagctgctttttaaaagcggtaattgcttctttaccttttatttcttttgtaaatgaagcttttctttaagaatgtgactttaaagtgttgtctattgcataaaacagttgacactcacttattgtaaagtgaagattgttctactgcatgtgaagtggaccatgcagatttctgtatgttctcagtatgcatcactagataataaagtcttttgtgaacaaggcatttgtagccatttttaaaagtttttgtcttcagtgctggtaagtcaggtaaaccataaatagttaaaagcaaccttttgtttttttcctgaaagtttttaattgaaagtattattagttaaagatgtaaacctagccaaaattaccagtttattaataattaggatcctaattatttcaaaaaatcctacaaatattgtcagctttcagtgtagtgagattattcctgtaggttatggggtataattcaggatttaactaatgtttctgctattttctcacttttccttttgatggtgcggaaagagaaaaaggaaaacggggcacaggccattcgacgccttctccaaggggtctgatttgctgagacaccagcttcaccttcttaacaaggcacctaattacaacaagcatgcacattttggtgcattcaagaatggaaaatcagaatagcagcattgattcttctggtgcagctcagtggaagatgatgacaaccagaagacatgagctaaggtttctgtcctataaaagatttattaaaaaacaatccttcatttattttttgtctaattttttagttttcagcattatgatttgggttttattggtgtttggtatttagaattagtgctgttgtggagtgcgtctgtaaagtgcttgttttatcatacttcctgcctctcccctcccccagtttctcctcccctaaaataaaaatagtggtcaactttagtaatataaaaggctgctggatgctgagattccacataacacatggttgtcaaaattggatgttaaggattcttagaaaaacagcaaccaccagaatagcatatatctaaaagtagtcttcagctttaggcagatgcaaaagaatacaaactggaatattaagaatactgttcaactcctttagtatctgttccccaacttaccctgtagaaacctcgttattaaccagtgttccagtcttaaagtagacaaaatattcagagccattttttttaagggaaatgaaaaagatactctgggttttttatactccccaatttagcatatctagactacctatttgaaaggaaccctatcaactgtcttatgtacgttacatgattttcctacactctgtaattttgctgaggtgcaatttggaactctgcaagacctactagattgaatttatttagtgaatgctcctgaataaatgtgcattcctcttttagagtagctgtatgcttttcaaatgctatctgccgtgaattttttgcttttattatactttatggcaaaagtgatatcaagtgattgtcagacttgagggctcatagaagtgttaggtacggctctcaaagatgttacagttttttctagggttgggagaatagttgagatctggaaagcatagacattttttacactctggatagactttattcttgaagatcatcagaaatgaggttggaatttcgaggttttgagcagggggagcatcttatattcacccttaaatcgttattaatacatcctgttttcttcattccctgatagctatctcatttcactctactgtctcaaaattttgttttaaaataatagaaatgttttgccattattaagtaccactttattcctaacaaaaataagtactcaggacttttttttcaaaatgaaatatttatgtactgttttatggtatgtggtagagtaagtaaaatgtaatgttctcagttttgttccatatttgcattcctcttatgctttacctgtattttatcatttgtaagcagaactctagctatatggggtagaaataaaatctctgagatgaaacaaaggaatcaacatgataaaatttaggcgaagtagttaagaaatggcccttttgaatgttgaagataggaaagaaagccatatattcaaatatgtaattttcctcatttagttataatgacatctttaccaattgggcttcataaatgtgtttctttcttaatagtatcctagttccagcatatattcaacatgaattttatcattctcctcctaatggaatgtcttccttatagaaatgttcacgacaaattcatttgtgttttttacatgtcaataatgtatgctaaattaaaatgttttccagttattctgatagatgtcattatggcatccttaatttttcttctccttctgtatatagggtaagggactgttctgaagaacctttccatttagtgatcaagatatggaagctgatttctgaaaatgctcagtgtgtactctaattatttatggtaccatttgaattgtaacttgcattttagcagtgcatgtttctaattgacttactgggaaactgaataaaatatgcctcttattatca

SEQ ID NO: 326178 - DNA, 5415 bp, Homo sapiens
tccacttcccctaccctccaccgtccgggagccgccgccaccgccgccgaggagtcaggaagttcaagatggccgccgcggagacccagtcgctacgggagcagccagagatggaagatgctaattctgaaaagagtataaatgaagaaaatggagaagtatcagaagaccagtctcaaaataagcacagtcgtcacaaaaaaaagaagcataaacacagaagtaaacataagaaacataaacattcctcagaagaagacaaggataaaaaacataaacataagcataaacataagaaacacaaaagaaaagaggttattgatgcttctgataaagagggtatgtctccagcaaaaagaactaaacttgatgatttagctttgctagaagacttggaaaaacagagagccttgattaaggccgaacttgataatgagttaatggaaggaaaggtccagtctggtatggggctcattttgcaaggttatgagtctggctctgaagaagagggggaaattcatgaaaaggcaagaaatggaaataggtctagtactagatcttcaagtacaaaggggaaacttgaacttgtggacaataaaattactacaaagaaacgaagtaaaagcagatccaaagaacggactagacataggtctgataaaaagaaaagtaaggggggtattgaaatcgttaaagagaaaacaactaggagcaagtcaaaggagaggaaaaaatctaaaagcccatccaaaagaagtaagtctcaagatcaagcaaggaaatcaaaatcccctacccttagaaggcgatctcaagagaaaattggtaaggccagatctcctactgatgataaggttaaaattgaagataaaagtaaatcaaaagataggaaaaaatccccaattataaatgaaagtagaagtcgcgatcgaggtaaaaaatccagatccccagttgatttaagaggtaaatccaaagacagaaggtcacggtccaaagagagaaaatcaaaacggtctgaaactgataaagaaaagaagccaattaaatctccctctaaagatgcttcatctgggaaagaaaataggtcacccagcagaagacctggtcgtagtcctaaaagaagaagtttgtctccaaaaccacgtgataaatcaagaagaagcaggtctccacttttgaatgatagaagatctaagcagagcaaatccccctcgcggacactgtctcctgggagaagagccaagagccgatccttagaaagaaaacgacgagaaccagagaggagacgactttcttctccaagaacacgacctcgagatgatatcctcagtagacgtgaaagatcaaaagatgccagccccatcaatagatggtctccaacccgaagaagaagtagatctcccattagaaggaggtctcgttccccactcagacgtagcaggtctccaagaagaagaagcagatctcctcggagaagggacagaggtcggaggagcagatcacgcttgcgaaggcggtctcgatcacgcggtggtcgtagacgaaggagcagaagcaaagtaaaggaagataaatttaaaggaagtctttctgaaggaatgaaagttgagcaggaatcttcgtctgatgataaccttgaagactttgatgtagaggaagaagatgaagaagccctaatagaacagagaagaatccaaaggcaggcaattgttcagaaatataaataccttgctgaagatagcaacatgtctgtgccatctgaaccaagcagcccccagagcagtacgagaacacgatcaccatctccagatgacattctggagcgagtagctgctgatgttaaagagtatgaacgggaaaatgttgatacatttgaggcctcagtgaaagccaagcataatctaatgacagttgaacagaataatggttcatctcagaagaagttgttggcacctgatatgtttacagaatctgatgatatgtttgctgcgtattttgatagtgctcgtcttcgggccgctggcattggaaaagatttcaaagagaatcccaacctcagagataactggaccgatgcagaaggctattatcgtgtgaacataggtgaagtcctagataaacgttacaatgtgtatggctacactgggcaaggtgtattcagtaatgttgtacgagccagagataatgcaagagccaaccaagaagtggctgtaaagatcatcagaaacaatgagctcatgcaaaagactggtttaaaagaattagagttcttgaaaaaacttaatgatgctgatcctgatgacaaatttcattgtctgagactcttcaggcacttctatcacaagcagcatctttgtctggtattcgagcctctcagcatgaacttacgagaggtgttaaaaaaatatggtaaagatgttggtcttcatattaaagctgtaagatcctatagtcagcagttgttcctggcattgaaactccttaaaagatgcaatatcctacatgcagatatcaagccagacaatatcctggttaatgaatccaaaactattttaaagctttgcgattttgggtcggcttcacatgttgcggataatgacataacaccttatcttgtcagtagattttatcgtgctcctgaaatcattataggtaaaagctatgactatggtatagatatgtggtctgtaggttgcaccttatacgaactctatactggaaaaattttattccctggcaaaaccaataaccatatgctgaagcttgcaatggatctcaaaggaaagatgccaaataagatgattcgaaaaggtgtgttcaaagatcagcattttgatcaaaatctcaacttcatgtacatagaagttgataaagtaacagagagggagaaagttactgttatgagcaccattaatccaactaaggacctgttggctgacttgattgggtgccagagacttcctgaagaccaacgtaagaaagtacaccagctaaaggacttgttggaccagattctgatgttggacccagctaaacgaattagcatcaaccaggccctacagcacgccttcatccaggaaaaaatttaaacaagatgaagaaactccaagggtttgagtaaatacaaagactgaagaaatttcacagcagtttattaatgtgtgtgtgtgcaggccacagcagcatgcccttggtgtagtcagtgccgaaaggggtctgttccttcttgagcctgcctgcagggatggtctccttttaaagcaggttgtgtgcagcattcagtacactgaaggcataaaccttccactcttgaacaaagcagctgctttttaaaagcgagaaaaaggaaaacggggcacaggccattcgacgccttctccaaggggtctgatttgctgagacaccagcttcaccttcttaacaaggcacctaattacaacaagcatgcacattttggtgcattcaagaatggaaaatcagaatagcagcattgattcttctggtgcagctcagtggaagatgatgacaaccagaagacatgagctaaggtttctgtcctataaaagatttattaaaaaacaatccttcatttattttttgtctaattttttagttttcagcattatgatttgggttttattggtgtttggtatttagaattagtgctgttgtggagtgcgtctgtaaagtgcttgttttatcatacttcctgcctctcccctcccccagtttctcctcccctaaaataaaaatagtggtcaactttagtaatataaaaggctgctggatgctgagattccacataacacatggttgtcaaaattggatgttaaggattcttagaaaaacagcaaccaccagaatagcatatatctaaaagtagtcttcagctttaggcagatgcaaaagaatacaaactggaatattaagaatactgttcaactcctttagtatctgttccccaacttaccctgtagaaacctcgttattaaccagtgttccagtcttaaagtagacaaaatattcagagccattttttttaagggaaatgaaaaagatactctgggttttttatactccccaatttagcatatctagactacctatttgaaaggaaccctatcaactgtcttatgtacgttacatgattttcctacactctgtaattttgctgaggtgcaatttggaactctgcaagacctactagattgaatttatttagtgaatgctcctgaataaatgtgcattcctcttttagagtagctgtatgcttttcaaatgctatctgccgtgaattttttgcttttattatactttatggcaaaagtgatatcaagtgattgtcagacttgagggctcatagaagtgttaggtacggctctcaaagatgttacagttttttctagggttgggagaatagttgagatctggaaagcatagacattttttacactctggatagactttattcttgaagatcatcagaaatgaggttggaatttcgaggttttgagcagggggagcatcttatattcacccttaaatcgttattaatacatcctgttttcttcattccctgatagctatctcatttcactctactgtctcaaaattttgttttaaaataatagaaatgttttgccattattaagtaccactttattcctaacaaaaataagtactcaggacttttttttcaaaatgaaatatttatgtactgttttatggtatgtggtagagtaagtaaaatgtaatgttctcagttttgttccatatttgcattcctcttatgctttacctgtattttatcatttgtaagcagaactctagctatatggggtagaaataaaatctctgagatgaaacaaaggaatcaacatgataaaatttaggcgaagtagttaagaaatggcccttttgaatgttgaagataggaaagaaagccatatattcaaatatgtaattttcctcatttagttataatgacatctttaccaattgggcttcataaatgtgtttctttcttaatagtatcctagttccagcatatattcaacatgaattttatcattctcctcctaatggaatgtcttccttatagaaatgttcacgacaaattcatttgtgttttttacatgtcaataatgtatgctaaattaaaatgttttccagttattctgatagatgtcattatggcatccttaatttttcttctccttctgtatatagggtaagggactgttctgaagaacctttccatttagtgatcaagatatggaagctgatttctgaaaatgctcagtgtgtactctaattatttatggtaccatttgaattgtaacttgcattttagcagtgcatgtttctaattgacttactgggaaactgaataaaatatgcctcttattatca

SEQ ID NO: 326179 - DNA, 4162 bp, Homo sapiens
ggctgattcctagaggatcacgtgaaagcacaccccggctcctgaatcattataggtaaaagctatgactatggtatagatatgtggtctgtaggttgcaccttatacgaactctatactggaaaaattttattccctggcaaaaccaataaccatatgctgaagcttgcaatggatctcaaaggaaagatgccaaataagatgattcgaaaaggtgtgttcaaagatcagcattttgatcaaaatctcaacttcatgtacatagaagttgataaagtaacagagagggagaaagttactgttatgagcaccattaatccaactaaggacctgttggctgacttgattgggtgccagagacttcctgaagaccaacgtaagaaagtacaccagctaaaggacttgttggaccagattctgatgttggacccagctaaacgaattagcatcaaccaggccctacagcacgccttcatccaggaaaaaatttaaacaagatgaagaaactccaagggtttgagtaaatacaaagactgaagaaatttcacagcagtttattaatgtatataaacttataaatatttctccagcaaatttgaggaagcatgatatatttgaattaacaccaagggtgatatttcttttagagatgttagttaatctgttttgtgtcttacgtgaaatttcactgtagactgttttaaattgccaagactgcacaaaattacagtgctaatgtatatggttgcagttcacataaagacaaaagcatctgttatgaaatgagtagtaatattgggtggttgatttgttcttagcagacttggcttcattttggtcttgagataaaatggccagcataaatgctgtttatattcacgttttcctaggtgtgtgtgtgcaggccacagcagcatgcccttggtgtagtcagtgccgaaaggggtctgttccttcttgagcctgcctgcagggatggtctccttttaaagcaggttgtgtgcagcattcagtacactgaaggtaagctaaaccatcaacatctctggtgttttaagatgttattttattggaacaactgacaaatgagggatgttagctttgtggcagaattccctgcatgtgtgataactgatcttgttttattttttggcattgcaactgtggcatagttacaatttctgtttgttcatcacatttaaaattggaagagaacgcgcttgatggatagagcgccttcagtgtactgtttcttattaactttactttttttaaatcaacttgctatagactttatatacattttgttaaatatagttcctagtgacatagaaacgatgcgtagttttcatttactaattacaaatgttgaggcctaattctgaaagtcctcatatttaaaggctagacaacgtaatgaaatttttaactatttgtatgtcattttgaaagtgtactgctttatggtaaaagtgtttttcatttgttcattgttttcattatttgtgatcatgttgtctttcaatacaggcataaaccttccactcttgaacaaagcagctgctttttaaaagcggtaattgcttctttaccttttatttcttttgtaaatgaagcttttctttaagaatgtgactttaaagtgttgtctattgcataaaacagttgacactcacttattgtaaagtgaagattgttctactgcatgtgaagtggaccatgcagatttctgtatgttctcagtatgcatcactagataataaagtcttttgtgaacaaggcatttgtagccatttttaaaagtttttgtcttcagtgctggtaagtcaggtaaaccataaatagttaaaagcaaccttttgtttttttcctgaaagtttttaattgaaagtattattagttaaagatgtaaacctagccaaaattaccagtttattaataattaggatcctaattatttcaaaaaatcctacaaatattgtcagctttcagtgtagtgagattattcctgtaggttatggggtataattcaggatttaactaatgtttctgctattttctcacttttccttttgatggtgcggaaagagaaaaaggaaaacggggcacaggccattcgacgccttctccaaggggtctgatttgctgagacaccagcttcaccttcttaacaaggcacctaattacaacaagcatgcacattttggtgcattcaagaatggaaaatcagaatagcagcattgattcttctggtgcagctcagtggaagatgatgacaaccagaagacatgagctaaggtttctgtcctataaaagatttattaaaaaacaatccttcatttattttttgtctaattttttagttttcagcattatgatttgggttttattggtgtttggtatttagaattagtgctgttgtggagtgcgtctgtaaagtgcttgttttatcatacttcctgcctctcccctcccccagtttctcctcccctaaaataaaaatagtggtcaactttagtaatataaaaggctgctggatgctgagattccacataacacatggttgtcaaaattggatgttaaggattcttagaaaaacagcaaccaccagaatagcatatatctaaaagtagtcttcagctttaggcagatgcaaaagaatacaaactggaatattaagaatactgttcaactcctttagtatctgttccccaacttaccctgtagaaacctcgttattaaccagtgttccagtcttaaagtagacaaaatattcagagccattttttttaagggaaatgaaaaagatactctgggttttttatactccccaatttagcatatctagactacctatttgaaaggaaccctatcaactgtcttatgtacgttacatgattttcctacactctgtaattttgctgaggtgcaatttggaactctgcaagacctactagattgaatttatttagtgaatgctcctgaataaatgtgcattcctcttttagagtagctgtatgcttttcaaatgctatctgccgtgaattttttgcttttattatactttatggcaaaagtgatatcaagtgattgtcagacttgagggctcatagaagtgttaggtacggctctcaaagatgttacagttttttctagggttgggagaatagttgagatctggaaagcatagacattttttacactctggatagactttattcttgaagatcatcagaaatgaggttggaatttcgaggttttgagcagggggagcatcttatattcacccttaaatcgttattaatacatcctgttttcttcattccctgatagctatctcatttcactctactgtctcaaaattttgttttaaaataatagaaatgttttgccattattaagtaccactttattcctaacaaaaataagtactcaggacttttttttcaaaatgaaatatttatgtactgttttatggtatgtggtagagtaagtaaaatgtaatgttctcagttttgttccatatttgcattcctcttatgctttacctgtattttatcatttgtaagcagaactctagctatatggggtagaaataaaatctctgagatgaaacaaaggaatcaacatgataaaatttaggcgaagtagttaagaaatggcccttttgaatgttgaagataggaaagaaagccatatattcaaatatgtaattttcctcatttagttataatgacatctttaccaattgggcttcataaatgtgtttctttcttaatagtatcctagttccagcatatattcaacatgaattttatcattctcctcctaatggaatgtcttccttatagaaatgttcacgacaaattcatttgtgttttttacatgtcaataatgtatgctaaattaaaatgttttccagttattctgatagatgtcattatggcatccttaatttttcttctccttctgtatatagggtaagggactgttctgaagaacctttccatttagtgatcaagatatggaagctgatttctgaaaatgctcagtgtgtactctaattatttatggtaccatttgaattgtaacttgcattttagcagtgcatgtttctaattgacttactgggaaactgaataaaatatgcctcttattatca

SEQ ID NO: 326180 - DNA, 2932 bp, Homo sapiens
tgattgcatttagactatggtgagctcaggtgattgatactcctgatgtgattgctatagactttatatacattttgttaaatatagttcctagtgacatagaaacgatgcgtagttttcatttactaattacaaatgttgaggcctaattctgaaagtcctcatatttaaaggctagacaacgtaatgaaatttttaactatttgtatgtcattttgaaagtgtactgctttatggtaaaagtgtttttcatttgttcattgttttcattatttgtgatcatgttgtctttcaatacaggcataaaccttccactcttgaacaaagcagctgctttttaaaagcggtaattgcttctttaccttttatttcttttgtaaatgaagcttttctttaagaatgtgactttaaagtgttgtctattgcataaaacagttgacactcacttattgtaaagtgaagattgttctactgcatgtgaagtggaccatgcagatttctgtatgttctcagtatgcatcactagataataaagtcttttgtgaacaaggcatttgtagccatttttaaaagtttttgtcttcagtgctggtaagtcaggtaaaccataaatagttaaaagcaaccttttgtttttttcctgaaagtttttaattgaaagtattattagttaaagatgtaaacctagccaaaattaccagtttattaataattaggatcctaattatttcaaaaaatcctacaaatattgtcagctttcagtgtagtgagattattcctgtaggttatggggtataattcaggatttaactaatgtttctgctattttctcacttttccttttgatggtgcggaaagagaaaaaggaaaacggggcacaggccattcgacgccttctccaaggggtctgatttgctgagacaccagcttcaccttcttaacaaggcacctaattacaacaagcatgcacattttggtgcattcaagaatggaaaatcagaatagcagcattgattcttctggtgcagctcagtggaagatgatgacaaccagaagacatgagctaaggtttctgtcctataaaagatttattaaaaaacaatccttcatttattttttgtctaattttttagttttcagcattatgatttgggttttattggtgtttggtatttagaattagtgctgttgtggagtgcgtctgtaaagtgcttgttttatcatacttcctgcctctcccctcccccagtttctcctcccctaaaataaaaatagtggtcaactttagtaatataaaaggctgctggatgctgagattccacataacacatggttgtcaaaattggatgttaaggattcttagaaaaacagcaaccaccagaatagcatatatctaaaagtagtcttcagctttaggcagatgcaaaagaatacaaactggaatattaagaatactgttcaactcctttagtatctgttccccaacttaccctgtagaaacctcgttattaaccagtgttccagtcttaaagtagacaaaatattcagagccattttttttaagggaaatgaaaaagatactctgggttttttatactccccaatttagcatatctagactacctatttgaaaggaaccctatcaactgtcttatgtacgttacatgattttcctacactctgtaattttgctgaggtgcaatttggaactctgcaagacctactagattgaatttatttagtgaatgctcctgaataaatgtgcattcctcttttagagtagctgtatgcttttcaaatgctatctgccgtgaattttttgcttttattatactttatggcaaaagtgatatcaagtgattgtcagacttgagggctcatagaagtgttaggtacggctctcaaagatgttacagttttttctagggttgggagaatagttgagatctggaaagcatagacattttttacactctggatagactttattcttgaagatcatcagaaatgaggttggaatttcgaggttttgagcagggggagcatcttatattcacccttaaatcgttattaatacatcctgttttcttcattccctgatagctatctcatttcactctactgtctcaaaattttgttttaaaataatagaaatgttttgccattattaagtaccactttattcctaacaaaaataagtactcaggacttttttttcaaaatgaaatatttatgtactgttttatggtatgtggtagagtaagtaaaatgtaatgttctcagttttgttccatatttgcattcctcttatgctttacctgtattttatcatttgtaagcagaactctagctatatggggtagaaataaaatctctgagatgaaacaaaggaatcaacatgataaaatttaggcgaagtagttaagaaatggcccttttgaatgttgaagataggaaagaaagccatatattcaaatatgtaattttcctcatttagttataatgacatctttaccaattgggcttcataaatgtgtttctttcttaatagtatcctagttccagcatatattcaacatgaattttatcattctcctcctaatggaatgtcttccttatagaaatgttcacgacaaattcatttgtgttttttacatgtcaataatgtatgctaaattaaaatgttttccagttattctgatagatgtcattatggcatccttaatttttcttctccttctgtatatagggtaagggactgttctgaagaacctttccatttagtgatcaagatatggaagctgatttctgaaaatgctcagtgtgtactctaattatttatggtaccatttgaattgtaacttgcattttagcagtgcatgtttctaattgacttactgggaaactgaataaaatatgcctcttattatca

SEQ ID NO: 326181 - DNA, 2041 bp, Homo sapiens
tgatgtttatggcttcattttatgtaattttttaagtaagttccactagaaacagttcatcttataccttcaaaactgttacctgttctttaaaaaacaaagttgcttgttacttgttctttgtgttttaggtgcagctcagtggaagatgatgacaaccagaagacatgagctaaggtttctgtcctataaaagatttattaaaaaacaatccttcatttattttttgtctaattttttagttttcagcattatgatttgggttttattggtgtttggtatttagaattagtgctgttgtggagtgcgtctgtaaagtgcttgttttatcatacttcctgcctctcccctcccccagtttctcctcccctaaaataaaaatagtggtcaactttagtaatataaaaggctgctggatgctgagattccacataacacatggttgtcaaaattggatgttaaggattcttagaaaaacagcaaccaccagaatagcatatatctaaaagtagtcttcagctttaggcagatgcaaaagaatacaaactggaatattaagaatactgttcaactcctttagtatctgttccccaacttaccctgtagaaacctcgttattaaccagtgttccagtcttaaagtagacaaaatattcagagccattttttttaagggaaatgaaaaagatactctgggttttttatactccccaatttagcatatctagactacctatttgaaaggaaccctatcaactgtcttatgtacgttacatgattttcctacactctgtaattttgctgaggtgcaatttggaactctgcaagacctactagattgaatttatttagtgaatgctcctgaataaatgtgcattcctcttttagagtagctgtatgcttttcaaatgctatctgccgtgaattttttgcttttattatactttatggcaaaagtgatatcaagtgattgtcagacttgagggctcatagaagtgttaggtacggctctcaaagatgttacagttttttctagggttgggagaatagttgagatctggaaagcatagacattttttacactctggatagactttattcttgaagatcatcagaaatgaggttggaatttcgaggttttgagcagggggagcatcttatattcacccttaaatcgttattaatacatcctgttttcttcattccctgatagctatctcatttcactctactgtctcaaaattttgttttaaaataatagaaatgttttgccattattaagtaccactttattcctaacaaaaataagtactcaggacttttttttcaaaatgaaatatttatgtactgttttatggtatgtggtagagtaagtaaaatgtaatgttctcagttttgttccatatttgcattcctcttatgctttacctgtattttatcatttgtaagcagaactctagctatatggggtagaaataaaatctctgagatgaaacaaaggaatcaacatgataaaatttaggcgaagtagttaagaaatggcccttttgaatgttgaagataggaaagaaagccatatattcaaatatgtaattttcctcatttagttataatgacatctttaccaattgggcttcataaatgtgtttctttcttaatagtatcctagttccagcatatattcaacatgaattttatcattctcctcctaatggaatgtcttccttatagaaatgttcacgacaaattcatttgtgttttttacatgtcaataatgtatgctaaattaaaatgttttccagttattctgatagatgtcattatggcatccttaatttttcttctccttctgtatatagggtaagggactgttctgaagaacctttccatttagtgatcaagatatggaagctgatttctgaaaatgctcagtgtgtactctaattatttatggtaccatttgaattgtaacttgcattttagcagtgcatgtttctaattgacttactgggaaactgaataaaatatgcctcttattatca

SEQ ID NO: 326182 - DNA, 2263 bp, Homo sapiens
agaagagaatttttcagaaatatatgtaatctttgctgtttggggggtaaaattaatgcttgtctccctgaggaatatggaaaataatcagattttaggggtttaaataatatttttaaattgtaaatgggatttttttattcacccaggcacctaattacaacaagcatgcacattttggtgcattcaagaatggaaaatcagaatagcagcattgattcttctggtgggttttgctccatttaaagacatgaaatgaactacagccaggaaggtgatagatgatataataagccacctctgaacctacaccccgtctcttcacggtttagacttactaaaataaatacaaggtgcagctcagtggaagatgatgacaaccagaagacatgagctaaggtttctgtcctataaaagatttattaaaaaacaatccttcatttattttttgtctaattttttagttttcagcattatgatttgggttttattggtgtttggtatttagaattagtgctgttgtggagtgcgtctgtaaagtgcttgttttatcatacttcctgcctctcccctcccccagtttctcctcccctaaaataaaaatagtggtcaactttagtaatataaaaggctgctggatgctgagattccacataacacatggttgtcaaaattggatgttaaggattcttagaaaaacagcaaccaccagaatagcatatatctaaaagtagtcttcagctttaggcagatgcaaaagaatacaaactggaatattaagaatactgttcaactcctttagtatctgttccccaacttaccctgtagaaacctcgttattaaccagtgttccagtcttaaagtagacaaaatattcagagccattttttttaagggaaatgaaaaagatactctgggttttttatactccccaatttagcatatctagactacctatttgaaaggaaccctatcaactgtcttatgtacgttacatgattttcctacactctgtaattttgctgaggtgcaatttggaactctgcaagacctactagattgaatttatttagtgaatgctcctgaataaatgtgcattcctcttttagagtagctgtatgcttttcaaatgctatctgccgtgaattttttgcttttattatactttatggcaaaagtgatatcaagtgattgtcagacttgagggctcatagaagtgttaggtacggctctcaaagatgttacagttttttctagggttgggagaatagttgagatctggaaagcatagacattttttacactctggatagactttattcttgaagatcatcagaaatgaggttggaatttcgaggttttgagcagggggagcatcttatattcacccttaaatcgttattaatacatcctgttttcttcattccctgatagctatctcatttcactctactgtctcaaaattttgttttaaaataatagaaatgttttgccattattaagtaccactttattcctaacaaaaataagtactcaggacttttttttcaaaatgaaatatttatgtactgttttatggtatgtggtagagtaagtaaaatgtaatgttctcagttttgttccatatttgcattcctcttatgctttacctgtattttatcatttgtaagcagaactctagctatatggggtagaaataaaatctctgagatgaaacaaaggaatcaacatgataaaatttaggcgaagtagttaagaaatggcccttttgaatgttgaagataggaaagaaagccatatattcaaatatgtaattttcctcatttagttataatgacatctttaccaattgggcttcataaatgtgtttctttcttaatagtatcctagttccagcatatattcaacatgaattttatcattctcctcctaatggaatgtcttccttatagaaatgttcacgacaaattcatttgtgttttttacatgtcaataatgtatgctaaattaaaatgttttccagttattctgatagatgtcattatggcatccttaatttttcttctccttctgtatatagggtaagggactgttctgaagaacctttccatttagtgatcaagatatggaagctgatttctgaaaatgctcagtgtgtactctaattatttatggtaccatttgaattgtaacttgcattttagcagtgcatgtttctaattgacttactgggaaactgaataaaatatgcctcttattatca

SEQ ID NO: 326183 - DNA, 2233 bp, Homo sapiens
tccacttcccctaccctccaccgtccgggagccgccgccaccgccgccgaggagtcaggaagttcaagatggccgccgcggagacccagtcgctacgggagcagccagagatggaagatgctaattctgaaaagagtataaatgaagaaaatggagaagtatcagaagaccagtctcaaaataagcacagtcgtcacaaaaaaaagaagcataaacacagaagtaaacataagaaacataaacattcctcagaagaagacaaggataaaaaacataaacataagcataaacataagaaacacaaaagaaaagaggttattgatgcttctgataaagagggtatgtctccagcaaaaagaactaaacttgatgatttagctttgctagaagacttggaaaaacagagagccttgattaaggccgaacttgataatgagttaatggaaggaaaggtccagtctggtatggggctcattttgcaaggttatgagtctggctctgaagaagagggggaaattcatgaaaaggcaagaaatggaaataggtctagtactagatcttcaagtacaaaggggaaacttgaacttgtggacaataaaattactacaaagaaacgaagtaaaagcagatccaaagaacggactagacataggtctgataaaaagaaaagtaaggggggtattgaaatcgttaaagagaaaacaactaggagcaagtcaaaggagaggaaaaaatctaaaagcccatccaaaagaagtaagtctcaagatcaagcaaggaaatcaaaatcccctacccttagaaggcgatctcaagagaaaattggtaaggccagatctcctactgatgataaggttaaaattgaagataaaagtaaatcaaaagataggaaaaaatccccaattataaatgaaagtagaagtcgcgatcgaggtaaaaaatccagatccccagttgatttaagaggtaaatccaaagacagaaggtcacggtccaaagagagaaaatcaaaacggtctgaaactgataaagaaaagaagccaattaaatctccctctaaagatgcttcatctgggaaagaaaataggtcacccagcagaagacctggtcgtagtcctaaaagaagaagtttgtctccaaaaccacgtgataaatcaagaagaagcaggtctccacttttgaatgatagaagatctaagcagagcaaatccccctcgcggacactgtctcctgggagaagagccaagagccgatccttagaaagaaaacgacgagaaccagagaggagacgactttcttctccaagaacacgacctcgagatgatatcctcagtagacgtgaaagatcaaaagatgccagccccatcaatagatggtctccaacccgaagaagaagtagatctcccattagaaggaggtctcgttccccactcagacgtagcaggtctccaagaagaagaagcagatctcctcggagaagggacagaggtcggaggagcagatcacgcttgcgaaggcggtctcgatcacgcggtggtcgtagacgaaggagcagaagcaaagtaaaggaagataaatttaaaggaagtctttctgaaggaatgaaagttgagcaggaatcttcgtctgatgataaccttgaagactttgatgtagaggaagaagatgaagaagccctaatagaacagagaagaatccaaaggcaggcaattgttcagaaatataaataccttgctgaagatagcaacatgtctgtgccatctgaaccaagcagcccccagagcagtacgagaacacgatcaccatctccagatgacattctggagcgagtagctgctgatgttaaagagtatgaacgggaaaatgttgatacatttgaggcctcagtgaaagccaagcataatctaatgacagttgaacagaataatggttcatctcagaagaagttgttggcacctgatatgtttacagaatctgatgatatgtttgctgcgtattttgatagtgctcgtcttcgggccgctggcattggaaaagatttcaaagagaatcccaacctcagagataactggaccgatgcagaaggctattatcgtgtgaacataggtgaagtcctagataaacgttacaatgtgtatggctgtagctgttggtcacgtgaagatgacagccgatgagcttgtgtataacattcacctggatgtcaacttcttggtgtcattgctcaagaaaa

SEQ ID NO: 326184 - DNA, 1731 bp, Homo sapiens
tccacttcccctaccctccaccgtccgggagccgccgccaccgccgccgaggagtcaggaagttcaagatggccgccgcggagacccagtcgctacgggagcagccagagatggaagatgctaattctgaaaagagtataaatgaagaaaatggagaagtatcagaagaccagtctcaaaataagcacagtcgtcacaaaaaaaagaagcataaacacagaagtaaacataagaaacataaacattcctcagaagaagacaaggataaaaaacataaacataagcataaacataagaaacacaaaagaaaagaggttattgatgcttctgataaagagggtatgtctccagcaaaaagaactaaacttgatgatttagctttgctagaagacttggaaaaacagagagccttgattaaggccgaacttgataatgagttaatggaaggaaaggtccagtctggtatggggctcattttgcaaggttatgagtctggctctgaagaagagggggaaattcatgaaaaggcaagaaatggaaataggtctagtactagatcttcaagtacaaaggggaaacttgaacttgtggacaataaaattactacaaagaaacgaagtaaaagcagatccaaagaacggactagacataggtctgataaaaagaaaagtaaggggggtattgaaatcgttaaagagaaaacaactaggagcaagtcaaaggagaggaaaaaatctaaaagcccatccaaaagaagtaagtctcaagatcaagcaaggaaatcaaaatcccctacccttagaaggcgatctcaagagaaaattggtaaggccagatctcctactgatgataaggttaaaattgaagataaaagtaaatcaaaagataggaaaaaatccccaattataaatgaaagtagaagtcgcgatcgaggtaaaaaatccagatccccagttgatttaagaggtaaatccaaagacagaaggtcacggtccaaagagagaaaatcaaaacggtctgaaactgataaagaaaagaagccaattaaatctccctctaaagatgcttcatctgggaaagaaaataggtcacccagcagaagacctggtcgtagtcctaaaagaagaagtttgtctccaaaaccacgtgataaatcaagaagaagcaggtctccacttttgaatgatagaagatctaagcagagcaaatccccctcgcggacactgtctcctgggagaagagccaagagccgatccttagaaagaaaacgacgagaaccagagaggagacgactttcttctccaagaacacgacctcgagatgatatcctcagtagacgtgaaagatcaaaagatgccagccccatcaatagatggtctccaacccgaagaagaagtagatctcccattagaaggaggtctcgttccccactcagacgtagcaggtctccaagaagaagaagcagatctcctcggagaagggacagaggtcggaggagcagatcacgcttgcgaaggcggtctcgatcacgcggtggtcgtagacgaaggagcagaagcaaagtaaaggaagataaatttaaaggaagtctttctgaaggaatgaaagttgtcccggtctctgtacgtttggatgataacgttcaataccatgatgtagaggaagcagatgaacgtagcgatggatagcacacgagcacaatccagaggcaaggccatggtgtatagacga

SEQ ID NO: 326185 - DNA, 1124 bp, Homo sapiens
  misc_feature (1076)..(1076): n is a, c, g, or t
  misc_feature (1093)..(1093): n is a, c, g, or t
  misc_feature (1114)..(1114): n is a, c, g, or t
tccacttcccctaccctccaccgtccgggagccgccgccaccgccgccgaggagtcaggaagttcaagatggccgccgcggagacccagtcgctacgggagcagccagagatggaagatgctaattctgaaaagagtataaatgaagaaaatggagaagtatcagaagaccagtctcaaaataagcacagtcgtcacaaaaaaaagaagcataaacacagaagtaaacataagaaacataaacattcctcagaagaagacaaggataaaaaacataaacataagcataaacataagaaacacaaaagaaaagaggttattgatgcttctgataaagagggtatgtctccagcaaaaagaactaaacttgatgatttagctttgctagaagacttggaaaaacagagagccttgattaaggccgaacttgataatgagttaatggaaggaaaggtccagtctggtatggggctcattttgcaaggttatgagtctggctctgaagaagagggggaaattcatgaaaaggcaagaaatggaaataggtctagtactagatcttcaagtacaaaggggaaacttgaacttgtggacaataaaattactacaaagaaacgaagtaaaagcagatccaaagaacggactagacataggtctgataaaaagaaaagtaaggggggtattgaaatcgttaaagagaaaacaactaggagcaagtcaaaggagaggaaaaaatctaaaagcccatccaaaagaagtaagtctcaagatcaagcaaggaaatcaaaatcccctacccttagaaggcgatctcaagagaaaattggtaaggccagatctcctactgatgataaggttaaaattgaagataaaagtaaatcaaaagataggaaaaaatccccaattataaatgaaagtagaagtcgcgatcgaggtaaaaaatccagatccccagttgatttaagaggtaaatccaaagacagaaggtcacggtccaaagagagaaaatcaaaacggtctgaaactgataaagaaaagaagccaattaattcctctaagatctctctggaagaaatngcaccacaaaactgtcnagctaagaaaattgctcaacnctgtatcaga

SEQ ID NO: 326186 - DNA, 235 bp, Homo sapiens
gtaagttcacattttatattaactttagagttcattgtaacaccatgcaaaagcatgctgcttgatgcaatcacagattattggagaactctgaaaaatcacatcacagtgccatctttaaaaattgtggcacatccaacagctgcatgaactcgtgtgtattctaaaagcagcccagaaacatcacaaatggagtgaggtaaagtcttgatgtacaacctaaatatattcaaaa

SEQ ID NO: 326187 - DNA, 439 bp, Homo sapiens
gaagccttttaattaaggcgtcacaggtgcagctattctaccttaatgaaatgggtagtgattttcccaccattatttatttcggtgataatatgctgcatattcaagtctcttgtagttattttcacccaaagtagttgacaatttgatgcttctggtgatgtttatggcttcattttatgtaattttttaagtaagttccactagaaacagttcatcttataccttcaaaactgttacctgttctttaaaaaacaaagttgcttgttacttgttctttgtgttttaggtgcagctcagtggaagatgatgacaaccagaagacatgagctaaggtttctgtcctataaaagatttattaaaaaacaatccttcatttattttttgtctaattttttagttttcagcattatgatttgggttttattggtgtttggta

SEQ ID NO: 326188 - DNA, 311 bp, Homo sapiens
cttttcatagttaggaaattgaattaaaaataaatagaaaaggaatttttaaatgaatgtctttgttctcagtattggaattaataaaacttttcaaagccaataatttttatttatttgtattaattattcctggcttgaattaaattcccttgaaaaaatgttttgcaggttaatgaatccaaaactattttaaagctttgcgattttgggtcggcttcacatgttgcggataatgacataacaccttatcttgtcagtagattttatcgtgctcctgaaatcagtaagtttcttaatgttctttgacc

SEQ ID NO: 326189 - DNA, 6685 bp, Homo sapiens
tccacttcccctaccctccaccgtccgggagccgccgccaccgccgccgaggagtcaggaagttcaagatggccgccgcggagacccagtcgctacgggagcagccagagatggaagatgctaattctgaaaagagtataaatgaagaaaatggagaagtatcagaagaccagtctcaaaataagcacagtcgtcacaaaaaaaagaagcataaacacagaagtaaacataagaaacataaacattcctcagaagaagacaaggataaaaaacataaacataagcataaacataagaaacacaaaagaaaagaggttattgatgcttctgataaagagggtatgtctccagcaaaaagaactaaacttgatgatttagctttgctagaagacttggaaaaacagagagccttgattaaggccgaacttgataatgagttaatggaaggaaaggtccagtctggtatggggctcattttgcaaggttatgagtctggctctgaagaagagggggaaattcatgaaaaggcaagaaatggaaataggtctagtactagatcttcaagtacaaaggggaaacttgaacttgtggacaataaaattactacaaagaaacgaagtaaaagcagatccaaagaacggactagacataggtctgataaaaagaaaagtaaggggggtattgaaatcgttaaagagaaaacaactaggagcaagtcaaaggagaggaaaaaatctaaaagcccatccaaaagaagtaagtctcaagatcaagcaaggaaatcaaaatcccctacccttagaaggcgatctcaagagaaaattggtaaggccagatctcctactgatgataaggttaaaattgaagataaaagtaaatcaaaagataggaaaaaatccccaattataaatgaaagtagaagtcgcgatcgaggtaaaaaatccagatccccagttgatttaagaggtaaatccaaagacagaaggtcacggtccaaagagagaaaatcaaaacggtctgaaactgataaagaaaagaagccaattaaatctccctctaaagatgcttcatctgggaaagaaaataggtcacccagcagaagacctggtcgtagtcctaaaagaagaagtttgtctccaaaaccacgtgataaatcaagaagaagcaggtctccacttttgaatgatagaagatctaagcagagcaaatccccctcgcggacactgtctcctgggagaagagccaagagccgatccttagaaagaaaacgacgagaaccagagaggagacgactttcttctccaagaacacgacctcgagatgatatcctcagtagacgtgaaagatcaaaagatgccagccccatcaatagatggtctccaacccgaagaagaagtagatctcccattagaaggaggtctcgttccccactcagacgtagcaggtctccaagaagaagaagcagatctcctcggagaagggacagaggtcggaggagcagatcacgcttgcgaaggcggtctcgatcacgcggtggtcgtagacgaaggagcagaagcaaagtaaaggaagataaatttaaaggaagtctttctgaaggaatgaaagttgagcaggaatcttcgtctgatgataaccttgaagactttgatgtagaggaagaagatgaagaagccctaatagaacagagaagaatccaaaggcaggcaattgttcagaaatataaataccttgctgaagatagcaacatgtctgtgccatctgaaccaagcagcccccagagcagtacgagaacacgatcaccatctccagatgacattctggagcgagtagctgctgatgttaaagagtatgaacgggaaaatgttgatacatttgaggcctcagtgaaagccaagcataatctaatgacagttgaacagaataatggttcatctcagaagaagttgttggcacctgatatgtttacagaatctgatgatatgtttgctgcgtattttgatagtgctcgtcttcgggccgctggcattggaaaagatttcaaagagaatcccaacctcagagataactggaccgatgcagaaggctattatcgtgtgaacataggtgaagtcctagataaacgttacaatgtgtatggctacactgggcaaggtgtattcagtaatgttgtacgagccagagataatgcaagagccaaccaagaagtggctgtaaagatcatcagaaacaatgagctcatgcaaaagactggtttaaaagaattagagttcttgaaaaaacttaatgatgctgatcctgatgacaaatttcattgtctgagactcttcaggcacttctatcacaagcagcatctttgtctggtattcgagcctctcagcatgaacttacgagaggtgttaaaaaaatatggtaaagatgttggtcttcatattaaagctgtaagatcctatagtcagcagttgttcctggcattgaaactccttaaaagatgcaatatcctacatgcagatatcaagccagacaatatcctggttaatgaatccaaaactattttaaagctttgcgattttgggtcggcttcacatgttgcggataatgacataacaccttatcttgtcagtagattttatcgtgctcctgaaatcattataggtaaaagctatgactatggtatagatatgtggtctgtaggttgcaccttatacgaactctatactggaaaaattttattccctggcaaaaccaataaccatatgctgaagcttgcaatggatctcaaaggaaagatgccaaataagatgattcgaaaaggtgtgttcaaagatcagcattttgatcaaaatctcaacttcatgtacatagaagttgataaagtaacagagagggagaaagttactgttatgagcaccattaatccaactaaggacctgttggctgacttgattgggtgccagagacttcctgaagaccaacgtaagaaagtacaccagctaaaggacttgttggaccagattctgatgttggacccagctaaacgaattagcatcaaccaggccctacagcacgccttcatccaggaaaaaatttaaacaagatgaagaaactccaagggtttgagtaaatacaaagactgaagaaatttcacagcagtttattaatgtatataaacttataaatatttctccagcaaatttgaggaagcatgatatatttgaattaacaccaagggtgatatttcttttagagatgttagttaatctgttttgtgtcttacgtgaaatttcactgtagactgttttaaattgccaagactgcacaaaattacagtgctaatgtatatggttgcagttcacataaagacaaaagcatctgttatgaaatgagtagtaatattgggtggttgatttgttcttagcagacttggcttcattttggtcttgagataaaatggccagcataaatgctgtttatattcacgttttcctaggtgtgtgtgtgcaggccacagcagcatgcccttggtgtagtcagtgccgaaaggggtctgttccttcttgagcctgcctgcagggatggtctccttttaaagcaggttgtgtgcagcattcagtacactgaaggtaagctaaaccatcaacatctctggtgttttaagatgttattttattggaacaactgacaaatgagggatgttagctttgtggcagaattccctgcatgtgtgataactgatcttgttttattttttggcattgcaactgtggcatagttacaatttctgtttgttcatcacatttaaaattggaagagaacgcgcttgatggatagagcgccttcagtgtactgtttcttattaactttactttttttaaatcaacttgctatagactttatatacattttgttaaatatagttcctagtgacatagaaacgatgcgtagttttcatttactaattacaaatgttgaggcctaattctgaaagtcctcatatttaaaggctagacaacgtaatgaaatttttaactatttgtatgtcattttgaaagtgtactgctttatggtaaaagtgtttttcatttgttcattgttttcattatttgtgatcatgttgtctttcaatacaggcataaaccttccactcttgaacaaagcagctgctttttaaaagcggtaattgcttctttaccttttatttcttttgtaaatgaagcttttctttaagaatgtgactttaaagtgttgtctattgcataaaacagttgacactcacttattgtaaagtgaagattgttctactgcatgtgaagtggaccatgcagatttctgtatgttctcagtatgcatcactagataataaagtcttttgtgaacaaggcatttgtagccatttttaaaagtttttgtcttcagtgctggtaagtcaggtaaaccataaatagttaaaagcaaccttttgtttttttcctgaaagtttttaattgaaagtattattagttaaagatgtaaacctagccaaaattaccagtttattaataattaggatcctaattatttcaaaaaatcctacaaatattgtcagctttcagtgtagtgagattattcctgtaggttatggggtataattcaggatttaactaatgtttctgctattttctcacttttccttttgatggtgcggaaagagaaaaaggaaaacggggcacaggccattcgacgccttctccaaggggtctgatttgctgagacaccagcttcaccttcttaacaaggtgcagctcagtggaagatgatgacaaccagaagacatgagctaaggtttctgtcctataaaagatttattaaaaaacaatccttcatttattttttgtctaattttttagttttcagcattatgatttgggttttattggtgtttggtatttagaattagtgctgttgtggagtgcgtctgtaaagtgcttgttttatcatacttcctgcctctcccctcccccagtttctcctcccctaaaataaaaatagtggtcaactttagtaatataaaaggctgctggatgctgagattccacataacacatggttgtcaaaattggatgttaaggattcttagaaaaacagcaaccaccagaatagcatatatctaaaagtagtcttcagctttaggcagatgcaaaagaatacaaactggaatattaagaatactgttcaactcctttagtatctgttccccaacttaccctgtagaaacctcgttattaaccagtgttccagtcttaaagtagacaaaatattcagagccattttttttaagggaaatgaaaaagatactctgggttttttatactccccaatttagcatatctagactacctatttgaaaggaaccctatcaactgtcttatgtacgttacatgattttcctacactctgtaattttgctgaggtgcaatttggaactctgcaagacctactagattgaatttatttagtgaatgctcctgaataaatgtgcattcctcttttagagtagctgtatgcttttcaaatgctatctgccgtgaattttttgcttttattatactttatggcaaaagtgatatcaagtgattgtcagacttgagggctcatagaagtgttaggtacggctctcaaagatgttacagttttttctagggttgggagaatagttgagatctggaaagcatagacattttttacactctggatagactttattcttgaagatcatcagaaatgaggttggaatttcgaggttttgagcagggggagcatcttatattcacccttaaatcgttattaatacatcctgttttcttcattccctgatagctatctcatttcactctactgtctcaaaattttgttttaaaataatagaaatgttttgccattattaagtaccactttattcctaacaaaaataagtactcaggacttttttttcaaaatgaaatatttatgtactgttttatggtatgtggtagagtaagtaaaatgtaatgttctcagttttgttccatatttgcattcctcttatgctttacctgtattttatcatttgtaagcagaactctagctatatggggtagaaataaaatctctgagatgaaacaaaggaatcaacatgataaaatttaggcgaagtagttaagaaatggcccttttgaatgttgaagataggaaagaaagccatatattcaaatatgtaattttcctcatttagttataatgacatctttaccaattgggcttcataaatgtgtttctttcttaatagtatcctagttccagcatatattcaacatgaattttatcattctcctcctaatggaatgtcttccttatagaaatgttcacgacaaattcatttgtgttttttacatgtcaataatgtatgctaaattaaaatgttttccagttattctgatagatgtcattatggcatccttaatttttcttctccttctgtatatagggtaagggactgttctgaagaacctttccatttagtgatcaagatatggaagctgatttctgaaaatgctcagtgtgtactctaattatttatggtaccatttgaattgtaacttgcattttagcagtgcatgtttctaattgacttactgggaaactgaataaaatatgcctcttattatca

SEQ ID NO: 326190 - DNA, 6762 bp, Homo sapiens
tccacttcccctaccctccaccgtccgggagccgccgccaccgccgccgaggagtcaggaagttcaagatggccgccgcggagacccagtcgctacgggagcagccagagatggaagatgctaattctgaaaagagtataaatgaagaaaatggagaagtatcagaagaccagtctcaaaataagcacagtcgtcacaaaaaaaagaagcataaacacagaagtaaacataagaaacataaacattcctcagaagaagacaaggataaaaaacataaacataagcataaacataagaaacacaaaagaaaagaggttattgatgcttctgataaagagggtatgtctccagcaaaaagaactaaacttgatgatttagctttgctagaagacttggaaaaacagagagccttgattaaggccgaacttgataatgagttaatggaaggaaaggtccagtctggtatggggctcattttgcaaggttatgagtctggctctgaagaagagggggaaattcatgaaaaggcaagaaatggaaataggtctagtactagatcttcaagtacaaaggggaaacttgaacttgtggacaataaaattactacaaagaaacgaagtaaaagcagatccaaagaacggactagacataggtctgataaaaagaaaagtaaggggggtattgaaatcgttaaagagaaaacaactaggagcaagtcaaaggagaggaaaaaatctaaaagcccatccaaaagaagtaagtctcaagatcaagcaaggaaatcaaaatcccctacccttagaaggcgatctcaagagaaaattggtaaggccagatctcctactgatgataaggttaaaattgaagataaaagtaaatcaaaagataggaaaaaatccccaattataaatgaaagtagaagtcgcgatcgaggtaaaaaatccagatccccagttgatttaagaggtaaatccaaagacagaaggtcacggtccaaagagagaaaatcaaaacggtctgaaactgataaagaaaagaagccaattaaatctccctctaaagatgcttcatctgggaaagaaaataggtcacccagcagaagacctggtcgtagtcctaaaagaagaagtttgtctccaaaaccacgtgataaatcaagaagaagcaggtctccacttttgaatgatagaagatctaagcagagcaaatccccctcgcggacactgtctcctgggagaagagccaagagccgatccttagaaagaaaacgacgagaaccagagaggagacgactttcttctccaagaacacgacctcgagatgatatcctcagtagacgtgaaagatcaaaagatgccagccccatcaatagatggtctccaacccgaagaagaagtagatctcccattagaaggaggtctcgttccccactcagacgtagcaggtctccaagaagaagaagcagatctcctcggagaagggacagaggtcggaggagcagatcacgcttgcgaaggcggtctcgatcacgcggtggtcgtagacgaaggagcagaagcaaagtaaaggaagataaatttaaaggaagtctttctgaaggaatgaaagttgagcaggaatcttcgtctgatgataaccttgaagactttgatgtagaggaagaagatgaagaagccctaatagaacagagaagaatccaaaggcaggcaattgttcagaaatataaataccttgctgaagatagcaacatgtctgtgccatctgaaccaagcagcccccagagcagtacgagaacacgatcaccatctccagatgacattctggagcgagtagctgctgatgttaaagagtatgaacgggaaaatgttgatacatttgaggcctcagtgaaagccaagcataatctaatgacagttgaacagaataatggttcatctcagaagaagttgttggcacctgatatgtttacagaatctgatgatatgtttgctgcgtattttgatagtgctcgtcttcgggccgctggcattggaaaagatttcaaagagaatcccaacctcagagataactggaccgatgcagaaggctattatcgtgtgaacataggtgaagtcctagataaacgttacaatgtgtatggctacactgggcaaggtgtattcagtaatgttgtacgagccagagataatgcaagagccaaccaagaagtggctgtaaagatcatcagaaacaatgagctcatgcaaaagactggtttaaaagaattagagttcttgaaaaaacttaatgatgctgatcctgatgacaaatttcattgtctgagactcttcaggcacttctatcacaagcagcatctttgtctggtattcgagcctctcagcatgaacttacgagaggtgttaaaaaaatatggtaaagatgttggtcttcatattaaagctgtaagatcctatagtcagcagttgttcctggcattgaaactccttaaaagatgcaatatcctacatgcagatatcaagccagacaatatcctggttaatgaatccaaaactattttaaagctttgcgattttgggtcggcttcacatgttgcggataatgacataacaccttatcttgtcagtagattttatcgtgctcctgaaatcattataggtaaaagctatgactatggtatagatatgtggtctgtaggttgcaccttatacgaactctatactggaaaaattttattccctggcaaaaccaataaccatatgctgaagcttgcaatggatctcaaaggaaagatgccaaataagatgattcgaaaaggtgtgttcaaagatcagcattttgatcaaaatctcaacttcatgtacatagaagttgataaagtaacagagagggagaaagttactgttatgagcaccattaatccaactaaggacctgttggctgacttgattgggtgccagagacttcctgaagaccaacgtaagaaagtacaccagctaaaggacttgttggaccagattctgatgttggacccagctaaacgaattagcatcaaccaggccctacagcacgccttcatccaggaaaaaatttaaacaagatgaagaaactccaagggtttgagtaaatacaaagactgaagaaatttcacagcagtttattaatgtatataaacttataaatatttctccagcaaatttgaggaagcatgatatatttgaattaacaccaagggtgatatttcttttagagatgttagttaatctgttttgtgtcttacgtgaaatttcactgtagactgttttaaattgccaagactgcacaaaattacagtgctaatgtatatggttgcagttcacataaagacaaaagcatctgttatgaaatgagtagtaatattgggtggttgatttgttcttagcagacttggcttcattttggtcttgagataaaatggccagcataaatgctgtttatattcacgttttcctaggtgtgtgtgtgcaggccacagcagcatgcccttggtgtagtcagtgccgaaaggggtctgttccttcttgagcctgcctgcagggatggtctccttttaaagcaggttgtgtgcagcattcagtacactgaaggtaagctaaaccatcaacatctctggtgttttaagatgttattttattggaacaactgacaaatgagggatgttagctttgtggcagaattccctgcatgtgtgataactgatcttgttttattttttggcattgcaactgtggcatagttacaatttctgtttgttcatcacatttaaaattggaagagaacgcgcttgatggatagagcgccttcagtgtactgtttcttattaactttactttttttaaatcaacttgctatagactttatatacattttgttaaatatagttcctagtgacatagaaacgatgcgtagttttcatttactaattacaaatgttgaggcctaattctgaaagtcctcatatttaaaggctagacaacgtaatgaaatttttaactatttgtatgtcattttgaaagtgtactgctttatggtaaaagtgtttttcatttgttcattgttttcattatttgtgatcatgttgtctttcaatacaggcataaaccttccactcttgaacaaagcagctgctttttaaaagcggtaattgcttctttaccttttatttcttttgtaaatgaagcttttctttaagaatgtgactttaaagtgttgtctattgcataaaacagttgacactcacttattgtaaagtgaagattgttctactgcatgtgaagtggaccatgcagatttctgtatgttctcagtatgcatcactagataataaagtcttttgtgaacaaggcatttgtagccatttttaaaagtttttgtcttcagtgctggtaagtcaggtaaaccataaatagttaaaagcaaccttttgtttttttcctgaaagtttttaattgaaagtattattagttaaagatgtaaacctagccaaaattaccagtttattaataattaggatcctaattatttcaaaaaatcctacaaatattgtcagctttcagtgtagtgagattattcctgtaggttatggggtataattcaggatttaactaatgtttctgctattttctcacttttccttttgatggtgcggaaagagaaaaaggaaaacggggcacaggccattcgacgccttctccaaggggtctgatttgctgagacaccagcttcaccttcttaacaaggcacctaattacaacaagcatgcacattttggtgcattcaagaatggaaaatcagaatagcagcattgattcttctggtgcagctcagtggaagatgatgacaaccagaagacatgagctaaggtttctgtcctataaaagatttattaaaaaacaatccttcatttattttttgtctaattttttagttttcagcattatgatttgggttttattggtgtttggtatttagaattagtgctgttgtggagtgcgtctgtaaagtgcttgttttatcatacttcctgcctctcccctcccccagtttctcctcccctaaaataaaaatagtggtcaactttagtaatataaaaggctgctggatgctgagattccacataacacatggttgtcaaaattggatgttaaggattcttagaaaaacagcaaccaccagaatagcatatatctaaaagtagtcttcagctttaggcagatgcaaaagaatacaaactggaatattaagaatactgttcaactcctttagtatctgttccccaacttaccctgtagaaacctcgttattaaccagtgttccagtcttaaagtagacaaaatattcagagccattttttttaagggaaatgaaaaagatactctgggttttttatactccccaatttagcatatctagactacctatttgaaaggaaccctatcaactgtcttatgtacgttacatgattttcctacactctgtaattttgctgaggtgcaatttggaactctgcaagacctactagattgaatttatttagtgaatgctcctgaataaatgtgcattcctcttttagagtagctgtatgcttttcaaatgctatctgccgtgaattttttgcttttattatactttatggcaaaagtgatatcaagtgattgtcagacttgagggctcatagaagtgttaggtacggctctcaaagatgttacagttttttctagggttgggagaatagttgagatctggaaagcatagacattttttacactctggatagactttattcttgaagatcatcagaaatgaggttggaatttcgaggttttgagcagggggagcatcttatattcacccttaaatcgttattaatacatcctgttttcttcattccctgatagctatctcatttcactctactgtctcaaaattttgttttaaaataatagaaatgttttgccattattaagtaccactttattcctaacaaaaataagtactcaggacttttttttcaaaatgaaatatttatgtactgttttatggtatgtggtagagtaagtaaaatgtaatgttctcagttttgttccatatttgcattcctcttatgctttacctgtattttatcatttgtaagcagaactctagctatatggggtagaaataaaatctctgagatgaaacaaaggaatcaacatgataaaatttaggcgaagtagttaagaaatggcccttttgaatgttgaagataggaaagaaagccatatattcaaatatgtaattttcctcatttagttataatgacatctttaccaattgggcttcataaatgtgtttctttcttaatagtatcctagttccagcatatattcaacatgaattttatcattctcctcctaatggaatgtcttccttatagaaatgttcacgacaaattcatttgtgttttttacatgtcaataatgtatgctaaattaaaatgttttccagttattctgatagatgtcattatggcatccttaatttttcttctccttctgtatatagggtaagggactgttctgaagaacctttccatttagtgatcaagatatggaagctgatttctgaaaatgctcagtgtgtactctaattatttatggtaccatttgaattgtaacttgcattttagcagtgcatgtttctaattgacttactgggaaactgaataaaatatgcctcttattatca

SEQ ID NO: 326191 - DNA, 6919 bp, Homo sapiens
tccacttcccctaccctccaccgtccgggagccgccgccaccgccgccgaggagtcaggaagttcaagatggccgccgcggagacccagtcgctacgggagcagccagagatggaagatgctaattctgaaaagagtataaatgaagaaaatggagaagtatcagaagaccagtctcaaaataagcacagtcgtcacaaaaaaaagaagcataaacacagaagtaaacataagaaacataaacattcctcagaagaagacaaggataaaaaacataaacataagcataaacataagaaacacaaaagaaaagaggttattgatgcttctgataaagagggtatgtctccagcaaaaagaactaaacttgatgatttagctttgctagaagacttggaaaaacagagagccttgattaaggccgaacttgataatgagttaatggaaggaaaggtccagtctggtatggggctcattttgcaaggttatgagtctggctctgaagaagagggggaaattcatgaaaaggcaagaaatggaaataggtctagtactagatcttcaagtacaaaggggaaacttgaacttgtggacaataaaattactacaaagaaacgaagtaaaagcagatccaaagaacggactagacataggtctgataaaaagaaaagtaaggggggtattgaaatcgttaaagagaaaacaactaggagcaagtcaaaggagaggaaaaaatctaaaagcccatccaaaagaagtaagtctcaagatcaagcaaggaaatcaaaatcccctacccttagaaggcgatctcaagagaaaattggtaaggccagatctcctactgatgataaggttaaaattgaagataaaagtaaatcaaaagataggaaaaaatccccaattataaatgaaagtagaagtcgcgatcgaggtaaaaaatccagatccccagttgatttaagaggtaaatccaaagacagaaggtcacggtccaaagagagaaaatcaaaacggtctgaaactgataaagaaaagaagccaattaaatctccctctaaagatgcttcatctgggaaagaaaataggtcacccagcagaagacctggtcgtagtcctaaaagaagaagtttgtctccaaaaccacgtgataaatcaagaagaagcaggtctccacttttgaatgatagaagatctaagcagagcaaatccccctcgcggacactgtctcctgggagaagagccaagagccgatccttagaaagaaaacgacgagaaccagagaggagacgactttcttctccaagaacacgacctcgagatgatatcctcagtagacgtgaaagatcaaaagatgccagccccatcaatagatggtctccaacccgaagaagaagtagatctcccattagaaggaggtctcgttccccactcagacgtagcaggtctccaagaagaagaagcagatctcctcggagaagggacagaggtcggaggagcagatcacgcttgcgaaggcggtctcgatcacgcggtggtcgtagacgaaggagcagaagcaaagtaaaggaagataaatttaaaggaagtctttctgaaggaatgaaagttgagcaggaatcttcgtctgatgataaccttgaagactttgatgtagaggaagaagatgaagaagccctaatagaacagagaagaatccaaaggcaggcaattgttcagaaatataaataccttgctgaagatagcaacatgtctgtgccatctgaaccaagcagcccccagagcagtacgagaacacgatcaccatctccagatgacattctggagcgagtagctgctgatgttaaagagtatgaacgggaaaatgttgatacatttgaggcctcagtgaaagccaagcataatctaatgacagttgaacagaataatggttcatctcagaagaagttgttggcacctgatatgtttacagaatctgatgatatgtttgctgcgtattttgatagtgctcgtcttcgggccgctggcattggaaaagatttcaaagagaatcccaacctcagagataactggaccgatgcagaaggctattatcgtgtgaacataggtgaagtcctagataaacgttacaatgtgtatggctacactgggcaaggtgtattcagtaatgttgtacgagccagagataatgcaagagccaaccaagaagtggctgtaaagatcatcagaaacaatgagctcatgcaaaagactggtttaaaagaattagagttcttgaaaaaacttaatgatgctgatcctgatgacaaatttcattgtctgagactcttcaggcacttctatcacaagcagcatctttgtctggtattcgagcctctcagcatgaacttacgagaggtgttaaaaaaatatggtaaagatgttggtcttcatattaaagctgtaagatcctatagtcagcagttgttcctggcattgaaactccttaaaagatgcaatatcctacatgcagatatcaagccagacaatatcctggttaatgaatccaaaactattttaaagctttgcgattttgggtcggcttcacatgttgcggataatgacataacaccttatcttgtcagtagattttatcgtgctcctgaaatcattataggtaaaagctatgactatggtatagatatgtggtctgtaggttgcaccttatacgaactctatactggaaaaattttattccctggcaaaaccaataaccatatgctgaagcttgcaatggatctcaaaggaaagatgccaaataagatgattcgaaaaggtgtgttcaaagatcagcattttgatcaaaatctcaacttcatgtacatagaagttgataaagtaacagagagggagaaagttactgttatgagcaccattaatccaactaaggacctgttggctgacttgattgggtgccagagacttcctgaagaccaacgtaagaaagtacaccagctaaaggacttgttggaccagattctgatgttggacccagctaaacgaattagcatcaaccaggccctacagcacgccttcatccaggaaaaaatttaaacaagatgaagaaactccaagggtttgagtaaatacaaagactgaagaaatttcacagcagtttattaatgtatataaacttataaatatttctccagcaaatttgaggaagcatgatatatttgaattaacaccaagggtgatatttcttttagagatgttagttaatctgttttgtgtcttacgtgaaatttcactgtagactgttttaaattgccaagactgcacaaaattacagtgctaatgtatatggttgcagttcacataaagacaaaagcatctgttatgaaatgagtagtaatattgggtggttgatttgttcttagcagacttggcttcattttggtcttgagataaaatggccagcataaatgctgtttatattcacgttttcctaggtgtgtgtgtgcaggccacagcagcatgcccttggtgtagtcagtgccgaaaggggtctgttccttcttgagcctgcctgcagggatggtctccttttaaagcaggttgtgtgcagcattcagtacactgaaggtaagctaaaccatcaacatctctggtgttttaagatgttattttattggaacaactgacaaatgagggatgttagctttgtggcagaattccctgcatgtgtgataactgatcttgttttattttttggcattgcaactgtggcatagttacaatttctgtttgttcatcacatttaaaattggaagagaacgcgcttgatggatagagcgccttcagtgtactgtttcttattaactttactttttttaaatcaacttgctatagactttatatacattttgttaaatatagttcctagtgacatagaaacgatgcgtagttttcatttactaattacaaatgttgaggcctaattctgaaagtcctcatatttaaaggctagacaacgtaatgaaatttttaactatttgtatgtcattttgaaagtgtactgctttatggtaaaagtgtttttcatttgttcattgttttcattatttgtgatcatgttgtctttcaatacaggcataaaccttccactcttgaacaaagcagctgctttttaaaagcggtaattgcttctttaccttttatttcttttgtaaatgaagcttttctttaagaatgtgactttaaagtgttgtctattgcataaaacagttgacactcacttattgtaaagtgaagattgttctactgcatgtgaagtggaccatgcagatttctgtatgttctcagtatgcatcactagataataaagtcttttgtgaacaaggcatttgtagccatttttaaaagtttttgtcttcagtgctggtaagtcaggtaaaccataaatagttaaaagcaaccttttgtttttttcctgaaagtttttaattgaaagtattattagttaaagatgtaaacctagccaaaattaccagtttattaataattaggatcctaattatttcaaaaaatcctacaaatattgtcagctttcagtgtagtgagattattcctgtaggttatggggtataattcaggatttaactaatgtttctgctattttctcacttttccttttgatggtgcggaaagagaaaaaggaaaacggggcacaggccattcgacgccttctccaaggggtctgatttgctgagacaccagcttcaccttcttaacaaggcacctaattacaacaagcatgcacattttggtgcattcaagaatggaaaatcagaatagcagcattgattcttctggtgcagctcagtggaagatgatgacaaccagaagacatgagctaaggtttctgtcctataaaagatttattaaaaaacaatccttcatttattttttgtctaattttttagttttcagcattatgatttgggttttattggtgtttggtatttagaattagtgctgttgtggagtgcgtctgtaaagtgcttgttttatcatacttcctgcctctcccctcccccagtttctcctcccctaaaataaaaatagtggtcaactttagtaatataaaaggctgctggatgctgagattccacataacacatggttgtcaaaattggatgttaaggattcttagaaaaacagcaaccaccagaatagcatatatctaaaagtagtcttcagctttaggcagatgcaaaagaatacaaactggaatattaagaatactgttcaactcctttagtatctgttccccaacttaccctgtagaaacctcgttattaaccagtgttccagtcttaaagtagacaaaatattcagagccattttttttaagggaaatgaaaaagatactctgggttttttatactccccaatttagcatatctagactacctatttgaaaggaaccctatcaactgtcttatgtacgttacatgattttcctacactctgtaattttgctgaggtgcaatttggaactctgcaagacctactagattgaatttatttagtgaatgctcctgaataaatgtgcattcctcttttagagtagctgtatgcttttcaaatgctatctgccgtgaattttttgcttttattatactttatggcaaaagtgatatcaagtgattgtcagacttgagggctcatagaagtgttaggtacggctctcaaagatgttacagttttttctagggttgggagaatagttgagatctggaaagcatagacattttttacactctggatagactttattcttgaagatcatcagaaatgaggttggaatttcgaggttttgagcagggggagcatcttatattcacccttaaatcgttattaatacatcctgttttcttcattccctgatagctatctcatttcactctactgtctcaaaattttgttttaaaataatagaaatgttttgccattattaagtaccactttattcctaacaaaaataagtactcaggacttttttttcaaaatgaaatatttatgtactgttttatggtatgtggtagagtaagtaaaatgtaatgttctcagttttgttccatatttgcattcctcttatgctttacctgtattttatcatttgtaagcagaactctagctatatggggtagaaataaaatctctgagatgaaacaaaggaatcaacatgataaaatttaggcgaagtagttaagaaatggcccttttgaatgttgaagataggaaagaaagccatatattcaaatatgtaattttcctcatttagttataatgacatctttaccaattgggcttcataaatgtgtttctttcttaatagtatcctagttccagcatatattcaacatgaattttatcattctcctcctaatggaatgtcttccttatagaaatgttcacgacaaattcatttgtgttttttacatgtcaataatgtatgctaaattaaaatgttttccagttattctgatagatgtcattatggcatccttaatttttcttctccttctgtatatagggtaagggactgttctgaagaacctttccatttagtgatcaagatatggaagctgatttctgaaaatgctcagtgtgtactctaattatttatggtaccatttgaattgtaacttgcattttagcagtgcatgtttctaattgacttactgggaaactgaataaaatatgcctcttattatcaaaaaaaaaaaaaaaaaaatttgggggctggcccggaaagttttaaaacctcctgtgggggcgggcccggttaggacccggccacgtgccaggacacggcgacatgggggtccccaaaaaccgggccgggtctggaaccgggtgggccggtcacggcg

SEQ ID NO: 326192 - DNA, 6255 bp, Homo sapiens
tccacttcccctaccctccaccgtccgggagccgccgccaccgccgccgaggagtcaggaagttcaagatggccgccgcggagacccagtcgctacgggagcagccagagatggaagatgctaattctgaaaagagtataaatgaagaaaatggagaagtatcagaagaccagtctcaaaataagcacagtcgtcacaaaaaaaagaagcataaacacagaagtaaacataagaaacataaacattcctcagaagaagacaaggataaaaaacataaacataagcataaacataagaaacacaaaagaaaagaggttattgatgcttctgataaagagggtatgtctccagcaaaaagaactaaacttgatgatttagctttgctagaagacttggaaaaacagagagccttgattaaggccgaacttgataatgagttaatggaaggaaaggtccagtctggtatggggctcattttgcaaggttatgagtctggctctgaagaagagggggaaattcatgaaaaggcaagaaatggaaataggtctagtactagatcttcaagtacaaaggggaaacttgaacttgtggacaataaaattactacaaagaaacgaagtaaaagcagatccaaagaacggactagacataggtctgataaaaagaaaagtaaggggggtattgaaatcgttaaagagaaaacaactaggagcaagtcaaaggagaggaaaaaatctaaaagcccatccaaaagaagtaagtctcaagatcaagcaaggaaatcaaaatcccctacccttagaaggcgatctcaagagaaaattggtaaggccagatctcctactgatgataaggttaaaattgaagataaaagtaaatcaaaagataggaaaaaatccccaattataaatgaaagtagaagtcgcgatcgaggtaaaaaatccagatccccagttgatttaagaggtaaatccaaagacagaaggtcacggtccaaagagagaaaatcaaaacggtctgaaactgataaagaaaagaagccaattaaatctccctctaaagatgcttcatctgggaaagaaaataggtcacccagcagaagacctggtcgtagtcctaaaagaagaagtttgtctccaaaaccacgtgataaatcaagaagaagcaggtctccacttttgaatgatagaagatctaagcagagcaaatccccctcgcggacactgtctcctgggagaagagccaagagccgatccttagaaagaaaacgacgagaaccagagaggagacgactttcttctccaagaacacgacctcgagatgatatcctcagtagacgtgaaagatcaaaagatgccagccccatcaatagatggtctccaacccgaagaagaagtagatctcccattagaaggaggtctcgttccccactcagacgtagcaggtctccaagaagaagaagcagatctcctcggagaagggacagaggtcggaggagcagatcacgcttgcgaaggcggtctcgatcacgcggtggtcgtagacgaaggagcagaagcaaagtaaaggaagataaatttaaaggaagtctttctgaaggaatgaaagttgagcaggaatcttcgtctgatgataaccttgaagactttgatgtagaggaagaagatgaagaagccctaatagaacagagaagaatccaaaggcaggcaattgttcagaaatataaataccttgctgaagatagcaacatgtctgtgccatctgaaccaagcagcccccagagcagtacgagaacacgatcaccatctccagatgacattctggagcgagtagctgctgatgttaaagagtatgaacgggaaaatgttgatacatttgaggcctcagtgaaagccaagcataatctaatgacagttgaacagaataatggttcatctcagaagaagttgttggcacctgatatgtttacagaatctgatgatatgtttgctgcgtattttgatagtgctcgtcttcgggccgctggcattggaaaagatttcaaagagaatcccaacctcagagataactggaccgatgcagaaggctattatcgtgtgaacataggtgaagtcctagataaacgttacaatgtgtatggctacactgggcaaggtgtattcagtaatgttgtacgagccagagataatgcaagagccaaccaagaagtggctgtaaagatcatcagaaacaatgagctcatgcaaaagactggtttaaaagaattagagttcttgaaaaaacttaatgatgctgatcctgatgacaaatttcattgtctgagactcttcaggcacttctatcacaagcagcatctttgtctggtattcgagcctctcagcatgaacttacgagaggtgttaaaaaaatatggtaaagatgttggtcttcatattaaagctgtaagatcctatagtcagcagttgttcctggcattgaaactccttaaaagatgcaatatcctacatgcagatatcaagccagacaatatcctggttaatgaatccaaaactattttaaagctttgcgattttgggtcggcttcacatgttgcggataatgacataacaccttatcttgtcagtagattttatcgtgctcctgaaatcattataggtaaaagctatgactatggtatagatatgtggtctgtaggttgcaccttatacgaactctatactggaaaaattttattccctggcaaaaccaataaccatatgctgaagcttgcaatggatctcaaaggaaagatgccaaataagatgattcgaaaaggtgtgttcaaagatcagcattttgatcaaaatctcaacttcatgtacatagaagttgataaagtaacagagagggagaaagttactgttatgagcaccattaatccaactaaggacctgttggctgacttgattgggtgccagagacttcctgaagaccaacgtaagaaagtacaccagctaaaggacttgttggaccagattctgatgttggacccagctaaacgaattagcatcaaccaggccctacagcacgccttcatccaggaaaaaatttaaacaagatgaagaaactccaagggtttgagtaaatacaaagactgaagaaatttcacagcagtttattaatgtatataaacttataaatatttctccagcaaatttgaggaagcatgatatatttgaattaacaccaagggtgatatttcttttagagatgttagttaatctgttttgtgtcttacgtgaaatttcactgtagactgttttaaattgccaagactgcacaaaattacagtgctaatgtatatggttgcagttcacataaagacaaaagcatctgttatgaaatgagtagtaatattgggtggttgatttgttcttagcagacttggcttcattttggtcttgagataaaatggccagcataaatgctgtttatattcacgttttcctaggtgtgtgtgtgcaggccacagcagcatgcccttggtgtagtcagtgccgaaaggggtctgttccttcttgagcctgcctgcagggatggtctccttttaaagcaggttgtgtgcagcattcagtacactgaaggcataaaccttccactcttgaacaaagcagctgctttttaaaagcggtaattgcttctttaccttttatttcttttgtaaatgaagcttttctttaagaatgtgactttaaagtgttgtctattgcataaaacagttgacactcacttattgtaaagtgaagattgttctactgcatgtgaagtggaccatgcagatttctgtatgttctcagtatgcatcactagataataaagtcttttgtgaacaaggcatttgtagccatttttaaaagtttttgtcttcagtgctggtaagtcaggtaaaccataaatagttaaaagcaaccttttgtttttttcctgaaagtttttaattgaaagtattattagttaaagatgtaaacctagccaaaattaccagtttattaataattaggatcctaattatttcaaaaaatcctacaaatattgtcagctttcagtgtagtgagattattcctgtaggttatggggtataattcaggatttaactaatgtttctgctattttctcacttttccttttgatggtgcggaaagagaaaaaggaaaacggggcacaggccattcgacgccttctccaaggggtctgatttgctgagacaccagcttcaccttcttaacaaggcacctaattacaacaagcatgcacattttggtgcattcaagaatggaaaatcagaatagcagcattgattcttctggtgcagctcagtggaagatgatgacaaccagaagacatgagctaaggtttctgtcctataaaagatttattaaaaaacaatccttcatttattttttgtctaattttttagttttcagcattatgatttgggttttattggtgtttggtatttagaattagtgctgttgtggagtgcgtctgtaaagtgcttgttttatcatacttcctgcctctcccctcccccagtttctcctcccctaaaataaaaatagtggtcaactttagtaatataaaaggctgctggatgctgagattccacataacacatggttgtcaaaattggatgttaaggattcttagaaaaacagcaaccaccagaatagcatatatctaaaagtagtcttcagctttaggcagatgcaaaagaatacaaactggaatattaagaatactgttcaactcctttagtatctgttccccaacttaccctgtagaaacctcgttattaaccagtgttccagtcttaaagtagacaaaatattcagagccattttttttaagggaaatgaaaaagatactctgggttttttatactccccaatttagcatatctagactacctatttgaaaggaaccctatcaactgtcttatgtacgttacatgattttcctacactctgtaattttgctgaggtgcaatttggaactctgcaagacctactagattgaatttatttagtgaatgctcctgaataaatgtgcattcctcttttagagtagctgtatgcttttcaaatgctatctgccgtgaattttttgcttttattatactttatggcaaaagtgatatcaagtgattgtcagacttgagggctcatagaagtgttaggtacggctctcaaagatgttacagttttttctagggttgggagaatagttgagatctggaaagcatagacattttttacactctggatagactttattcttgaagatcatcagaaatgaggttggaatttcgaggttttgagcagggggagcatcttatattcacccttaaatcgttattaatacatcctgttttcttcattccctgatagctatctcatttcactctactgtctcaaaattttgttttaaaataatagaaatgttttgccattattaagtaccactttattcctaacaaaaataagtactcaggacttttttttcaaaatgaaatatttatgtactgttttatggtatgtggtagagtaagtaaaatgtaatgttctcagttttgttccatatttgcattcctcttatgctttacctgtattttatcatttgtaagcagaactctagctatatggggtagaaataaaatctctgagatgaaacaaaggaatcaacatgataaaatttaggcgaagtagttaagaaatggcccttttgaatgttgaagataggaaagaaagccatatattcaaatatgtaattttcctcatttagttataatgacatctttaccaattgggcttcataaatgtgtttctttcttaatagtatcctagttccagcatatattcaacatgaattttatcattctcctcctaatggaatgtcttccttatagaaatgttcacgacaaattcatttgtgttttttacatgtcaataatgtatgctaaattaaaatgttttccagttattctgatagatgtcattatggcatccttaatttttcttctccttctgtatatagggtaagggactgttctgaagaacctttccatttagtgatcaagatatggaagctgatttctgaaaatgctcagtgtgtactctaattatttatggtaccatttgaattgtaacttgcattttagcagtgcatgtttctaattgacttactgggaaactgaataaaatatgcctcttattatca

SEQ ID NO: 326193 - DNA, 6720 bp, Homo sapiens
ggacgcgtgggtcgacccacgcgtcggatggccgcgcggggacccagtcgctacgggagcagccagagatggaagatgctaattctgaaaagagtataaatgaagaaaatggagaagtatcagaagaccagtctcaaaataagcacagtcgtcacaaaaaaaagaagcataaacacagaagtaaacataagaaacataaacattcctcagaagaagacaaggataaaaaacataaacataagcataaacataagaaacacaaaagaaaagaggttattgatgcttctgataaagagggtatgtctccagcaaaaagaactaaacttgatgatttagctttgctagaagacttggaaaaacagagagccttgattaaggccgaacttgataatgagttaatggaaggaaaggtccagtctggtatggggctcattttgcaaggttatgagtctggctctgaagaagagggggaaattcatgaaaaggcaagaaatggaaataggtctagtactagatcttcaagtacaaaggggaaacttgaacttgtggacaataaaattactacaaagaaacgaagtaaaagcagatccaaagaacggactagacataggtctgataaaaagaaaagtaaggggggtattgaaatcgttaaagagaaaacaactaggagcaagtcaaaggagaggaaaaaatctaaaagcccatccaaaagaagtaagtctcaagatcaagcaaggaaatcaaaatcccctacccttagaaggcgatctcaagagaaaattggtaaggccagatctcctactgatgataaggttaaaattgaagataaaagtaaatcaaaagataggaaaaaatccccaattataaatgaaagtagaagtcgcgatcgaggtaaaaaatccagatccccagttgatttaagaggtaaatccaaagacagaaggtcacggtccaaagagagaaaatcaaaacggtctgaaactgataaagaaaagaagccaattaaatctccctctaaagatgcttcatctgggaaagaaaataggtcacccagcagaagacctggtcgtagtcctaaaagaagaagtttgtctccaaaaccacgtgataaatcaagaagaagcaggtctccacttttgaatgatagaagatctaagcagagcaaatccccctcgcggacactgtctcctgggagaagagccaagagccgatccttagaaagaaaacgacgagaaccagagaggagacgactttcttctccaagaacacgacctcgagatgatatcctcagtagacgtgaaagatcaaaagatgccagccccatcaatagatggtctccaacccgaagaagaagtagatctcccattagaaggaggtctcgttccccactcagacgtagcaggtctccaagaagaagaagcagatctcctcggagaagggacagaggtcggaggagcagatcacgcttgcgaaggcggtctcgatcacgcggtggtcgtagacgaaggagcagaagcaaagtaaaggaagataaatttaaaggaagtctttctgaaggaatgaaagttgagcaggaatcttcgtctgatgataaccttgaagactttgatgtagaggaagaagatgaagaagccctaatagaacagagaagaatccaaaggcaggcaattgttcagaaatataaataccttgctgaagatagcaacatgtctgtgccatctgaaccaagcagcccccagagcagtacgagaacacgatcaccatctccagatgacattctggagcgagtagctgctgatgttaaagagtatgaacgggaaaatgttgatacatttgaggcctcagtgaaagccaagcataatctaatgacagttgaacagaataatggttcatctcagaagaagttgttggcacctgatatgtttacagaatctgatgatatgtttgctgcgtattttgatagtgctcgtcttcgggccgctggcattggaaaagatttcaaagagaatcccaacctcagagataactggaccgatgcagaaggctattatcgtgtgaacataggtgaagtcctagataaacgttacaatgtgtatggctacactgggcaaggtgtattcagtaatgttgtacgagccagagataatgcaagagccaaccaagaagtggctgtaaagatcatcagaaacaatgagctcatgcaaaagactggtttaaaagaattagagttcttgaaaaaacttaatgatgctgatcctgatgacaaatttcattgtctgagactcttcaggcacttctatcacaagcagcatctttgtctggtattcgagcctctcagcatgaacttacgagaggtgttaaaaaaatatggtaaagatgttggtcttcatattaaagctgtaagatcctatagtcagcagttgttcctggcattgaaactccttaaaagatgcaatatcctacatgcagatatcaagccagacaatatcctggttaatgaatccaaaactattttaaagctttgcgattttgggtcggcttcacatgttgcggataatgacataacaccttatcttgtcagtagattttatcgtgctcctgaaatcattataggtaaaagctatgactatggtatagatatgtggtctgtaggttgcaccttatacgaactctatactggaaaaattttattccctggcaaaaccaataaccatatgctgaagcttgcaatggatctcaaaggaaagatgccaaataagatgattcgaaaaggtgtgttcaaagatcagcattttgatcaaaatctcaacttcatgtacatagaagttgataaagtaacagagagggagaaagttactgttatgagcaccattaatccaactaaggacctgttggctgacttgattgggtgccagagacttcctgaagaccaacgtaagaaagtacaccagctaaaggacttgttggaccagattctgatgttggacccagctaaacgaattagcatcaaccaggccctacagcacgccttcatccaggaaaaaatttaaacaagatgaagaaactccaagggtttgagtaaatacaaagactgaagaaatttcacagcagtttattaatgtatataaacttataaatatttctccagcaaatttgaggaagcatgatatatttgaattaacaccaagggtgatatttcttttagagatgttagttaatctgttttgtgtcttacgtgaaatttcactgtagactgttttaaattgccaagactgcacaaaattacagtgctaatgtatatggttgcagttcacataaagacaaaagcatctgttatgaaatgagtagtaatattgggtggttgatttgttcttagcagacttggcttcattttggtcttgagataaaatggccagcataaatgctgtttatattcacgttttcctaggtgtgtgtgtgcaggccacagcagcatgcccttggtgtagtcagtgccgaaaggggtctgttccttcttgagcctgcctgcagggatggtctccttttaaagcaggttgtgtgcagcattcagtacactgaaggtaagctaaaccatcaacatctctggtgttttaagatgttattttattggaacaactgacaaatgagggatgttagctttgtggcagaattccctgcatgtgtgataactgatcttgttttattttttggcattgcaactgtggcatagttacaatttctgtttgttcatcacatttaaaattggaagagaacgcgcttgatggatagagcgccttcagtgtactgtttcttattaactttactttttttaaatcaacttgctatagactttatatacattttgttaaatatagttcctagtgacatagaaacgatgcgtagttttcatttactaattacaaatgttgaggcctaattctgaaagtcctcatatttaaaggctagacaacgtaatgaaatttttaactatttgtatgtcattttgaaagtgtactgctttatggtaaaagtgtttttcatttgttcattgttttcattatttgtgatcatgttgtctttcaatacaggcataaaccttccactcttgaacaaagcagctgctttttaaaagcggtaattgcttctttaccttttatttcttttgtaaatgaagcttttctttaagaatgtgactttaaagtgttgtctattgcataaaacagttgacactcacttattgtaaagtgaagattgttctactgcatgtgaagtggaccatgcagatttctgtatgttctcagtatgcatcactagataataaagtcttttgtgaacaaggcatttgtagccatttttaaaagtttttgtcttcagtgctggtaagtcaggtaaaccataaatagttaaaagcaaccttttgtttttttcctgaaagtttttaattgaaagtattattagttaaagatgtaaacctagccaaaattaccagtttattaataattaggatcctaattatttcaaaaaatcctacaaatattgtcagctttcagtgtagtgagattattcctgtaggttatggggtataattcaggatttaactaatgtttctgctattttctcacttttccttttgatggtgcggaaagagaaaaaggaaaacggggcacaggccattcgacgccttctccaaggggtctgatttgctgagacaccagcttcaccttcttaacaaggcacctaattacaacaagcatgcacattttggtgcattcaagaatggaaaatcagaatagcagcattgattcttctggtgcagctcagtggaagatgatgacaaccagaagacatgagctaaggtttctgtcctataaaagatttattaaaaaacaatccttcatttattttttgtctaattttttagttttcagcattatgatttgggttttattggtgtttggtatttagaattagtgctgttgtggagtgcgtctgtaaagtgcttgttttatcatacttcctgcctctcccctcccccagtttctcctcccctaaaataaaaatagtggtcaactttagtaatataaaaggctgctggatgctgagattccacataacacatggttgtcaaaattggatgttaaggattcttagaaaaacagcaaccaccagaatagcatatatctaaaagtagtcttcagctttaggcagatgcaaaagaatacaaactggaatattaagaatactgttcaactcctttagtatctgttccccaacttaccctgtagaaacctcgttattaaccagtgttccagtcttaaagtagacaaaatattcagagccattttttttaagggaaatgaaaaagatactctgggttttttatactccccaatttagcatatctagactacctatttgaaaggaaccctatcaactgtcttatgtacgttacatgattttcctacactctgtaattttgctgaggtgcaatttggaactctgcaagacctactagattgaatttatttagtgaatgctcctgaataaatgtgcattcctcttttagagtagctgtatgcttttcaaatgctatctgccgtgaattttttgcttttattatactttatggcaaaagtgatatcaagtgattgtcagacttgagggctcatagaagtgttaggtacggctctcaaagatgttacagttttttctagggttgggagaatagttgagatctggaaagcatagacattttttacactctggatagactttattcttgaagatcatcagaaatgaggttggaatttcgaggttttgagcagggggagcatcttatattcacccttaaatcgttattaatacatcctgttttcttcattccctgatagctatctcatttcactctactgtctcaaaattttgttttaaaataatagaaatgttttgccattattaagtaccactttattcctaacaaaaataagtactcaggacttttttttcaaaatgaaatatttatgtactgttttatggtatgtggtagagtaagtaaaatgtaatgttctcagttttgttccatatttgcattcctcttatgctttacctgtattttatcatttgtaagcagaactctagctatatggggtagaaataaaatctctgagatgaaacaaaggaatcaacatgataaaatttaggcgaagtagttaagaaatggcccttttgaatgttgaagataggaaagaaagccatatattcaaatatgtaattttcctcatttagttataatgacatctttaccaattgggcttcataaatgtgtttctttcttaatagtatcctagttccagcatatattcaacatgaattttatcattctcctcctaatggaatgtcttccttatagaaatgttcacgacaaattcatttgtgttttttacatgtcaataatgtatgctaaattaaaatgttttccagttattctgatagatgtcattatggcatccttaatttttcttctccttctgtatatagggtaagggactgttctgaagaacctttccatttagtgatcaagatatggaagctgatttctgaaaatgctcagtgtgtactctaattatttatggtaccatttgaattgtaacttgcattttagcagtgcatgtttctaattgacttactgggaaactgaataaaatatgcctcttattatca

SEQ ID NO: 326194 - DNA, 4062 bp, Homo sapiens
tccacttcccctaccctccaccgtccgggagccgccgccaccgccgccgaggagtcaggaagttcaagatggccgccgcggagacccagtcgctacgggagcagccagagatggaagatgctaattctgaaaagagtataaatgaagaaaatggagaagtatcagaagaccagtctcaaaataagcacagtcgtcacaaaaaaaagaagcataaacacagaagtaaacataagaaacataaacattcctcagaagaagacaaggataaaaaacataaacataagcataaacataagaaacacaaaagaaaagaggttattgatgcttctgataaagagggtatgtctccagcaaaaagaactaaacttgatgatttagctttgctagaagacttggaaaaacagagagccttgattaaggccgaacttgataatgagttaatggaaggaaaggtccagtctggtatggggctcattttgcaaggttatgagtctggctctgaagaagagggggaaattcatgaaaaggcaagaaatggaaataggtctagtactagatcttcaagtacaaaggggaaacttgaacttgtggacaataaaattactacaaagaaacgaagtaaaagcagatccaaagaacggactagacataggtctgataaaaagaaaagtaaggggggtattgaaatcgttaaagagaaaacaactaggagcaagtcaaaggagaggaaaaaatctaaaagcccatccaaaagaagtaagtctcaagatcaagcaaggaaatcaaaatcccctacccttagaaggcgatctcaagagaaaattggtaaggccagatctcctactgatgataaggttaaaattgaagataaaagtaaatcaaaagataggaaaaaatccccaattataaatgaaagtagaagtcgcgatcgaggtaaaaaatccagatccccagttgatttaagaggtaaatccaaagacagaaggtcacggtccaaagagagaaaatcaaaacggtctgaaactgataaagaaaagaagccaattaaatctccctctaaagatgcttcatctgggaaagaaaataggtcacccagcagaagacctggtcgtagtcctaaaagaagaagtttgtctccaaaaccacgtgataaatcaagaagaagcaggtctccacttttgaatgatagaagatctaagcagagcaaatccccctcgcggacactgtctcctgggagaagagccaagagccgatccttagaaagaaaacgacgagaaccagagaggagacgactttcttctccaagaacacgacctcgagatgatatcctcagtagacgtgaaagatcaaaagatgccagccccatcaatagatggtctccaacccgaagaagaagtagatctcccattagaaggaggtctcgttccccactcagacgtagcaggtctccaagaagaagaagcagatctcctcggagaagggacagaggtcggaggagcagatcacgcttgcgaaggcggtctcgatcacgcggtggtcgtagacgaaggagcagaagcaaagtaaaggaagataaatttaaaggaagtctttctgaaggaatgaaagttgagcaggaatcttcgtctgatgataaccttgaagactttgatgtagaggaagaagatgaagaagccctaatagaacagagaagaatccaaaggcaggcaattgttcagaaatataaataccttgctgaagatagcaacatgtctgtgccatctgaaccaagcagcccccagagcagtacgagaacacgatcaccatctccagatgacattctggagcgagtagctgctgatgttaaagagtatgaacgggaaaatgttgatacatttgaggcctcagtgaaagccaagcataatctaatgacagttgaacagaataatggttcatctcagaagaagttgttggcacctgatatgtttacagaatctgatgatatgtttgctgcgtattttgatagtgctcgtcttcgggccgctggcattggaaaagatttcaaagagaatcccaacctcagagataactggaccgatgcagaaggctattatcgtgtgaacataggtgaagtcctagataaacgttacaatgtgtatggctacactgggcaaggtgtattcagtaatgttgtacgagccagagataatgcaagagccaaccaagaagtggctgtaaagatcatcagaaacaatgagctcatgcaaaagactggtttaaaagaattagagttcttgaaaaaacttaatgatgctgatcctgatgacaaatttcattgtctgagactcttcaggcacttctatcacaagcagcatctttgtctggtattcgagcctctcagcatgaacttacgagaggtgttaaaaaaatatggtaaagatgttggtcttcatattaaagctgtaagatcctatagtcagcagttgttcctggcattgaaactccttaaaagatgcaatatcctacatgcagatatcaagccagacaatatcctggttaatgaatccaaaactattttaaagctttgcgattttgggtcggcttcacatgttgcggataatgacataacaccttatcttgtcagtagattttatcgtgctcctgaaatcattataggtaaaagctatgactatggtatagatatgtggtctgtaggttgcaccttatacgaactctatactggaaaaattttattccctggcaaaaccaataaccatatgctgaagcttgcaatggatctcaaaggaaagatgccaaataagatgattcgaaaaggtgtgttcaaagatcagcattttgatcaaaatctcaacttcatgtacatagaagttgataaagtaacagagagggagaaagttactgttatgagcaccattaatccaactaaggacctgttggctgacttgattgggtgccagagacttcctgaagaccaacgtaagaaagtacaccagctaaaggacttgttggaccagattctgatgttggacccagctaaacgaattagcatcaaccaggccctacagcacgccttcatccaggaaaaaatttaaacaagatgaagaaactccaagggtttgagtaaatacaaagactgaagaaatttcacagcagtttattaatgtatataaacttataaatatttctccagcaaatttgaggaagcatgatatatttgaattaacaccaagggtgatatttcttttagagatgttagttaatctgttttgtgtcttacgtgaaatttcactgtagactgttttaaattgccaagactgcacaaaattacagtgctaatgtatatggttgcagttcacataaagacaaaagcatctgttatgaaatgagtagtaatattgggtggttgatttgttcttagcagacttggcttcattttggtcttgagataaaatggccagcataaatgctgtttatattcacgttttcctaggtgtgtgtgtgcaggccacagcagcatgcccttggtgtagtcagtgccgaaaggggtctgttccttcttgagcctgcctgcagggatggtctccttttaaagcaggttgtgtgcagcattcagtacactgaaggcataaaccttccactcttgaacaaagcagctgctttttaaaagcgagaaaaaggaaaacggggcacaggccattcgacgccttctccaaggggtctgatttgctgagacaccagcttcaccttcttaacaaggcacctaattacaacaagcatgcacattttggtgcattcaagaatggaaaatcagaatagcagcattgattcttctggtgcagctcagtggaagatgatgacaaccagaagacatgagctaagggtaagggactgttctgaagaacctttccatttagtgatcaagatatggaagctgatttctgaaaatgctcagtgtgtactctaattatttatggtaccatttgaattgtaacttgcattttagcagtgcatgtttctaattgacttactgggaaactgaataaaatatgcctcttattatca

SEQ ID NO: 326195 - DNA, 3874 bp, Homo sapiens
tccacttcccctaccctccaccgtccgggagccgccgccaccgccgccgaggagtcaggaagttcaagatggccgccgcggagacccagtcgctacgggagcagccagagatggaagatgctaattctgaaaagagtataaatgaagaaaatggagaagtatcagaagaccagtctcaaaataagcacagtcgtcacaaaaaaaagaagcataaacacagaagtaaacataagaaacataaacattcctcagaagaagacaaggataaaaaacataaacataagcataaacataagaaacacaaaagaaaagaggttattgatgcttctgataaagagggtatgtctccagcaaaaagaactaaacttgatgatttagctttgctagaagacttggaaaaacagagagccttgattaaggccgaacttgataatgagttaatggaaggaaaggtccagtctggtatggggctcattttgcaaggttatgagtctggctctgaagaagagggggaaattcatgaaaaggcaagaaatggaaataggtctagtactagatcttcaagtacaaaggggaaacttgaacttgtggacaataaaattactacaaagaaacgaagtaaaagcagatccaaagaacggactagacataggtctgataaaaagaaaagtaaggggggtattgaaatcgttaaagagaaaacaactaggagcaagtcaaaggagaggaaaaaatctaaaagcccatccaaaagaagtaagtctcaagatcaagcaaggaaatcaaaatcccctacccttagaaggcgatctcaagagaaaattggtaaggccagatctcctactgatgataaggttaaaattgaagataaaagtaaatcaaaagataggaaaaaatccccaattataaatgaaagtagaagtcgcgatcgaggtaaaaaatccagatccccagttgatttaagaggtaaatccaaagacagaaggtcacggtccaaagagagaaaatcaaaacggtctgaaactgataaagaaaagaagccaattaaatctccctctaaagatgcttcatctgggaaagaaaataggtcacccagcagaagacctggtcgtagtcctaaaagaagaagtttgtctccaaaaccacgtgataaatcaagaagaagcaggtctccacttttgaatgatagaagatctaagcagagcaaatccccctcgcggacactgtctcctgggagaagagccaagagccgatccttagaaagaaaacgacgagaaccagagaggagacgactttcttctccaagaacacgacctcgagatgatatcctcagtagacgtgaaagatcaaaagatgccagccccatcaatagatggtctccaacccgaagaagaagtagatctcccattagaaggaggtctcgttccccactcagacgtagcaggtctccaagaagaagaagcagatctcctcggagaagggacagaggtcggaggagcagatcacgcttgcgaaggcggtctcgatcacgcggtggtcgtagacgaaggagcagaagcaaagtaaaggaagataaatttaaaggaagtctttctgaaggaatgaaagttgagcaggaatcttcgtctgatgataaccttgaagactttgatgtagaggaagaagatgaagaagccctaatagaacagagaagaatccaaaggcaggcaattgttcagaaatataaataccttgctgaagatagcaacatgtctgtgccatctgaaccaagcagcccccagagcagtacgagaacacgatcaccatctccagatgacattctggagcgagtagctgctgatgttaaagagtatgaacgggaaaatgttgatacatttgaggcctcagtgaaagccaagcataatctaatgacagttgaacagaataatggttcatctcagaagaagttgttggcacctgatatgtttacagaatctgatgatatgtttgctgcgtattttgatagtgctcgtcttcgggccgctggcattggaaaagatttcaaagagaatcccaacctcagagataactggaccgatgcagaaggctattatcgtgtgaacataggtgaagtcctagataaacgttacaatgtgtatggctacactgggcaaggtgtattcagtaatgttgtacgagccagagataatgcaagagccaaccaagaagtggctgtaaagatcatcagaaacaatgagctcatgcaaaagactggtttaaaagaattagagttcttgaaaaaacttaatgatgctgatcctgatgacaaatttcattgtctgagactcttcaggcacttctatcacaagcagcatctttgtctggtattcgagcctctcagcatgaacttacgagaggtgttaaaaaaatatggtaaagatgttggtcttcatattaaagctgtaagatcctatagtcagcagttgttcctggcattgaaactccttaaaagatgcaatatcctacatgcagatatcaagccagacaatatcctggttaatgaatccaaaactattttaaagctttgcgattttgggtcggcttcacatgttgcggataatgacataacaccttatcttgtcagtagattttatcgtgctcctgaaatcattataggtaaaagctatgactatggtatagatatgtggtctgtaggttgcaccttatacgaactctatactggaaaaattttattccctggcaaaaccaataaccatatgctgaagcttgcaatggatctcaaaggaaagatgccaaataagatgattcgaaaaggtgtgttcaaagatcagcattttgatcaaaatctcaacttcatgtacatagaagttgataaagtaacagagagggagaaagttactgttatgagcaccattaatccaactaaggacctgttggctgacttgattgggtgccagagacttcctgaagaccaacgtaagaaagtacaccagctaaaggacttgttggaccagattctgatgttggacccagctaaacgaattagcatcaaccaggccctacagcacgccttcatccaggaaaaaatttaaacaagatgaagaaactccaagggtttgagtaaatacaaagactgaagaaatttcacagcagtttattaatgtatataaacttataaatatttctccagcaaatttgaggaagcatgatatatttgaattaacaccaagggtgatatttcttttagagatgttagttaatctgttttgtgtcttacgtgaaatttcactgtagactgttttaaattgccaagactgcacaaaattacagtgctaatgtatatggttgcagttcacataaagacaaaagcatctgttatgaaatgagtagtaatattgggtggttgatttgttcttagcagacttggcttcattttggtcttgagataaaatggccagcataaatgctgtttatattcacgttttcctaggtgtgtgtgtgcaggccacagcagcatgcccttggtgtagtcagtgccgaaaggggtctgttccttcttgagcctgcctgcagggatggtctccttttaaagcaggttgtgtgcagcattcagtacactgaaggcataaaccttccactcttgaacaaagcagctgctttttaaaagcggtaattgcttctttaccttttatttcttttgtaaatgaagcttttctttaagaatgtgactttaaagtgttgtctattgcataaaacagttgacactcacttattgtaaagtgaagattgttctactgcatgtgaagtggaccatgcagatttctgtatgttctcagtatgcatcactagataataaagtcttttgtgaacaagg

SEQ ID NO: 326196 - DNA, 3692 bp, Homo sapiens
tccacttcccctaccctccaccgtccgggagccgccgccaccgccgccgaggagtcaggaagttcaagatggccgccgcggagacccagtcgctacgggagcagccagagatggaagatgctaattctgaaaagagtataaatgaagaaaatggagaagtatcagaagaccagtctcaaaataagcacagtcgtcacaaaaaaaagaagcataaacacagaagtaaacataagaaacataaacattcctcagaagaagacaaggataaaaaacataaacataagcataaacataagaaacacaaaagaaaagaggttattgatgcttctgataaagagggtatgtctccagcaaaaagaactaaacttgatgatttagctttgctagaagacttggaaaaacagagagccttgattaaggccgaacttgataatgagttaatggaaggaaaggtccagtctggtatggggctcattttgcaaggttatgagtctggctctgaagaagagggggaaattcatgaaaaggcaagaaatggaaataggtctagtactagatcttcaagtacaaaggggaaacttgaacttgtggacaataaaattactacaaagaaacgaagtaaaagcagatccaaagaacggactagacataggtctgataaaaagaaaagtaaggggggtattgaaatcgttaaagagaaaacaactaggagcaagtcaaaggagaggaaaaaatctaaaagcccatccaaaagaagtaagtctcaagatcaagcaaggaaatcaaaatcccctacccttagaaggcgatctcaagagaaaattggtaaggccagatctcctactgatgataaggttaaaattgaagataaaagtaaatcaaaagataggaaaaaatccccaattataaatgaaagtagaagtcgcgatcgaggtaaaaaatccagatccccagttgatttaagaggtaaatccaaagacagaaggtcacggtccaaagagagaaaatcaaaacggtctgaaactgataaagaaaagaagccaattaaatctccctctaaagatgcttcatctgggaaagaaaataggtcacccagcagaagacctggtcgtagtcctaaaagaagaagtttgtctccaaaaccacgtgataaatcaagaagaagcaggtctccacttttgaatgatagaagatctaagcagagcaaatccccctcgcggacactgtctcctgggagaagagccaagagccgatccttagaaagaaaacgacgagaaccagagaggagacgactttcttctccaagaacacgacctcgagatgatatcctcagtagacgtgaaagatcaaaagatgccagccccatcaatagatggtctccaacccgaagaagaagtagatctcccattagaaggaggtctcgttccccactcagacgtagcaggtctccaagaagaagaagcagatctcctcggagaagggacagaggtcggaggagcagatcacgcttgcgaaggcggtctcgatcacgcggtggtcgtagacgaaggagcagaagcaaagtaaaggaagataaatttaaaggaagtctttctgaaggaatgaaagttgagcaggaatcttcgtctgatgataaccttgaagactttgatgtagaggaagaagatgaagaagccctaatagaacagagaagaatccaaaggcaggcaattgttcagaaatataaataccttgctgaagatagcaacatgtctgtgccatctgaaccaagcagcccccagagcagtacgagaacacgatcaccatctccagatgacattctggagcgagtagctgctgatgttaaagagtatgaacgggaaaatgttgatacatttgaggcctcagtgaaagccaagcataatctaatgacagttgaacagaataatggttcatctcagaagaagttgttggcacctgatatgtttacagaatctgatgatatgtttgctgcgtattttgatagtgctcgtcttcgggccgctggcattggaaaagatttcaaagagaatcccaacctcagagataactggaccgatgcagaaggctattatcgtgtgaacataggtgaagtcctagataaacgttacaatgtgtatggctacactgggcaaggtgtattcagtaatgttgtacgagccagagataatgcaagagccaaccaagaagtggctgtaaagatcatcagaaacaatgagctcatgcaaaagactggtttaaaagaattagagttcttgaaaaaacttaatgatgctgatcctgatgacaaatttcattgtctgagactcttcaggcacttctatcacaagcagcatctttgtctggtattcgagcctctcagcatgaacttacgagaggtgttaaaaaaatatggtaaagatgttggtcttcatattaaagctgtaagatcctatagtcagcagttgttcctggcattgaaactccttaaaagatgcaatatcctacatgcagatatcaagccagacaatatcctggttaatgaatccaaaactattttaaagctttgcgattttgggtcggcttcacatgttgcggataatgacataacaccttatcttgtcagtagattttatcgtgctcctgaaatcattataggtaaaagctatgactatggtatagatatgtggtctgtaggttgcaccttatacgaactctatactggaaaaattttattccctggcaaaaccaataaccatatgctgaagcttgcaatggatctcaaaggaaagatgccaaataagatgattcgaaaaggtgtgttcaaagatcagcattttgatcaaaatctcaacttcatgtacatagaagttgataaagtaacagagagggagaaagttactgttatgagcaccattaatccaactaaggacctgttggctgacttgattgggtgccagagacttcctgaagaccaacgtaagaaagtacaccagctaaaggacttgttggaccagattctgatgttggacccagctaaacgaattagcatcaaccaggccctacagcacgccttcatccaggaaaaaatttaaacaagatgaagaaactccaagggtttgagtgtgtgtgtgcaggccacagcagcatgcccttggtgtagtcagtgccgaaaggggtctgttccttcttgagcctgcctgcagggatggtctccttttaaagcaggttgtgtgcagcattcagtacactgaaggcataaaccttccactcttgaacaaagcagctgctttttaaaagcgagaaaaaggaaaacggggcacaggccattcgacgccttctccaaggggtctgatttgctgagacaccagcttcaccttcttaacaaggcacctaattacaacaagcatgcacattttggtgcattcaagaatggaaaatcagaatagcagcattgattcttctggtgcagctcagtggaagatgatgacaaccagaagacatgagctaagggtaagggactgttctgaagaacctttccatttagtgatcaagatatggaagctgatttctgaaaatgctcagtgtgtactctaattatttatggtaccatttgaattgtaacttgcattttagcagtgcatgtttctaattgacttactgggaaactgaataaaatatgcctcttattatca

SEQ ID NO: 326197 - DNA, 3354 bp, Homo sapiens
tccacttcccctaccctccaccgtccgggagccgccgccaccgccgccgaggagtcaggaagttcaagatggccgccgcggagacccagtcgctacgggagcagccagagatggaagatgctaattctgaaaagagtataaatgaagaaaatggagaagtatcagaagaccagtctcaaaataagcacagtcgtcacaaaaaaaagaagcataaacacagaagtaaacataagaaacataaacattcctcagaagaagacaaggataaaaaacataaacataagcataaacataagaaacacaaaagaaaagaggttattgatgcttctgataaagagggtatgtctccagcaaaaagaactaaacttgatgatttagctttgctagaagacttggaaaaacagagagccttgattaaggccgaacttgataatgagttaatggaaggaaaggtccagtctggtatggggctcattttgcaaggttatgagtctggctctgaagaagagggggaaattcatgaaaaggcaagaaatggaaataggtctagtactagatcttcaagtacaaaggggaaacttgaacttgtggacaataaaattactacaaagaaacgaagtaaaagcagatccaaagaacggactagacataggtctgataaaaagaaaagtaaggggggtattgaaatcgttaaagagaaaacaactaggagcaagtcaaaggagaggaaaaaatctaaaagcccatccaaaagaagtaagtctcaagatcaagcaaggaaatcaaaatcccctacccttagaaggcgatctcaagagaaaattggtaaggccagatctcctactgatgataaggttaaaattgaagataaaagtaaatcaaaagataggaaaaaatccccaattataaatgaaagtagaagtcgcgatcgaggtaaaaaatccagatccccagttgatttaagaggtaaatccaaagacagaaggtcacggtccaaagagagaaaatcaaaacggtctgaaactgataaagaaaagaagccaattaaatctccctctaaagatgcttcatctgggaaagaaaataggtcacccagcagaagacctggtcgtagtcctaaaagaagaagtttgtctccaaaaccacgtgataaatcaagaagaagcaggtctccacttttgaatgatagaagatctaagcagagcaaatccccctcgcggacactgtctcctgggagaagagccaagagccgatccttagaaagaaaacgacgagaaccagagaggagacgactttcttctccaagaacacgacctcgagatgatatcctcagtagacgtgaaagatcaaaagatgccagccccatcaatagatggtctccaacccgaagaagaagtagatctcccattagaaggaggtctcgttccccactcagacgtagcaggtctccaagaagaagaagcagatctcctcggagaagggacagaggtcggaggagcagatcacgcttgcgaaggcggtctcgatcacgcggtggtcgtagacgaaggagcagaagcaaagtaaaggaagataaatttaaaggaagtctttctgaaggaatgaaagttgagcaggaatcttcgtctgatgataaccttgaagactttgatgtagaggaagaagatgaagaagccctaatagaacagagaagaatccaaaggcaggcaattgttcagaaatataaataccttgctgaagatagcaacatgtctgtgccatctgaaccaagcagcccccagagcagtacgagaacacgatcaccatctccagatgacattctggagcgagtagctgctgatgttaaagagtatgaacgggaaaatgttgatacatttgaggcctcagtgaaagccaagcataatctaatgacagttgaacagaataatggttcatctcagaagaagttgttggcacctgatatgtttacagaatctgatgatatgtttgctgcgtattttgatagtgctcgtcttcgggccgctggcattggaaaagatttcaaagagaatcccaacctcagagataactggaccgatgcagaaggctattatcgtgtgaacataggtgaagtcctagataaacgttacaatgtgtatggctacactgggcaaggtgtattcagtaatgttgtacgagccagagataatgcaagagccaaccaagaagtggctgtaaagatcatcagaaacaatgagctcatgcaaaagactggtttaaaagaattagagttcttgaaaaaacttaatgatgctgatcctgatgacaaatttcattgtctgagactcttcaggcacttctatcacaagcagcatctttgtctggtattcgagcctctcagcatgaacttacgagaggtgttaaaaaaatatggtaaagatgttggtcttcatattaaagctgtaagatcctatagtcagcagttgttcctggcattgaaactccttaaaagatgcaatatcctacatgcagatatcaagccagacaatatcctggttaatgaatccaaaactattttaaagctttgcgattttgggtcggcttcacatgttgcggataatgacataacaccttatcttgtcagtagattttatcgtgctcctgaaatcattataggtaaaagctatgactatggtatagatatgtggtctgtaggttgcaccttatacgaactctatactggaaaaattttattccctggcaaaaccaataaccatatgctgaagcttgcaatggatctcaaaggaaagatgccaaataagatgattcgaaaaggtgtgttcaaagatcagcattttgatcaaaatctcaacttcatgtacatagaagttgataaagtaacagagagggtaagtgttttaaatgcagcatgcaatagttattttattgttaactgagtactaaatcatacgagctggtgaattaaaaaaaaaacaaaaacccaaaagtaagtatttcctttttgctgtcgaccaattcctaaataaaacacatcagaccatggaaaagatggagggattttaaaatgtttttctagcataattaatttatttttattataggtcatatttaggccctcgtcacatcttctttggattactttcttggtctggcttcccatccagctttcttattgctgctagagtgatgtttctgaaaacatatctggtcatgttcctatccctgcttaaaaacctttgttggctccctgttacctatgaaataatatttaagttcctcagaatgacaaatccaactgctttcttcagttttcagacctctcttcagtacattcagaacccccacctttccaca

SEQ ID NO: 326198 - DNA, 2134 bp, Homo sapiens
tccacttcccctaccctccaccgtccgggagccgccgccaccgccgccgaggagtcaggaagttcaagatggccgccgcggagacccagtcgctacgggagcagccagagatggaagatgctaattctgaaaagagtataaatgaagaaaatggagaagtatcagaagaccagtctcaaaataagcacagtcgtcacaaaaaaaagaagcataaacacagaagtaaacataagaaacataaacattcctcagaagaagacaaggataaaaaacataaacataagcataaacataagaaacacaaaagaaaagaggttattgatgcttctgataaagagggtatgtctccagcaaaaagaactaaacttgatgatttagctttgctagaagacttggaaaaacagagagccttgattaaggccgaacttgataatgagttaatggaaggaaaggtccagtctggtatggggctcattttgcaaggttatgagtctggctctgaagaagagggggaaattcatgaaaaggcaagaaatggaaataggtctagtactagatcttcaagtacaaaggggaaacttgaacttgtggacaataaaattactacaaagaaacgaagtaaaagcagatccaaagaacggactagacataggtctgataaaaagaaaagtaaggggggtattgaaatcgttaaagagaaaacaactaggagcaagtcaaaggagaggaaaaaatctaaaagcccatccaaaagaagtaagtctcaagatcaagcaaggaaatcaaaatcccctacccttagaaggcgatctcaagagaaaattggtaaggccagatctcctactgatgataaggttaaaattgaagataaaagtaaatcaaaagataggaaaaaatccccaattataaatgaaagtagaagtcgcgatcgaggtaaaaaatccagatccccagttgatttaagaggtaaatccaaagacagaaggtcacggtccaaagagagaaaatcaaaacggtctgaaactgataaagaaaagaagccaattaaatctccctctaaagatgcttcatctgggaaagaaaataggtcacccagcagaagacctggtcgtagtcctaaaagaagaagtttgtctccaaaaccacgtgataaatcaagaagaagcaggtctccacttttgaatgatagaagatctaagcagagcaaatccccctcgcggacactgtctcctgggagaagagccaagagccgatccttagaaagaaaacgacgagaaccagagaggagacgactttcttctccaagaacacgacctcgagatgatatcctcagtagacgtgaaagatcaaaagatgccagccccatcaatagatggtctccaacccgaagaagaagtagatctcccattagaaggaggtctcgttccccactcagacgtagcaggtctccaagaagaagaagcagatctcctcggagaagggacagaggtcggaggagcagatcacgcttgcgaaggcggtctcgatcacgcggtggtcgtagacgaaggagcagaagcaaagtaaaggaagataaatttaaaggaagtctttctgaaggaatgaaagttgagcaggaatcttcgtctgatgataaccttgaagactttgatgtagaggaagaagatgaagaagccctaatagaacagagaagaatccaaaggcaggcaattgttcagaaatataaataccttgctgaagatagcaacatgtctgtgccatctgaaccaagcagcccccagagcagtacgagaacacgatcaccatctccagatgacattctggagcgagtagctgctgatgttaaagagtatgaacgggaaaatgttgatacatttgaggcctcagtgaaagccaagcataatctaatgacagttgaacagaataatggtgagagagttttgtcctggcgacgcttttctctgaattgttagctctgtaactttataataagagacgttatttggggtgggattaggaaaagtaaaagattagacatgttgcttctgctgaatattgcagtaatataatattaaatatgtccttagaaatgttctctataaatgtgtttttattagttcacatatcctgaata

SEQ ID NO: 326199 - DNA, 937 bp, Homo sapiens
aaccaaacctcttgctctgctatatctccactctgcctcagactgaaaagctagtcctaacgtctttgccttaattctgttcattttttcaagtccttgaaggaccattcttccctgattctcaggctagaagtgtcacttttcttatctgtacttccaaagcactttcgtatatttttattatggcatttatatatagttcatttatatttaaattttaattccatgaacaatcaagtaccaagtataatggagaaggtgctcatcctctgccttccttgagcttctgggtgatgccaggcccaagtctttgtggcacccagctccatgctttgaatactatgtggctgaatgaatttttaaaatctcaaagcagttaaacagcaggaaagcccattaacttcgtactgaaaaagcaacatactgtgatgatacgggatgacatcatttcaggttgggcatacaaaaaagtaaggaagctaaactaagactatactcaccaggccatttagaagttttaaataatgcctccactattttttttcttagacatagcttttaatggggaaatggaattttgttattaatacccattatattcctgtaagtaaatgactatttttcccttaactcagtgattagacaggaaggaagacattagtgattagacaggagggaagatattagtgattagacagcagggaagatattagtggtaaagagtgaatgatagtagtgaatataaatggggctgaggaaactttaagcataaaagattcctgagatgactttacaagtctgtacgaatctgccttgactgtatatttcatactgcccaacaaaacaataaaaaacaattttaaatgcatatttttaaatgtacacagttttctatttcatcagacttaagtaaaaagcttccacatgaagacccttt

SEQ ID NO: 326200 - DNA, 908 bp, Homo sapiens
aaccaaacctcttgctctgctatatctccactctgcctcagactgaaaagctagtcctaacgtctttgccttaattctgttcattttttcaagtccttgaaggaccattcttccctgattctcaggctagaagtgtcacttttcttatctgtacttccaaagcactttcgtatatttttattatggcatttatatatagttcatttatatttaaattttaattccatgaacaatcaagtaccaagtataatggagaaggtgctcatcctctgccttccttgagcttctgggtgatgccaggcccaagtctttgtggcacccagctccatgctttgaatactatgtggctgaatgaatttttaaaatctcaaagcagttaaacagcaggaaagcccattaacttcgtactgaaaaagcaacatactgtgatgatacgggatgacatcatttcaggttgggcatacaaaaaagtaaggaagctaaactaagactatactcaccaggccatttagaagttttaaataatgcctccactattttttttcttagacatagcttttaatggggaaatggaatttttaaatgactatttttcccttaactcagtgattagacaggaaggaagacattagtgattagacaggagggaagatattagtgattagacagcagggaagatattagtggtaaagagtgaatgatagtagtgaatataaatggggctgaggaaactttaagcataaaagattcctgagatgactttacaagtctgtacgaatctgccttgactgtatatttcatactgcccaacaaaacaataaaaaacaattttaaatgcatatttttaaatgtacacagttttctatttcatcagacttaagtaaaaagcttccacatgaagacccttt

SEQ ID NO: 326201 - DNA, 412 bp, Homo sapiens
tctttgttgtggcccggtgtgcgtgcgttgtgtggcactgtggtggcggcggtggcggcagctacgtgtttcgtggtcgggactcggacaccggcgcgtctctcaagctcgcctcttcggtagctggaacgcctgattgtccccaacgagccggctcgattgtgtaggtcccgtatttaatgcctctgactgcctttgaagcgcagccctctgtggcccgcagccccctgagcctggctgttgtgtggtatttatgctctctttgtctgcctgtttctaaggaaatgcatgtgtgccctgagccgtgatgatcctcccatccgtgttgtgagcacaggcatttgtgtctggtctgtcctccctgttgattggtctggcatttccggtattaaaatgataaaataaatggcat

SEQ ID NO: 326202 - DNA, 1786 bp, Homo sapiens
gccttcgcgtcccttccttcccggagctggcaggcgggccgcggcggcggcgggcagcggacgggcggactgacgggcgcctccaccttgctccctccctggctgccggcttccttttgtctttctgggcggcgatgagcgcagggccggcgcagcagctgcgggcgcacggaggcccgcgctgctagtcactcctcccggcctcggcgcgcttgtcccgggcagcggcccgggcccgctgcagccgccgccggcgccgaacttgggctcgggaagccggcggaccgcgtcctgcgccggagcaggggcatggtctagtggcccagtcaggacgcggaaacactccctggaggttctgacccgctccctctcagcctccgcctggtctctggtgtagtcgccgccgccagccgccatgggcaaacagaacagcaagctgcggcccgaggtgctgcaggacctgcgggagaacacggagttcaccgaccacgagctgcaggagtggtacaagggcttcctcaaggactgccccaccggccacctgaccgtggacgagttcaagaagatctacgccaacttcttcccctacggcgacgcttccaagttcgccgagcacgtcttccgcaccttcgacaccaacggcgacggcaccatcgacttccgggagttcatcattgcgctgagcgtgacctcgcggggcaagctggagcagaagctcaagtgggccttcagcatgtacgacctggacggcaacggctacatcagccgcagcgagatgctggagatcgtgcaggccatctacaagatggtgtcgtctgtgatgaagatgccggaggatgagtccaccccggagaagcgcacagacaagatcttcaggcagatggacaccaacaatgacggcaaactgtccttggaagaattcatcagaggtgccaagagcgacccctccatcgtccgcctgctgcagtgcgaccccagcagtgccagtcagttctgagcgagcggcccctggacagttgcagagaaacacaggcttgtcgtgccgtttaagctttgcttgcaagagtggatgccccgcaatcgttcctgctctcccgggccccgggcctggggcatgcgttgcacctgcccggcccggtggctgcgcctccctcctccacctgaccaacgcgacattcctcccctcacgcctggcccggtcccttccagggcaactcccagggatgtggtgacatgcagggttcaagtgttcttggttccaggcacctcccggctcacggggagctcagaggtccatgccgaggagaccaggcaggacctcccgaggctgcgccccggccggcccatgcgttttgtgatcccaagtgactctgtgggaagggtggggacgaggcgtcgggagggtatacagggagcccctcccgtgcatggctgcccccccgttcattttctccaccacagccgcttgcacgtatagatactgtggtcccctttcttttaatatataaattatgtatggtgaagtggagtgtattgtgtaggtcccgtatttaatgcctctgactgcctttgaagcgcagccctctgtggcccgcagccccctgagcctggctgttgtgtggtatttatgctctctttgtctgcctgtttctaaggaaatgcatgtgtgccctgagccgtgatgatcctcccatccgtgttgtgagcacaggcatttgtgtctggtctgtcctccctgttgattggtctggcatttccggtattaaaatgataaaataaatggcat

SEQ ID NO: 326203 - DNA, 2245 bp, Homo sapiens
gccttcgcgtcccttccttcccggagctggcaggcgggccgcggcggcggcgggcagcggacgggcggactgacgggcgcctccaccttgctccctccctggctgccggcttccttttgtctttctgggcggcgatgagcgcagggccggcgcagcagctgcgggcgcacggaggcccgcgctgctagtcactcctcccggcctcggcgcgcttgtcccgggcagcggcccgggcccgctgcagccgccgccggcgccgaacttgggctcgggaagccggcggaccgcgtcctgcgccggagcaggggcatggtctagtggcccagtcaggacgcggaaacactccctggaggttctgacccgctccctctcagcctccgcctggtctctggtgtagtcgccgccgccagccgccatgggcaaacagaacagcaagctgcggcccgaggtgctgcaggacctgcgggagaacacggagttcaccgaccacgagctgcaggagtggtacaagggcttcctcaaggactgccccaccggccacctgaccgtggacgagttcaagaagatctacgccaacttcttcccctacggcgacgcttccaagttcgccgagcacgtcttccgcaccttcgacaccaacggcgacggcaccatcgacttccgggagttcatcattgcgctgagcgtgacctcgcggggcaagctggagcagaagctcaagtgggccttcagcatgtacgacctggacggcaacggctacatcagccgcagcgagatgctggagatcgtgcaggccatctacaagatggtgtcgtctgtgatgaagatgccggaggatgagtccaccccggagaagcgcacagacaagatcttcaggcagatggacaccaacaatgacggcaaactgtccttggaagaattcatcagaggtgccaagagcgacccctccatcgtccgcctgctgcagtgcgaccccagcagtgccagtcagttctgagcgagcggcccctggacagttgcagagaaacacaggcttgtcgtgccgtttaagctttgcttgcaagagtggatgccccgcaatcgttcctgctctcccgggccccgggcctggggcatgcgttgcacctgcccggcccggtggctgcgcctccctcctccacctgaccaacgcgacattcctcccctcacgcctggcccggtcccttccagggcaactcccagggatgtggtgacatgcagggttcaagtgttcttggttccaggcacctcccggctcacggggagctcagaggtccatgccgaggagaccaggcaggacctcccgaggctgcgccccggccggcccatgcgttttgtgatcccaagtgactctgtgggaagggtggggacgaggcgtcgggagggtatacagggagcccctcccgtgcatggctgcccccccgttcattttctccaccacagccgcttgcacgtatagatactgtggtcccctttcttttaatatataaattatgtatggtgaagtggagtgtattgtgtaggtcccgtatttaatgcctctgactgcctttgaagcgcagccctctgtggcccgcagccccctgagcctggctgttgtgtggtatttatgctctctttgtctgcctgtttctaaggaaatgcatgtgtgccctgagccgtgatgatcctcccatccgtgttgtgagcacaggcatttgtgtctggtctgtcctccctgttgattggtctggcatttccggtattaaaatgataaaataaatggcataaaaaaaaaaaaaaaaaaaaaaaaaaaaaaaaaaaaagaaaaacagagacaggacagaaacacaagataaaaaacgaacgagggggagggcgcgcgcgatcaaaaacagatactacccccgcgggagggggagccacgctaagatcgagcagcagcccaagtcagtagtggaagacagatgggtctgccataattaagtagagtactaatataatattaagacacgcacgcgggccgccaactttattaaaagaccgaagatttagatagaaagaagcagctcatcctgtgtaattttattggtgaaacacactcttgttgttgtggtgagcaaataagtgaacacactatccgtgttgatttagaacagcggagcgtatatacaatcttgtggagttttatgaggagaacaaacacaatggcgagcaggaaagaatgaccgcgtgttttagaacttgc

SEQ ID NO: 326204 - DNA, 1769 bp, Homo sapiens
agcggattccggccgtccgcgagctggcgtcggctccgcgcggggtggctggcccgtcacccctgtggtcgctcactgagctgtcctcgtctctctctgcttccctgcgtgcgcgcgatgagcgcagggccggcgcagcagctgcgggcgcacggaggcccgcgctgctagtcactcctcccggcctcggcgcgcttgtcccgggcagcggcccgggcccgctgcagccgccgccggcgccgaacttgggctcgggaagccggcggaccgcgtcctgcgccggagcaggggcatggtctagtggcccagtcaggacgcggaaacactccctggaggttctgacccgctccctctcagcctccgcctggtctctggtgtagtcgccgccgccagccgccatgggcaaacagaacagcaagctgcggcccgaggtgctgcaggacctgcgggagaacacggagttcaccgaccacgagctgcaggagtggtacaagggcttcctcaaggactgccccaccggccacctgaccgtggacgagttcaagaagatctacgccaacttcttcccctacggcgacgcttccaagttcgccgagcacgtcttccgcaccttcgacaccaacggcgacggcaccatcgacttccgggagttcatcattgcgctgagcgtgacctcgcggggcaagctggagcagaagctcaagtgggccttcagcatgtacgacctggacggcaacggctacatcagccgcagcgagatgctggagatcgtgcaggccatctacaagatggtgtcgtctgtgatgaagatgccggaggatgagtccaccccggagaagcgcacagacaagatcttcaggcagatggacaccaacaatgacggcaaactgtccttggaagaattcatcagaggtgccaagagcgacccctccatcgtccgcctgctgcagtgcgaccccagcagtgccagtcagttctgagcgagcggcccctggacagttgcagagaaacacaggcttgtcgtgccgtttaagctttgcttgcaagagtggatgccccgcaatcgttcctgctctcccgggccccgggcctggggcatgcgttgcacctgcccggcccggtggctgcgcctccctcctccacctgaccaacgcgacattcctcccctcacgcctggcccggtcccttccagggcaactcccagggatgtggtgacatgcagggttcaagtgttcttggttccaggcacctcccggctcacggggagctcagaggtccatgccgaggagaccaggcaggacctcccgaggctgcgccccggccggcccatgcgttttgtgatcccaagtgactctgtgggaagggtggggacgaggcgtcgggagggtatacagggagcccctcccgtgcatggctgcccccccgttcattttctccaccacagccgcttgcacgtatagatactgtggtcccctttcttttaatatataaattatgtatggtgaagtggagtgtattgtgtaggtcccgtatttaatgcctctgactgcctttgaagcgcagccctctgtggcccgcagccccctgagcctggctgttgtgtggtatttatgctctctttgtctgcctgtttctaaggaaatgcatgtgtgccctgagccgtgatgatcctcccatccgtgttgtgagcacaggcatttgtgtctggtctgtcctccctgttgattggtctggcatttccggtattaaaatgataaaataaatggcat

SEQ ID NO: 326205 - DNA, 1959 bp, Homo sapiens
gccttcgcgtcccttccttcccggagctggcaggcgggccgcggcggcggcgggcagcggacgggcggactgacgggcgcctccaccttgctccctccctggctgccggcttccttttgtctttctgggcggcgatgagcgcagggccggcgcagcagctgcgggcgcacggaggcccgcgctgctagtcactcctcccggcctcggcgcgcttgtcccgggcagcggcccgggcccgctgcagccgccgccggcgccgaacttgggctcgggaagccggcggaccgcgtcctgcgccggagcaggggcatggtctagtggcccagtcaggacgcggaaacactccctggaggttctgacccgctccctctcagcctccgcctggtctctgggttggctgttccagctccaaagagaaggaggaaccttttccttctgcagcccctccccaccagcctcattccttagctggggtcagacctggggtcctcactgcagctggcctctggcagcgttctcaggctagccctccctgctgaaaagagaaccgtgtgggactcacaggtgtagtcgccgccgccagccgccatgggcaaacagaacagcaagctgcggcccgaggtgctgcaggacctgcgggagaacacggagttcaccgaccacgagctgcaggagtggtacaagggcttcctcaaggactgccccaccggccacctgaccgtggacgagttcaagaagatctacgccaacttcttcccctacggcgacgcttccaagttcgccgagcacgtcttccgcaccttcgacaccaacggcgacggcaccatcgacttccgggagttcatcattgcgctgagcgtgacctcgcggggcaagctggagcagaagctcaagtgggccttcagcatgtacgacctggacggcaacggctacatcagccgcagcgagatgctggagatcgtgcaggccatctacaagatggtgtcgtctgtgatgaagatgccggaggatgagtccaccccggagaagcgcacagacaagatcttcaggcagatggacaccaacaatgacggcaaactgtccttggaagaattcatcagaggtgccaagagcgacccctccatcgtccgcctgctgcagtgcgaccccagcagtgccagtcagttctgagcgagcggcccctggacagttgcagagaaacacaggcttgtcgtgccgtttaagctttgcttgcaagagtggatgccccgcaatcgttcctgctctcccgggccccgggcctggggcatgcgttgcacctgcccggcccggtggctgcgcctccctcctccacctgaccaacgcgacattcctcccctcacgcctggcccggtcccttccagggcaactcccagggatgtggtgacatgcagggttcaagtgttcttggttccaggcacctcccggctcacggggagctcagaggtccatgccgaggagaccaggcaggacctcccgaggctgcgccccggccggcccatgcgttttgtgatcccaagtgactctgtgggaagggtggggacgaggcgtcgggagggtatacagggagcccctcccgtgcatggctgcccccccgttcattttctccaccacagccgcttgcacgtatagatactgtggtcccctttcttttaatatataaattatgtatggtgaagtggagtgtattgtgtaggtcccgtatttaatgcctctgactgcctttgaagcgcagccctctgtggcccgcagccccctgagcctggctgttgtgtggtatttatgctctctttgtctgcctgtttctaaggaaatgcatgtgtgccctgagccgtgatgatcctcccatccgtgttgtgagcacaggcatttgtgtctggtctgtcctccctgttgattggtctggcatttccggtattaaaatgataaaataaatggcat

SEQ ID NO: 326206 - DNA, 2037 bp, Homo sapiens
tccccaggccctgtctggtggtggccgcccttggggagctggcctctcagcacagcgccgggcaccggggctcaaggtcagtgggtgtgtgtttgggcttgaactgatgtgtgtgtttactgagctttctccgcagcctgctccggcagctccaaaatggcatttcaggaattgaattaccgacatttcagtacttgcggaatccaggaatagattatttgattgtatctgttggaagtcattgccgtaactggcttcgttttcttcaccaacatctaaaccgagtggggagggacagcaggagaatgctgtggtgacttgattttcccaaaagcacatctcccaagctggcggcagccgatggcgttgccctgtgactgggggaagcctgaggactcacggtcgcctcaggctggccaccttcgcactggaacctgcccatcacatcaaggagccctctcaggctgaaaaccctgtgccggggtggctgcagcaacacaaggattcccctccagctctgtgatgtggggagcagagggccactgagtcctgccatgggcatggtctagtggcccagtcaggacgcggaaacactccctggaggttctgacccgctccctctcagcctccgcctggtctctggtgtagtcgccgccgccagccgccatgggcaaacagaacagcaagctgcggcccgaggtgctgcaggacctgcgggagaacacggagttcaccgaccacgagctgcaggagtggtacaagggcttcctcaaggactgccccaccggccacctgaccgtggacgagttcaagaagatctacgccaacttcttcccctacggcgacgcttccaagttcgccgagcacgtcttccgcaccttcgacaccaacggcgacggcaccatcgacttccgggagttcatcattgcgctgagcgtgacctcgcggggcaagctggagcagaagctcaagtgggccttcagcatgtacgacctggacggcaacggctacatcagccgcagcgagatgctggagatcgtgcaggccatctacaagatggtgtcgtctgtgatgaagatgccggaggatgagtccaccccggagaagcgcacagacaagatcttcaggcagatggacaccaacaatgacggcaaactgtccttggaagaattcatcagaggtgccaagagcgacccctccatcgtccgcctgctgcagtgcgaccccagcagtgccagtcagttctgagcgagcggcccctggacagttgcagagaaacacaggcttgtcgtgccgtttaagctttgcttgcaagagtggatgccccgcaatcgttcctgctctcccgggccccgggcctggggcatgcgttgcacctgcccggcccggtggctgcgcctccctcctccacctgaccaacgcgacattcctcccctcacgcctggcccggtcccttccagggcaactcccagggatgtggtgacatgcagggttcaagtgttcttggttccaggcacctcccggctcacggggagctcagaggtccatgccgaggagaccaggcaggacctcccgaggctgcgccccggccggcccatgcgttttgtgatcccaagtgactctgtgggaagggtggggacgaggcgtcgggagggtatacagggagcccctcccgtgcatggctgcccccccgttcattttctccaccacagccgcttgcacgtatagatactgtggtcccctttcttttaatatataaattatgtatggtgaagtggagtgtattgtgtaggtcccgtatttaatgcctctgactgcctttgaagcgcagccctctgtggcccgcagccccctgagcctggctgttgtgtggtatttatgctctctttgtctgcctgtttctaaggaaatgcatgtgtgccctgagccgtgatgatcctcccatccgtgttgtgagcacaggcatttgtgtctggtctgtcctccctgttgattggtctggcatttccggtattaaaatgataaaataaatggcat

SEQ ID NO: 326207 - DNA, 2056 bp, Homo sapiens
gccttcgcgtcccttccttcccggagctggcaggcgggccgcggcggcggcgggcagcggacgggcggactgacgggcgcctccaccttgctccctccctggctgccggcttccttttgtctttctgggcggcgatgagcgcagggccggcgcagcagctgcgggcgcacggaggcccgcgctgctagtcactcctcccggcctcggcgcgcttgtcccgggcagcggcccgggcccgctgcagccgccgccggcgccgaacttgggctcgggaagccggcggaccgcgtcctgcgccggagcaggggcatggtctagtggcccagtcaggacgcggaaacactccctggaggttctgacccgctccctctcagcctccgcctggtctctgctggagaactcctggaacctttaagccctggctcagccctcagctctgtcccatcccagctgacctctgtgctctgcgcccgagctcctgagcccacggttggctgttccagctccaaagagaaggaggaaccttttccttctgcagcccctccccaccagcctcattccttagctggggtcagacctggggtcctcactgcagctggcctctggcagcgttctcaggctagccctccctgctgaaaagagaaccgtgtgggactcacaggtgtagtcgccgccgccagccgccatgggcaaacagaacagcaagctgcggcccgaggtgctgcaggacctgcgggagaacacggagttcaccgaccacgagctgcaggagtggtacaagggcttcctcaaggactgccccaccggccacctgaccgtggacgagttcaagaagatctacgccaacttcttcccctacggcgacgcttccaagttcgccgagcacgtcttccgcaccttcgacaccaacggcgacggcaccatcgacttccgggagttcatcattgcgctgagcgtgacctcgcggggcaagctggagcagaagctcaagtgggccttcagcatgtacgacctggacggcaacggctacatcagccgcagcgagatgctggagatcgtgcaggccatctacaagatggtgtcgtctgtgatgaagatgccggaggatgagtccaccccggagaagcgcacagacaagatcttcaggcagatggacaccaacaatgacggcaaactgtccttggaagaattcatcagaggtgccaagagcgacccctccatcgtccgcctgctgcagtgcgaccccagcagtgccagtcagttctgagcgagcggcccctggacagttgcagagaaacacaggcttgtcgtgccgtttaagctttgcttgcaagagtggatgccccgcaatcgttcctgctctcccgggccccgggcctggggcatgcgttgcacctgcccggcccggtggctgcgcctccctcctccacctgaccaacgcgacattcctcccctcacgcctggcccggtcccttccagggcaactcccagggatgtggtgacatgcagggttcaagtgttcttggttccaggcacctcccggctcacggggagctcagaggtccatgccgaggagaccaggcaggacctcccgaggctgcgccccggccggcccatgcgttttgtgatcccaagtgactctgtgggaagggtggggacgaggcgtcgggagggtatacagggagcccctcccgtgcatggctgcccccccgttcattttctccaccacagccgcttgcacgtatagatactgtggtcccctttcttttaatatataaattatgtatggtgaagtggagtgtattgtgtaggtcccgtatttaatgcctctgactgcctttgaagcgcagccctctgtggcccgcagccccctgagcctggctgttgtgtggtatttatgctctctttgtctgcctgtttctaaggaaatgcatgtgtgccctgagccgtgatgatcctcccatccgtgttgtgagcacaggcatttgtgtctggtctgtcctccctgttgattggtctggcatttccggtattaaaatgataaaataaatggcat

SEQ ID NO: 326208 - DNA, 1266 bp, Homo sapiens
tggtgatctagaggatcccatctcaggcaggacgagttcaagaagatctacgccaacttcttcccctacggcgacgcttccaagttcgccgagcacgtcttccgcaccttcgacaccaacggcgacggcaccatcgacttccgggagttcatcattgcgctgagcgtgacctcgcggggcaagctggagcagaagctcaagtgggccttcagcatgtacgacctggacggcaacggctacatcagccgcagcgagatgctggagatcgtgcaggccatctacaagatggtgtcgtctgtgatgaagatgccggaggatgagtccaccccggagaagcgcacagacaagatcttcaggcagatggacaccaacaatgacggcaaactgtccttggaagaattcatcagaggtgccaagagcgacccctccatcgtccgcctgctgcagtgcgaccccagcagtgccagtcagttctgagcgagcggcccctggacagttgcagagaaacacaggcttgtcgtgccgtttaagctttgcttgcaagagtggatgccccgcaatcgttcctgctctcccgggccccgggcctggggcatgcgttgcacctgcccggcccggtggctgcgcctccctcctccacctgaccaacgcgacattcctcccctcacgcctggcccggtcccttccagggcaactcccagggatgtggtgacatgcagggttcaagtgttcttggttccaggcacctcccggctcacggggagctcagaggtccatgccgaggagaccaggcaggacctcccgaggctgcgccccggccggcccatgcgttttgtgatcccaagtgactctgtgggaagggtggggacgaggcgtcgggagggtatacagggagcccctcccgtgcatggctgcccccccgttcattttctccaccacagccgcttgcacgtatagatactgtggtcccctttcttttaatatataaattatgtatggtgaagtggagtgtattgtgtaggtcccgtatttaatgcctctgactgcctttgaagcgcagccctctgtggcccgcagccccctgagcctggctgttgtgtggtatttatgctctctttgtctgcctgtttctaaggaaatgcatgtgtgccctgagccgtgatgatcctcccatccgtgttgtgagcacaggcatttgtgtctggtctgtcctccctgttgattggtctggcatttccggtattaaaatgataaaataaatggcat

SEQ ID NO: 326209 - DNA, 780 bp, Homo sapiens
gccttcgcgtcccttccttcccggagctggcaggcgggccgcggcggcggcgggcagcggacgggcggactgacgggcgcctccaccttgctccctccctggctgccggcttccttttgtctttctgggcggcgatgagcgcagggccggcgcagcagctgcgggcgcacggaggcccgcgctgctagtcactcctcccggcctcggcgcgcttgtcccgggcagcggcccgggcccgctgcagccgccgccggcgccgaacttgggctcgggaagccggcggaccgcgtcctgcgccggagcaggggcatggtctagtggcccagtcaggacgcggaaacactccctggaggttctgacccgctccctctcagcctccgcctggtctctggtgtagtcgccgccgccagccgccatgggcaaacagaacagcaagctgcggcccgaggtgctgcaggacctgcgggagaacacggagttcaccgaccacgagctgcaggagtggtacaagggcttcctcaaggactgccccaccggccacctgaccgtggacgagttcaagaagatctacgccaacttcttcccctacggcgacgcttccaagttcgccgagcacgtcttccgcaccttcgacaccaacggcgacggcaccatcgacttccgggagttcatcattgcgctgagcgtgacctcgcggggcaagctggagcagaagccagttggcttcggttgtcgcctggcgtgaggtactcagcggggggatgtggtcggcggctctag

SEQ ID NO: 326210 - DNA, 537 bp, Homo sapiens
ctctagaggtgttactaacctcctctttccccggatctgactcagcagggttggctgttccagctccaaagagaaggaggaaccttttccttctgcagcccctccccaccagcctcattccttagctggggtcagacctggggtcctcactgcagctggcctctggcagcgttctcaggctagccctccctgctgaaaagagaaccgtgtgggactcacaggtaattatgaaatacaaacgccatgatctttcactcaagggcactaaggagtgaataaataaaggataccacagggtgctaatgagcttgaagagtccctgtttggtagccccagatccagggtccctggtatcacccactgaatgctacttctacccagcactgcccacgggaaataaagtgggagacacatacctatgtgattgtaactttttctatagccgcattgaaaagtaaaaaagatgaaatttaaaacttgtttgatttaaaccgttagatcccaaatggtatcatttaccatttcacatgtaatcaa

SEQ ID NO: 326211 - DNA, 1903 bp, Homo sapiens
  misc_feature (1)..(6): n is a, c, g, or t
  misc_feature (107)..(107): n is a, c, g, or t
nnnnnnagcttctgccaagggtgggggcccacgcggaggcgatccgctcgttcctcccagggccatggggcgacgaggagagccctggcctccccgcgacccgcacngcgacctgggccagacgcgccaccttccccggtcgcggtttgcttctctttaaaatgaggacagctcctcccttgggggctgtggtgacaggtgaaatgagaacgcactgaagacagctcttggtccaaagccccgcacacagggcatggtctagtggcccagtcaggacgcggaaacactccctggaggttctgacccgctccctctcagcctccgcctggtctctgggttggctgttccagctccaaagagaaggaggaaccttttccttctgcagcccctccccaccagcctcattccttagctggggtcagacctggggtcctcactgcagctggcctctggcagcgttctcaggctagccctccctgctgaaaagagaaccgtgtgggactcacaggtgtagtcgccgccgccagccgccatgggcaaacagaacagcaagctgcggcccgaggtgctgcaggacctgcgggagaacacggagttcaccgaccacgagctgcaggagtggtacaagggcttcctcaaggactgccccaccggccacctgaccgtggacgagttcaagaagatctacgccaacttcttcccctacggcgacgcttccaagttcgccgagcacgtcttccgcaccttcgacaccaacggcgacggcaccatcgacttccgggagttcatcattgcgctgagcgtgacctcgcggggcaagctggagcagaagctcaagtgggccttcagcatgtacgacctggacggcaacggctacatcagccgcagcgagatgctggagatcgtgcaggccatctacaagatggtgtcgtctgtgatgaagatgccggaggatgagtccaccccggagaagcgcacagacaagatcttcaggcagatggacaccaacaatgacggcaaactgtccttggaagaattcatcagaggtgccaagagcgacccctccatcgtccgcctgctgcagtgcgaccccagcagtgccagtcagttctgagcgagcggcccctggacagttgcagagaaacacaggcttgtcgtgccgtttaagctttgcttgcaagagtggatgccccgcaatcgttcctgctctcccgggccccgggcctggggcatgcgttgcacctgcccggcccggtggctgcgcctccctcctccacctgaccaacgcgacattcctcccctcacgcctggcccggtcccttccagggcaactcccagggatgtggtgacatgcagggttcaagtgttcttggttccaggcacctcccggctcacggggagctcagaggtccatgccgaggagaccaggcaggacctcccgaggctgcgccccggccggcccatgcgttttgtgatcccaagtgactctgtgggaagggtggggacgaggcgtcgggagggtatacagggagcccctcccgtgcatggctgcccccccgttcattttctccaccacagccgcttgcacgtatagatactgtggtcccctttcttttaatatataaattatgtatggtgaagtggagtgtattgtgtaggtcccgtatttaatgcctctgactgcctttgaagcgcagccctctgtggcccgcagccccctgagcctggctgttgtgtggtatttatgctctctttgtctgcctgtttctaaggaaatgcatgtgtgccctgagccgtgatgatcctcccatccgtgttgtgagcacaggcatttgtgtctggtctgtcctccctgttgattggtctggcatttccggtattaaaatgataaaataaatggcat

SEQ ID NO: 326212 - DNA, 1838 bp, Homo sapiens
gccttcgcgtcccttccttcccggagctggcaggcgggccgcggcggcggcgggcagcggacgggcggactgacgggcgcctccaccttgctccctccctggctgccggcttccttttgtctttctgggcggcgatgagcgcagggccggcgcagcagctgcgggcgcacggaggcccgcgctgctagtcactcctcccggcctcggcgcgcttgtcccgggcagcggcccgggcccgctgcagccgccgccggcgccgaacttgggctcgggaagccggcggaccgcgtcctgcgccggagcaggggcatggtctagtggcccagtcaggacgcggaaacactccctggaggttctgacccgctccctctcagcctccgcctggtctctggtgtagtcgccgccgccagccgccatgggcaaacagaacagcaagctgcggcccgaggtgctgcaggacctgcgggagaacacggagttcaccgaccacgagctgcaggagtggtacaagggcttcctcaaggactgccccaccggccacctgaccgtggacgagttcaagaagatctacgccaacttcttcccctacggcgacgcttccaagttcgccgagcacgtcttccgcaccttcgacaccaacggcgacggcaccatcgacttccgggagttcatcattgcgctgagcgtgacctcgcggggcaagctggagcagaagctcaagtgggccttcagcatgtacgacctggacggcaacggctacatcagccgcagcgagatgctggagatcgtgcaggccatctacaagatggtgtcgtctgtgatgaagatgccggaggatgagtccaccccggagaagcgcacagacaagatcttcaggcagatggacaccaacaatgacggcaaactgtccttggaagaattcatcagaggtgccaagagcgacccctccatcgtccgcctgctgcagtgcgaccccagcagtgccagtcagttctgagcgagcggcccctggacagttgcagagaaacacaggcttgtcgtgccgtttaagctttgcttgcaagagtggatgccccgcaatcgttcctgctctcccgggccccgggcctggggcatgcgttgcacctgcccggcccggtggctgcgcctccctcctccacctgaccaacgcgacattcctcccctcacgcctggcccggtcccttccagggcaactcccagggatgtggtgacatgcagggttcaagtgttcttggttccaggcacctcccggctcacggggagctcagaggtccatgccgaggagaccaggcaggacctcccgaggctgcgccccggccggcccatgcgttttgtgatcccaagtgactctgtgggaagggtggggacgaggcgtcgggagggtatacagggagcccctcccgtgcatggctgcccccccgttcattttctccaccacagccgcttgcacgtatagatactgtggtcccctttcttttaatatataaattatgtatggtgaagtggagtgtattgtgtaggtcccgtatttaatgcctctgactgcctttgaagcgcagccctctgtggcccgcagccccctgagcctggctgttgtgtggtatttatgctctctttgtctgcctgtttctaaggaaatgcatgtgtgccctgagccgtgatgatcctcccatccgtgttgtgagcacaggcatttgtgtctggtctgtcctccctgttgattggtctggcatttccggtattaaaatgataaaataaatggcataaaaacgaacagtagaccccaccactatcccatcccgagaacagacaacgcg

SEQ ID NO: 326213 - DNA, 1759 bp, Homo sapiens
gccttcgcgtcccttccttcccggagctggcaggcgggccgcggcggcggcgggcagcggacgggcggactgacgggcgcctccaccttgctccctccctggctgccggcttccttttgtctttctgggcggcgatgagcgcagggccggcgcagcagctgcgggcgcacggaggcccgcgctgctagtcactcctcccggcctcggcgcgcttgtcccgggcagcggcccgggcccgctgcagccgccgccggcgccgaacttgggctcgggaagccggcggaccgcgtcctgcgccggagcaggggcatggtctagtggcccagtcaggacgcggaaacactccctggaggttctgacccgctccctctcagcctccgcctggtctctggtgtagtcgccgccgccagccgccatgggcaaacagaacagcaagctgcggcccgaggtgctgcaggacctgcgggagaacacggagttcaccgaccacgagctgcaggagtggtacaagggcttcctcaaggactgccccaccggccacctgaccgtggacgagttcaagaagatctacgccaacttcttcccctacggcgacgcttccaagttcgccgagcacgtcttccgcaccttcgacaccaacggcgacggcaccatcgacttccgggagttcatcattgcgctgagcgtgacctcgcggggcaagctggagcagaagctcaagtgggccttcagcatgtacgacctggacggcaacggctacatcagccgcagcgagatgctggagatcgtgcaggccatctacaagatggtgtcgtctgtgatgaagatgccggaggatgagtccaccccggagaagcgcacagacaagatcttcaggcagatggacaccaacaatgacggcaaactgtccttggaagaattcatcagaggtgccaagagcgacccctccatcgtccgcctgctgcagtgcgaccccagcagtgccagtcagttctgagcgagcggcccctggacagttgcagagaaacacaggcttgtcgtgccgtttaagctttgcttgcaagagtggatgccccgcaatcgttcctgctctcccgggccccgggcctggggcatgcgttgcacctgcccggcccggtggctgcgcctccctcctccacctgaccaacgcgacattcctcccctcacgcctggcccggtcccttccagggcaactcccagggatgtggtgacatgcagggttcaagtgttcttggttccaggcacctcccggctcacggggagctcagaggtccatgccgaggagaccaggcaggacctcccgaggctgcgccccggccggcccatgcgttttgtgatcccaagtgactctgtgggaagggtggggacgaggcgtcgggagggtatacagggagcccctcccgtgcatggctgcccccccgttcattttctccaccacagccgcttgcacgtatagatactgtggtcccctttcttttaatatataaattatgtatggtgaagtggagtgtattgtgtaggtcccgtatttaatgcctctgactgcctccccacctcccccccccctccctgtaaactaggtgagtgcagcaagcagaccttcgcatcaccccagcagtcaccaaaaaccagtgagagcgccgctgtctcccgcccggcaccagcactcgctagctttcctgacccctggaactgggctctgggctcccatcggaaaataaactccaagcagccagta

SEQ ID NO: 326214 - DNA, 1557 bp, Homo sapiens
tccccaggccctgtctggtggtggccgcccttggggagctggcctctcagcacagcgccgggcaccggggctcaaggggcatggtctagtggcccagtcaggacgcggaaacactccctggaggttctgacccgctccctctcagcctccgcctggtctctggtgtagtcgccgccgccagccgccatgggcaaacagaacagcaagctgcggcccgaggtgctgcaggacctgcgggagaacacggagttcaccgaccacgagctgcaggagtggtacaagggcttcctcaaggactgccccaccggccacctgaccgtggacgagttcaagaagatctacgccaacttcttcccctacggcgacgcttccaagttcgccgagcacgtcttccgcaccttcgacaccaacggcgacggcaccatcgacttccgggagttcatcattgcgctgagcgtgacctcgcggggcaagctggagcagaagctcaagtgggccttcagcatgtacgacctggacggcaacggctacatcagccgcagcgagatgctggagatcgtgcaggccatctacaagatggtgtcgtctgtgatgaagatgccggaggatgagtccaccccggagaagcgcacagacaagatcttcaggcagatggacaccaacaatgacggcaaactgtccttggaagaattcatcagaggtgccaagagcgacccctccatcgtccgcctgctgcagtgcgaccccagcagtgccagtcagttctgagcgagcggcccctggacagttgcagagaaacacaggcttgtcgtgccgtttaagctttgcttgcaagagtggatgccccgcaatcgttcctgctctcccgggccccgggcctggggcatgcgttgcacctgcccggcccggtggctgcgcctccctcctccacctgaccaacgcgacattcctcccctcacgcctggcccggtcccttccagggcaactcccagggatgtggtgacatgcagggttcaagtgttcttggttccaggcacctcccggctcacggggagctcagaggtccatgccgaggagaccaggcaggacctcccgaggctgcgccccggccggcccatgcgttttgtgatcccaagtgactctgtgggaagggtggggacgaggcgtcgggagggtatacagggagcccctcccgtgcatggctgcccccccgttcattttctccaccacagccgcttgcacgtatagatactgtggtcccctttcttttaatatataaattatgtatggtgaagtggagtgtattgtgtaggtcccgtatttaatgcctctgactgcctttgaagcgcagccctctgtggcccgcagccccctgagcctggctgttgtgtggtatttatgctctctttgtctgcctgtttctaaggaaatgcatgtgtgccctgagccgtgatgatcctcccatccgtgttgtgagcacaggcatttgtgtctggtctgtcctccctgttgattggtctggcatttccggtattaaaatgataaaataaatggcat

SEQ ID NO: 326215 - DNA, 1836 bp, Homo sapiens
gccttcgcgtcccttccttcccggagctggcaggcgggccgcggcggcggcgggcagcggacgggcggactgacgggcgcctccaccttgctccctccctggctgccggcttccttttgtctttctgggcggcgatgagcgcagggccggcgcagcagctgcgggcgcacggaggcccgcgctgctagtcactcctcccggcctcggcgcgcttgtcccgggcagcggcccgggcccgctgcagccgccgccggcgccgaacttgggctcgggaagccggcggaccgcgtcctgcgccggagcagatgacagcacctggagtgttagctggtcatacctggacctgcgagtgtaggggcatggtctagtggcccagtcaggacgcggaaacactccctggaggttctgacccgctccctctcagcctccgcctggtctctggtgtagtcgccgccgccagccgccatgggcaaacagaacagcaagctgcggcccgaggtgctgcaggacctgcgggagaacacggagttcaccgaccacgagctgcaggagtggtacaagggcttcctcaaggactgccccaccggccacctgaccgtggacgagttcaagaagatctacgccaacttcttcccctacggcgacgcttccaagttcgccgagcacgtcttccgcaccttcgacaccaacggcgacggcaccatcgacttccgggagttcatcattgcgctgagcgtgacctcgcggggcaagctggagcagaagctcaagtgggccttcagcatgtacgacctggacggcaacggctacatcagccgcagcgagatgctggagatcgtgcaggccatctacaagatggtgtcgtctgtgatgaagatgccggaggatgagtccaccccggagaagcgcacagacaagatcttcaggcagatggacaccaacaatgacggcaaactgtccttggaagaattcatcagaggtgccaagagcgacccctccatcgtccgcctgctgcagtgcgaccccagcagtgccagtcagttctgagcgagcggcccctggacagttgcagagaaacacaggcttgtcgtgccgtttaagctttgcttgcaagagtggatgccccgcaatcgttcctgctctcccgggccccgggcctggggcatgcgttgcacctgcccggcccggtggctgcgcctccctcctccacctgaccaacgcgacattcctcccctcacgcctggcccggtcccttccagggcaactcccagggatgtggtgacatgcagggttcaagtgttcttggttccaggcacctcccggctcacggggagctcagaggtccatgccgaggagaccaggcaggacctcccgaggctgcgccccggccggcccatgcgttttgtgatcccaagtgactctgtgggaagggtggggacgaggcgtcgggagggtatacagggagcccctcccgtgcatggctgcccccccgttcattttctccaccacagccgcttgcacgtatagatactgtggtcccctttcttttaatatataaattatgtatggtgaagtggagtgtattgtgtaggtcccgtatttaatgcctctgactgcctttgaagcgcagccctctgtggcccgcagccccctgagcctggctgttgtgtggtatttatgctctctttgtctgcctgtttctaaggaaatgcatgtgtgccctgagccgtgatgatcctcccatccgtgttgtgagcacaggcatttgtgtctggtctgtcctccctgttgattggtctggcatttccggtattaaaatgataaaataaatggcat

SEQ ID NO: 326216 - DNA, 2009 bp, Homo sapiens
gccttcgcgtcccttccttcccggagctggcaggcgggccgcggcggcggcgggcagcggacgggcggactgacgggcgcctccaccttgctccctccctggctgccggcttccttttgtctttctgggcggcgatgagcgcagggccggcgcagcagctgcgggcgcacggaggcccgcgctgctagtcactcctcccggcctcggcgcgcttgtcccgggcagcggcccgggcccgctgcagccgccgccggcgccgaacttgggctcgggaagccggcggaccgcgtcctgcgccggagcagatgacagcacctggagtgttagctggtcatacctggacctgcgagtgtaggggcatggtctagtggcccagtcaggacgcggaaacactccctggaggttctgacccgctccctctcagcctccgcctggtctctgggttggctgttccagctccaaagagaaggaggaaccttttccttctgcagcccctccccaccagcctcattccttagctggggtcagacctggggtcctcactgcagctggcctctggcagcgttctcaggctagccctccctgctgaaaagagaaccgtgtgggactcacaggtgtagtcgccgccgccagccgccatgggcaaacagaacagcaagctgcggcccgaggtgctgcaggacctgcgggagaacacggagttcaccgaccacgagctgcaggagtggtacaagggcttcctcaaggactgccccaccggccacctgaccgtggacgagttcaagaagatctacgccaacttcttcccctacggcgacgcttccaagttcgccgagcacgtcttccgcaccttcgacaccaacggcgacggcaccatcgacttccgggagttcatcattgcgctgagcgtgacctcgcggggcaagctggagcagaagctcaagtgggccttcagcatgtacgacctggacggcaacggctacatcagccgcagcgagatgctggagatcgtgcaggccatctacaagatggtgtcgtctgtgatgaagatgccggaggatgagtccaccccggagaagcgcacagacaagatcttcaggcagatggacaccaacaatgacggcaaactgtccttggaagaattcatcagaggtgccaagagcgacccctccatcgtccgcctgctgcagtgcgaccccagcagtgccagtcagttctgagcgagcggcccctggacagttgcagagaaacacaggcttgtcgtgccgtttaagctttgcttgcaagagtggatgccccgcaatcgttcctgctctcccgggccccgggcctggggcatgcgttgcacctgcccggcccggtggctgcgcctccctcctccacctgaccaacgcgacattcctcccctcacgcctggcccggtcccttccagggcaactcccagggatgtggtgacatgcagggttcaagtgttcttggttccaggcacctcccggctcacggggagctcagaggtccatgccgaggagaccaggcaggacctcccgaggctgcgccccggccggcccatgcgttttgtgatcccaagtgactctgtgggaagggtggggacgaggcgtcgggagggtatacagggagcccctcccgtgcatggctgcccccccgttcattttctccaccacagccgcttgcacgtatagatactgtggtcccctttcttttaatatataaattatgtatggtgaagtggagtgtattgtgtaggtcccgtatttaatgcctctgactgcctttgaagcgcagccctctgtggcccgcagccccctgagcctggctgttgtgtggtatttatgctctctttgtctgcctgtttctaaggaaatgcatgtgtgccctgagccgtgatgatcctcccatccgtgttgtgagcacaggcatttgtgtctggtctgtcctccctgttgattggtctggcatttccggtattaaaatgataaaataaatggcat

SEQ ID NO: 326217 - DNA, 1019 bp, Homo sapiens
  misc_feature (1011)..(1011): n is a, c, g, or t
gccttcgcgtcccttccttcccggagctggcaggcgggccgcggcggcggcgggcagcggacgggcggactgacgggcgcctccaccttgctccctccctggctgccggcttccttttgtctttctgggcggcgatgagcgcagggccggcgcagcagctgcgggcgcacggaggcccgcgctgctagtcactcctcccggcctcggcgcgcttgtcccgggcagcggcccgggcccgctgcagccgccgccggcgccgaacttgggctcgggaagccggcggaccgcgtcctgcgccggagcaggggcatggtctagtggcccagtcaggacgcggaaacactccctggaggttctgacccgctccctctcagcctccgcctggtctctgggttggctgttccagctccaaagagaaggaggaaccttttccttctgcagcccctccccaccagcctcattccttagctggggtcagacctggggtcctcactgcagctggcctctggcagcgttctcaggctagccctccctgctgaaaagagaaccgtgtgggactcacaggtgtagtcgccgccgccagccgccatgggcaaacagaacagcaagctgcggcccgaggtgctgcaggacctgcgggagaacacggagttcaccgaccacgagctgcaggagtggtacaagggcttcctcaaggactgccccaccggccacctgaccgtggacgagttcaagaagatctacgccaacttcttcccctacggcgacgcttccaagttcgccgagcacgtcttccgcaccttcgacaccaacggcgacggcaccatcgacttccgggagttcatcattgcgctgagcgtgacctcgcggggcaagctggagcagaagctcaagtgggccttcagcatgtacgacctggacggcaacggctacatcagccgcagcgagatgctggagatcgtgcagccatctacaaatggtgtctctgtgatgagatgccgagatgagtcncccggaga

SEQ ID NO: 326218 - DNA, 250 bp, Homo sapiens
ggattctaagctgactgactttcatgttccctgagcttgtgaccactgcaacacttgacatcactctaagcccaggcttgctgcaggtctctcaagagctctgaagtttatgtggctttctatccttcatggactgggggaagacccaaggagggtactgaggctatttgggaatactggccagggacctgggtccagaagtctgtcctggtggccccgacaggtatgcatcccagcaggtgtctgcaca

SEQ ID NO: 326219 - DNA, 156 bp, Homo sapiens
tcgggaaacactctttaagggtaaatataagatgatgtaatctcataatctttctaattataggataaaacaatctatggtaggtaattcaacatgtaaagaaaaagtactcttggacaggaactgtgaaaaatcattatgctattttcatgctta

SEQ ID NO: 326220 - DNA, 365 bp, Homo sapiens
catgagatactcattataggaaattcagataatatagactagtaaaagatatgaagaacagagtgaaaaatgtttgttaattcattagccactgttagtattttagatttggtctctcagattttttatataggtatttttttaaaaaaaataaaagctgatcatatgtttacatgtcttataacatgtctccttcacttaagaatataaaatggtcccctcttcaacgtatattattttcttttttctttttcttttctcataaaaaaaattaaaaacacataaaaaaaaaacccccttttggccctttttaaaaaacgccctttgaagacatcccccggagaagggggccccccgggaaaatc

SEQ ID NO: 326221 - DNA, 409 bp, Homo sapiens
catgagatactcattataggaaattcagataatatagactagtaaaagatatgaagaacagagtgaaaaatgtttgttaattcattagccactgttagtattttagatttggtctctcagattttttatataggtatttttttaaaaaaaataaaagctgatcatatgtttacatgtcttataacatgtctccttcacttaagaatataaaatggtcccctcttcaacgtatattattttcttttttctttttcttttctttttttttttttgagacggagtttcgctcttgttgcccaggctggagtgcagtggtacgatctcggcttactgcaacctctgcctcctgggttcaagtgattctcctgcctcagcctcctgagaagctgggattacaggcgcccaccac

SEQ ID NO: 326222 - DNA, 366 bp, Homo sapiens
cgtcagagattctgagttactcatcagctgccccaattttcttctcaaatataacattttcttcttacattaaaaagatttttttaaaaattttattattattgtactttaagttttagggtacatgtgcacaatgtgcaggtttgttacatatatatacatgtgccatgttggtgtgctgcaccattaactcgtcatttagcattaggtatatctcctaatgctatccctcccccctccccccaccccacaacagtctccgctgtgtgatgttccccttcctgtgtccatgtgttctcattgttcaattcccacctacgagttttaaatccactcctttcacattgagtttcttctctccctcct

SEQ ID NO: 326223 - DNA, 526 bp, Homo sapiens
ggagagaaaatattgatggaggggcggggagaaatgctcctttcccaggccctaagccctctgtgctgatccctgcctgctgcagacccctggggccccagagagctcagcgctgcagccaccacctcagagctcagagggactggtgggggccctgatgcacgtgatgcagaagagaagcagagccatccactcctccgacgaaggggaggaccaggctggcgatgaagatgaagatgatgaatgggatgactgagtggctgagttacttgctgccctgtgctcctccccgcaggacatggctccccctccacctgctctgtgcccaccctccactctcctcttccaggcccccaaccccccatttcttccccaccaacccctccaatgctgttatccctgcctggtcctcacactcacccaacaatcccaaggccctttttatacaaaaattctcagttctcttcactcaaggatttttaaagaaaaataaaagaattgtctttctgtctctctataaaaaaca

SEQ ID NO: 326224 - DNA, 1854 bp, Homo sapiens
gctgctcattgcggaagttcctcttcttaccctgcacccagagcctcgccagagaagacaagggcagaaagcaccatgagtgggggcccaatgggaggaaggcccgggggccgaggagcaccagcggttcagcagaacataccctccaccctcctccaggaccacgagaaccagcgactctttgagatgcttggacgaaaatgcttgacgctggccactgcagttgttcagctgtacctggcgctgccccctggagctgagcactggaccaaggagcattgtggggctgtgtgcttcgtgaaggataacccccagaagtcctacttcatccgcctttacggccttcaggctggtcggctgctctgggaacaggagctgtactcacagcttgtctactccacccccacccccttcttccacaccttcgctggagatgactgccaagcggggctgaactttgcagacgaggacgaggcccaggccttccgggccctcgtgcaggagaagatacaaaaaaggaatcagaggcaaagtggagacagacgccagctacccccaccaccaacaccagccaatgaagagagaagaggagggctcccacccctgcccctgcatccaggtggagaccaaggaggccctccagtgggtccgctctccctggggctggcgacagtggacatccagaaccctgacatcacgagttcacgataccgtgggctcccagcacctggacctagcccagctgataagaaacgctcagggaagaagaagatcagcaaagctgatattggtgcacccagtggattcaagcatgtcagccacgtggggtgggacccccagaatggatttgacgtgaacaacctcgacccagatctgcggagtctgttctccagggcaggaatcagcgaggcccagctcaccgacgccgagacctctaaacttatctacgacttcattgaggaccagggtgggctggaggctgtgcggcaggagatgaggcgccaggagccacttccgccgcccccaccgccatctcgaggagggaaccagctcccccggccccctattgtggggggtaacaagggtcgttctggtccactgccccctgtacctttggggattgccccacccccaccaacaccccggggacccccacccccaggccgagggggccctccaccaccaccccctccagctactggacgttctggaccactgccccctccaccccctggagctggtgggccacccatgccaccaccaccgccaccaccgccaccgccgcccagctccgggaatggaccagcccctcccccactccctcctgctctggtgcctgccgggggcctggcccctggtgggggtcggggagcgcttttggatcaaatccggcagggaattcagctgaacaagacccctggggccccagagagctcagcgctgcagccaccacctcagagctcagagggactggtgggggccctgatgcacgtgatgcagaagagaagcagagccatccactcctccgacgaaggggaggaccaggctggcgatgaagatgaagatgatgaatgggatgactgagtggctgagttacttgctgccctgtgctcctccccgcaggacatggctccccctccacctgctctgtgcccaccctccactctcctcttccaggcccccaaccccccatttcttccccaccaacccctccaatgctgttatccctgcctggtcctcacactcacccaacaatcccaaggccctttttatacaaaaattctcagttctcttcactcaaggatttttaaagaaaaataaaagaattgtctttctgtctctctataaaaaaca

SEQ ID NO: 326225 - DNA, 1996 bp, Homo sapiens
gctgctcattgcggaagttcctcttcttaccctgcacccagagcctcgccagagaagacaagggcagaaagcaccatgagtgggggcccaatgggaggaaggcccgggggccgaggagcaccagcggttcagcagaacataccctccaccctcctccaggaccacgagaaccagcgactctttgagatgcttggacgaaaatgcttgacgctggccactgcagttgttcagctgtacctggcgctgccccctggagctgagcactggaccaaggagcattgtggggctgtgtgcttcgtgaaggataacccccagaagtcctacttcatccgcctttacggccttcaggctggtcggctgctctgggaacaggagctgtactcacagcttgtctactccacccccacccccttcttccacaccttcgctggagatgactgccaagcggggctgaactttgcagacgaggacgaggcccaggccttccgggccctcgtgcaggagaagatacaaaaaaggaatcagaggcaaagtggagacagacgccagctacccccaccaccaacaccagccaatgaagagagaagaggagggctcccacccctgcccctgcatccaggtggagaccaaggaggccctccagtgggtccgctctccctggggctggcgacagtggacatccagaaccctgacatcacgagttcacgataccgtgggctcccagcacctggacctagcccagctgataagaaacgctcagggaagaagaagatcagcaaagctgatattggtgcacccagtggattcaagcatgtcagccacgtggggtgggacccccagaatggatttgacgtgaacaacctcgacccagatctgcggagtctgttctccagggcaggaatcagcgaggcccagctcaccgacgccgagacctctaaacttatctacgacttcattgaggaccagggtgggctggaggctgtgcggcaggagatgaggcgccaggagccacttccgccgcccccaccgccatctcgaggagggaaccagctcccccggccccctattgtggggggtaacaagggtcgttctggtccactgccccctgtacctttggggattgccccacccccaccaacaccccggggacccccacccccaggccgagggggccctccaccaccaccccctccagctactggacgttctggaccactgccccctccaccccctggagctggtgggccacccatgccaccaccaccgccaccaccgccaccgccgcccagctccgggaatggaccagcccctcccccactccctcctgctctggtgcctgccgggggcctggcccctggtgggggtcggggagcgcttttggatcaaatccggcagggaattcagctgaacaagacccctggggccccagagagctcagcgctgcagccaccacctcagagctcagagggactggtgggggccctgatgcacgtgatgcagaagagaagcagagccatccactcctccggtgagctgatcctgccggggcctcaaacctggctcccagggctagcactggcctcaaaacaatcccagcagtcaccaccaatagtgacatcagccccatctgtttgacagcattaacatgaatcttgtgtcagcctcgtttttgacaatgttaacattaaaaaaaaaaaaaaaaaaaaagtgatgcggccgccggctcgctctcgcccaccgcggactccagggcgcgaaggcgggccgggtttttctcaatgcgcacttgcttcaggtttcctcttaacatcatcttactgagttcgcctcggacaccggatacaggcctagatttaaagacagtgtgtctatatatatgtatacgtctctacataaacgtatgccaacaaaatatcgacaatcaagagaccgctaggtaggcgagtcggcaacccggctccccggcaagagcgagcgccatggctgccgcggccgc

SEQ ID NO: 326226 - DNA, 1894 bp, Homo sapiens
  misc_feature (1883)..(1883): n is a, c, g, or t
gctgctcattgcggaagttcctcttcttaccctgcacccagagcctcgccagagaagacaagggcagaaagcaccatgagtgggggcccaatgggaggaaggcccgggggccgaggagcaccagcggttcagcagaacataccctccaccctcctccaggaccacgagaaccagcgactctttgagatgcttggacgaaaatgcttgacgctggccactgcagttgttcagctgtacctggcgctgccccctggagctgagcactggaccaaggagcattgtggggctgtgtgcttcgtgaaggataacccccagaagtcctacttcatccgcctttacggccttcaggctggtcggctgctctgggaacaggagctgtactcacagcttgtctactccacccccacccccttcttccacaccttcgctggagatgactgccaagcggggctgaactttgcagacgaggacgaggcccaggccttccgggccctcgtgcaggagaagatacaaaaaaggaatcagaggcaaagtggagacagacgccagctacccccaccaccaacaccagccaatgaagagagaagaggagggctcccacccctgcccctgcatccaggtggagaccaaggaggccctccagtgggtccgctctccctggggctggcgacagtggacatccagaaccctgacatcacgagttcacgataccgtgggctcccagcacctggacctagcccagctgataagaaacgctcagggaagaagaagatcagcaaagctgatattggtgcacccagtggattcaagcatgtcagccacgtggggtgggacccccagaatggatttgacgtgaacaacctcgacccagatctgcggagtctgttctccagggcaggaatcagcgaggcccagctcaccgacgccgagacctctaaacttatctacgacttcattgaggaccagggtgggctggaggctgtgcggcaggagatgaggcgccaggagccacttccgccgcccccaccgccatctcgaggagggaaccagctcccccggccccctattgtggggggtaacaagggtcgttctggtccactgccccctgtacctttggggattgccccacccccaccaacaccccggggacccccacccccaggccgagggggccctccaccaccaccccctccagctactggacgttctggaccactgccccctccaccccctggagctggtgggccacccatgccaccaccaccgccaccaccgccaccgccgcccagctccgggaatggaccagcccctcccccactccctcctgctctggtgcctgccgggggcctggcccctggtgggggtcggggagcgcttttggatcaaatccggcagggaattcagctgaacaagacccctggggccccagagagctcagcgctgcagccaccacctcagagctcagagggactggtgggggccctgatgcacgtgatgcagaagagaagcagagccatccactcctccgacgaaggggaggaccaggctggcgatgaagatgaagatgatgaatgggatgactgagtggctgagttacttgctgccctgtgctcctccccgcaggacatggctccccctccacctgctctgtgcccaccctccactctcctcttccaggcccccaaccccccatttcttccccaccaacccctccaatgctgttatccctgcctggtcctcacactcacccaacaatcccaaggccctttttaaggcttaaatctgagtgcacgtaaggaatgaagaaaccaacaccagaaccctaaactcaaatgatatggagcccatttagagcggcacccccacccctcagagacacgcanttccaccccat

SEQ ID NO: 326227 - DNA, 1785 bp, Homo sapiens
gctgctcattgcggaagttcctcttcttaccctgcacccagagcctcgccagagaagacaagggcagaaagcaccatgagtgggggcccaatgggaggaaggcccgggggccgaggagcaccagcggttcagcagaacataccctccaccctcctccaggaccacgagaaccagcgactctttgagatgcttggacgaaaatgcttgacgctggccactgcagttgttcagctgtacctggcgctgccccctggagctgagcactggaccaaggagcattgtggggctgtgtgcttcgtgaaggataacccccagaagtcctacttcatccgcctttacggccttcaggctggtcggctgctctgggaacaggagctgtactcacagcttgtctactccacccccacccccttcttccgggccctcgtgcaggagaagatacaaaaaaggaatcagaggcaaagtggagacagacgccagctacccccaccaccaacaccagccaatgaagagagaagaggagggctcccacccctgcccctgcatccaggtggagaccaaggaggccctccagtgggtccgctctccctggggctggcgacagtggacatccagaaccctgacatcacgagttcacgataccgtgggctcccagcacctggacctagcccagctgataagaaacgctcagggaagaagaagatcagcaaagctgatattggtgcacccagtggattcaagcatgtcagccacgtggggtgggacccccagaatggatttgacgtgaacaacctcgacccagatctgcggagtctgttctccagggcaggaatcagcgaggcccagctcaccgacgccgagacctctaaacttatctacgacttcattgaggaccagggtgggctggaggctgtgcggcaggagatgaggcgccaggagccacttccgccgcccccaccgccatctcgaggagggaaccagctcccccggccccctattgtggggggtaacaagggtcgttctggtccactgccccctgtacctttggggattgccccacccccaccaacaccccggggacccccacccccaggccgagggggccctccaccaccaccccctccagctactggacgttctggaccactgccccctccaccccctggagctggtgggccacccatgccaccaccaccgccaccaccgccaccgccgcccagctccgggaatggaccagcccctcccccactccctcctgctctggtgcctgccgggggcctggcccctggtgggggtcggggagcgcttttggatcaaatccggcagggaattcagctgaacaagacccctggggccccagagagctcagcgctgcagccaccacctcagagctcagagggactggtgggggccctgatgcacgtgatgcagaagagaagcagagccatccactcctccgacgaaggggaggaccaggctggcgatgaagatgaagatgatgaatgggatgactgagtggctgagttacttgctgccctgtgctcctccccgcaggacatggctccccctccacctgctctgtgcccaccctccactctcctcttccaggcccccaaccccccatttcttccccaccaacccctccaatgctgttatccctgcctggtcctcacactcacccaacaatcccaaggccctttttatacaaaaattctcagttctcttcactcaaggatttttaaagaaaaataaaagaattgtctttctgtctctctataaaaaaca

SEQ ID NO: 326228 - DNA, 727 bp, Homo sapiens
gctgctcattgcggaagttcctcttcttaccctgcacccagagcctcgccagagaagacaagggcagaaagcaccatgagtgggggcccaatgggaggaaggcccgggggccgaggagcaccagcggttcagcagaacataccctccaccctcctccaggaccacgagaaccagcgactctttgagatgcttggacgaaaatgcttgacgctggccactgcagttgttcagctgtacctggcgctgccccctggagctgagcactggaccaaggagcattgtggggctgtgtgcttcgtgaaggataacccccagaagtcctacttcatccgcctttacggccttcaggctggtcggctgctctgggaacaggagctgtactcacagcttgtctactccacccccacccccttcttccacaccttcgctggagatgactgccaagcggggctgaactttgcagacgaggacgaggcccaggccttccgggccctcgtgcaggagaagatacaaaaaaggaatcagaggcaaagtggagacagacgccagctacccccaccaccaacaccagccaatgaagagagaagaggagggctcccacccctgcccctgcatccaggtggagaccaaggaggcatgtcagccacgtggggtgggacccccagaatggatttgacgtgagtaacttcagagtctcttggactccactaaacttccacccaccctt

SEQ ID NO: 326229 - DNA, 368 bp, Homo sapiens
gctgctcattgcggaagttcctcttcttaccctgcacccagagcctcgccagagaagacaagggcagaaagcaccatgagtgggggcccaatgggaggaaggcccgggggccgaggagcaccagcggttcagcagaacataccctccaccctcctccaggaccacgagaaccagcgactctttgagatgcttggacgaaaatgcttgacgctggccactgcagttgttcagctgtacctggcgctgccccctggagactcacccaacaatcccaaggccctttttatacaaaaattctcagttctcttcactcaaggatttttaaagaaaaataaaagaattgtctttctgtctctctataaaaaaca

SEQ ID NO: 326230 - DNA, 776 bp, Homo sapiens
gctgctcattgcggaagttcctcttcttaccctgcacccagagcctcgccagagaagacaagggcagaaagcaccatgagtgggggcccaatgggaggaaggcccgggggccgaggagcaccagcggttcagcagaacataccctccaccctcctccaggaccacgagaaccagcgactctttgagatgcttggacgaaaatgcttgacgctggccactgcagttgttcagctgtacctggcgctgccccctggagctgagcactggaccaaggagcattgtggggctgtgtgcttcgtgaaggataacccccagaagtcctacttcatccgcctttacggccttcaggctggtcggctgctctgggaacaggagctgtactcacagcttgtctactccacccccacccccttcttccacaccttcgctggagatgactgccaagcggggctgaactttgcagacgaggacgaggcccaggccttccgggccctcgtgcaggagaagatacaaaaaaggaatcagaggcaaagtggagtggcgacagtggacatccagaaccctgacatcacgagttcacgataccgtgggctcccagcacctggacctagcccagctgataagaaacgctcagggaagaagaagatcagcaaagctgatattggtgcacccagtggattcaagcatgtcagccacgtggggtgggacccccagaatggatttgacgtgagtaacttcagagtctcttggactccactaaacttccacccaccctt

SEQ ID NO: 326231 - DNA, 1784 bp, Homo sapiens
gctgctcattgcggaagttcctcttcttaccctgcacccagagcctcgccagagaagacaagggcagaaagcaccatgagtgggggcccaatgggaggaaggcccgggggccgaggagcaccagcggttcagcagaacataccctccaccctcctccaggaccacgagaaccagcgactctttgagatgcttggacgaaaatgcttgacgctggccactgcagttgttcagctgtacctggcgctgccccctggagctgagcactggaccaaggagcattgtggggctgtgtgcttcgtgaaggataacccccagaagtcctacttcatccgcctttacggccttcaggctggtcggctgctctgggaacaggagctgtactcacagcttgtctactccacccccacccccttcttccacaccttcgctggagatgactgccaagcggggctgaactttgcagacgaggacgaggcccaggccttccgggccctcgtgcaggagaagatacaaaaaaggaatcagaggcaaagtggagacagacgccagctacccccaccaccaacaccagccaatgaagagagaagaggagggctcccacccctgcccctgcatccaggtggagaccaaggaggccctccagtgggtccgctctccctggggctggcgacagtggacatccagaaccctgacatcacgagttcacgataccgtgggctcccagcacctggacctagcccagctgataagaaacgctcagggaagaagaagatcagcaaagctgatattggtgcacccagtggattcaagcatgtcagccacgtggggtgggacccccagaatggatttgacgtgaacaacctcgacccagatctgcggagtctgttctccagggcaggaatcagcgaggcccagctcaccgacgccgagacctctaaacttatctacgacttcattgaggaccagggtgggctggaggctgtgcggcaggagatgaggcgccaggagccacttccgccgcccccaccgccatctcgaggagggaaccagctcccccggccccctattgtggggggtaacaagggtcgttctggtccactgccccctgtacctttggggattgccccacccccaccaacaccccggggacccccacccccaggccgagggggccctccaccaccaccccctccagctactggacgttctggaccactgccccctccaccccctggagctggtgggccacccatgccaccaccaccgccaccaccgccaccgccgcccagctccgggaatggaccagcccctcccccactccctcctgctctggtgcctgccgggggcctggcccctggtgggggtcggggagcgcttttggatcaaatccggcagggaattcagctgaacaagacccctggggccccagagagctcagcgctgcagccaccacctcagagctcagagggactggtgggggccctgatgcacgtgatgcagaagagaagcagagccatccactcctccgacgaaggggaggaccaggctggcgatgaagatgaagatgatgaatgggatgactgagtggctgagttacttgctgccctgtgctcctccccgcaggacatggctccccctccacctgctctgtgcccaccctccactctcctctactcacccaacaatcccaaggccctttttatacaaaaattctcagttctcttcactcaaggatttttaaagaaaaataaaagaattgtctttctgtctctctataaaaaaca

SEQ ID NO: 326232 - DNA, 751 bp, Homo sapiens
aaattccattccatgcgtagcaatatttctgtcgtttcatgtatggttctgtggtcatgatgtcaacatctttttcatccctaagaagaagaaacgctagagagtcggatggctgaggaagagaaacctgctgctcttcctgagaaagagtgtggggctgctaagtcctcagaccaacccaagggcctcagtaagggccaaatggagtctagtgcggaggcccaaatagttcccgaagagagtgccccagcaggggccccacatgagaaaagtgtaaaagaggtcaaggaggtgtctccagaagtaaaaaccccttcctctgctggggaaggtgtgtctttctcaggatttgcatgtgttttgttgcaaatgatctctccagtggcttaccaacctgatgcctttccaacgctatttcgctatttcatcgctgggtcttatgataacaagtccactgttgtaggcttaatgtgcagagagtgtggcttgcgcaagtgctgtgtggcagctggttttccagtgctgcagctgattcctggttttcctttgccatgatacaatacgctttgcagccaggctgatgatgctatgtgagcttctttttttattttatttttttacccgccccccctcatctcaaatgtttgccagtcacattgctaatacatgtatatttttgtttttattttggggacagcaattcatatgcttttatttcaaatcgtacagttggattttggcacatagaggc

SEQ ID NO: 326233 - DNA, 9670 bp, Homo sapiens
accgctaaatcgtaagtgagggctgcatcctattgtcagtgaatgatggcggagctgagtggcttgtcatcattctcgaaaattctgagactagtgagctctctccctctctcccactcgccttattttcctgttcgccactgcggggacttctaatttgcagcttccctttccccggcacacacagacacgagctggtggcttgcagactgcgtctgtctggagctagagagccagagagccagcctgtggggataatgctcccgagaaggattctggcagcagttctcaaaggctagacttgagtggtattgctgcatatgcgctgattcttcagcttgtctctaaccgaggaagcattgattgggagctactcattcagaaaattaaaagaaagaagccagaaaatattatcaaccctttgagaacacgacacaacgaactttatattttaccacttccttgaatagttgcaggagaaataacaaggcattgaagaatggcagatgaacggaaagacgaagcaaaggcacctcactggacctcagcaccgctaacagaggcatctgcacactcacatccacctgagattaaggatcaaggcggagcaggggaaggacttgtccgaagcgccaatggattcccatacagggaggatgaagagggtgcctttggagagcatgggtcacagggcacctattcaaataccaaagagaatgggatcaacggagagctgacctcagctgacagagaaacagcagaggaggtgtctgcaaggatagttcaagtagtcactgctgaggctgtagcagtcctgaaaggtgaacaagagaaagaagctcaacataaagaccagactgcagctctgcctttagcagctgaagaaacagctaatctgcctccttctccacccccatcacctgcctcagaacagactgtcacagtggaggaagatttacttacagcctcgaagatggagttccacgatcaacaggaattgactccctctacagctgagccttcagaccagaaggaaaaggagtcagagaagcaaagtaagcctggtgaagaccttaaacatgctgccttagtttctcagccagagacaactaaaacttaccctgataaaaaggacatgcaaggcacagaagaagaaaaagcacccctagctttgtttgggcacactcttgttgccagcctggaagacatgaaacagaagacagaaccaagccttgtagtacctggcattgacctccctaaagagcctccaactccaaaagaacaaaaggactggttcatcgaaatgccaacggaagcaaaaaaggatgagtggggtttagttgcccccatatctcctggccctctgactcccatgagggaaaaagatgtatttgatgatatcccaaaatgggaagggaaacagtttgattctcccatgccaagtccctttcaagggggaagcttcactcttcctttagatgtcatgaagaatgaaatagttacagaaacatcgccctttgcccctgcctttttacagccagatgacaaaaaatctctgcaacaaaccagtggcccagctactgccaaagatagttttaaaattgaagagccccatgaggctaaacctgacaaaatggcagaagcaccaccctcagaggcaatgaccttacccaaagatgctcacattccagttgtagaagaacatgttatggggaaagttttagaggaagaaaaggaggccataaatcaagagactgtgcagcaaagggatactttcacccccagtggacaggaacctatacttactgaaaaggaaactgagctgaagcttgaagaaaaaaccaccatttctgacaaagaagctgtgccaaaagagagtaaacccccaaaacctgcagatgaagaaataggcataattcagacctccacagagcacactttctcagaacagaaagaccaagagcctaccacagatatgttgaaacaggactcgttccctgtaagtttggagcaagcagttacagattcagccatgacctctaaaacactggagaaagccatgaccgaaccatctgcattaattgaaaagagctcaattcaggaactttttgaaatgagagttgatgacaaagataagattgaaggagttggagctgcaacatcagctgagcttgatatgccattttatgaagataaatcaggaatgtccaagtactttgaaacatctgccttgaaagaagaagcaacaaaaagcattgagccaggcagtgattactatgaactgagtgacactagagaaagtgtccatgagtctattgataccatgtctcccatgcataaaaatggtgacaaggagtttcaaacaggaaaagaatcccagcccagtcctccagcacaagaagcagggtacagcactctcgcacagagttatccatcagatttacctgaagaacccagttctcctcaagaaagaatgttcactattgatccaaaagtgtatggagagaaaagggacctccacagtaagaataaggatgatttgacccttagcaggagtttaggacttggtggtaggtctgcaatagaacaaagaagcatgtcaatcaatttgccgatgtcttgcctagattccatagcccttggatttaactttggtcggggacatgatctttctcctctggcttccgatattctaaccaacactagtggaagtatggatgaaggggatgattaccttccagccaccacacctgcactggagaaagccccttgcttccctgtagaaagcaaagaggaagaacagatagagaaagtaaaagctactggagaagaaagtactcaagcggagatatcatgtgagtctcctttcctagccaaagatttttacaaaaatggtactgtcatggcacctgaccttcctgaaatgctagatctggcaggcacaaggtcaagattggcttctgtgagtgcagatgctgaggttgccaggaggaaatcagtcccatcagagactgtggttgaggatagtcgtactggcttgcccccggtaactgatgaaaaccatgtcattgtaaaaacggacagtcagctcgaagacctgggctactgtgtgttcaataagtacacagtcccattgccatcacctgttcaagacagtgagaatttatcaggggagagtggtaccttttacgaaggcactgatgataaagttcgaagagatttggccacagacctttcactgattgaagtgaaactggcagcagccggaagagtcaaagatgagttcagtgttgacaaagaagcatccgcgcatatctctggtgacaaatcaggactgagtaaggagtttgaccaagagaagaaagctaatgataggttggatactgtactagaaaagagtgaagaacatgctgattcaaaagaacatgccaagaaaactgaagaggctggtgatgaaatagaaacattcggattaggagtaacctatgagcaagctttggccaaagatttgtcaataccaacagatgcatcctctgagaaagcagagaagggtcttagttcagttccagagatagctgaggtagaaccatccaaaaaggtggaacaaggtctggattttgctgtccagggtcaactagatgttaaaattagtgactttggacagatggcttcagggctaaacatagatgatagaagggcaacagagctaaaacttgaggctacacaggacatgaccccctcatccaaagcaccgcaggaggcagatgcatttatgggtgttgagtctggccacatgaaagaaggcactaaagttagtgagacagaagtcaaacagaaggtggccaagcctgacttggtgcaccaggaggctgtagacaaggaggagtcctatgaatctagtggtgagcatgaaagtctcaccatggagtccttgaaagctgatgagggcaagaaggaaacatctccagaatcatctctaattcaagatgagattgccgtcaaattgtcagtggaaataccttgcccacctgctgtttcagaggctgatttagccacagatgagagagctgatgtccagatggaatttattcaggggccaaaagaagaaagcaaagagaccccagatatatccatcacgccttctgatgttgcagagccattgcatgaaacgatcgtatctgaaccagcagagattcagagtgaggaagaagagatagaagcccagggagaatatgataaactgctcttccgctcagacacccttcagataactgacctgggtgtctcaggtgccagggaggaatttgtggagacctgcccaagtgaacacaaaggagtgattgagtctgttgtgaccatcgaggatgatttcatcactgtagtgcaaaccacaactgatgaaggggagtcagggtcccacagcgtgcgttttgcagccctagagcagcctgaggtggaaaggagaccatctcctcatgatgaagaagagtttgaagtagaagaggcagctgaagcccaggcagaacccaaagatggttccccagaggctccagcttcccctgagagagaagaggttgcactttctgaatataagacagaaacctatgacgattacaaagatgagaccaccattgacgactccatcatggacgctgacagcctctgggtggacactcaagatgatgataggagcatcatgacagaacagttagaaactattcctaaagaggagaaagctgaaaaggaagctcggagatcatctcttgagaaacatagaaaagaaaagccttttaaaaccgggagaggcagaatttccactcctgaaagaaaagtagctaaaaaggaacctagcacagtctccagagatgaagtgagaaggaaaaaagcagtttataagaaggctgaacttgctaaaaaaacagaagttcaggcccactctccctccaggaaattcattttaaaacctgctatcaaatatactagaccaactcatctctcctgtgttaagcggaaaaccacagcagcaggtggggaatcagctctggctcccagtgtatttaaacaggcaaaggacaaagtctctgacggagtaaccaagagcccagaaaagcgctcttctctcccaagaccttcctccattctccctcctcggcgaggtgtgtcaggagacagagatgagaattccttctctctcaacagttctatctcttcttcagcacggcggaccaccaggtcagagccaattcgcagagcagggaagagtggtacctcaacacccactacccctgggtctactgccatcactcctggcaccccaccaagttattcttcacgcacaccaggcactcctggaacccctagctatcccaggacccctcacacaccaggaacccccaagtctgccatcttggtgccgagtgagaagaaggtcgccatcatacgtactcctccaaaatctcctgcgactcccaagcagcttcggcttattaaccaaccactgccagacctgaagaatgtcaaatccaaaatcggatcaacagacaacatcaaataccagcctaaaggggggcaggtacaaattgttaccaagaaaatagacctaagccatgtgacatccaaatgtggctctctgaagaacatccgccacaggccaggtggcggacgtgtgaaaattgagagtgtaaaactagatttcaaagaaaaggcccaagctaaagttggttctcttgataatgctcatcatgtacctggaggtggtaatgtcaagattgacagccaaaagttgaacttcagagagcatgctaaagcccgtgtggaccatggggctgagatcattacacagtccccaggcagatccagcgtggcatcaccccgacgactcagcaatgtctcctcgtctggaagcatcaacctgctcgaatctcctcagcttgccactttggctgaggatgtcactgctgcactcgctaagcagggcttgtgaatatttctcatttagcattgaaataataatatttaggcatgagctcttggcaggagtgggctctgagcagttgttatattcattctttataaaccataaaataaataatctcatccccaaactgtagtaattgttacaattttctatttaaaaaatgaatagtacatgcagaaattgacctgatttccatttgcaacaggaagacactggctttacatgggttcaattggacaattatttttgctctgctctgttttgcatggagtattattattttaaaaattgcatttttacctttcatgtgcctgaaggctatccactacattctgaaggccttgttaaaatccaagctgctcatttcactattctgtttctgagtgagaagataaaaactgcccattgtaacttatttcaggttaaattaaaccaaggagtctgattgcaggaagggaagagcatgtaagaaataagtttttttaaagtgttattttgtataaatgggaagaaagattcaattaagttattaacatttgggacctggataattatatcagagtatgtcagtccaataaattatttaactaattaaaaaatagttgcaaagcatttgagctgtggttgaggaagtggtgattagaatgtcagttgatcagctagatttgtgtccacactaccagtttcacaccccctttccatctgtttgatacagtattatagatataaatatatatatatttctctgtggccatttgtgatacttcctcatatacttgaatattatacttctttattcacagtatctgtgtctcctgcaccctttggtgttgcaattttagatatgtgaaagtagatgttagcagggttctctccctatttaaaaaaaatacattaaaaaagacaaaaaattttagcatgaagttgctttctgtaacaactcaaagccgtaaccctgttttagtgccagatacaagtctctcccgtgatgctagacaaaaaattatttttctttgctttcaccaacatggagtttgtgggggtgggtccagttatacatgaaagggtttacagattgttggtttaagattatggatttatctcatttttaatcacaggatagtttggggtttattcctattattattcatgaaaccgacttaagattttttctttatttttctttttttttccatttgctaaagttgaaagttgaaactaactataatagtttgaaacatgttttctcatttttccaaatagtatctgtttattaaattctctaatagaagatgtttgtctttcttacccaaagtaaagatcccctgatcagaaagaaaaaatacaatactttgggaagctatagctataaaacacttgagacacagatatctaaatcagtttttttccaagactccaacattgcactctgtaaagtaacacactgtgatctagtattatttatcagtagataatactgttctgactgtatatacagtctagaactcacaaatcaattagttcctctcacaaatcattcatcttagacttacaaataaggaatgaaatagtcaatggcctgattaaggcaaagagctaccaggctagatggacactttttaaaaattttatctgttctttttcttgctcagggctggtaggttggatctgaaccattaaaatcaaatggtccactaggcgtatgatctctttgagccaaatcagttcctgaatataaaggaggaaatgatgaggatgtactgaggcaacggggaagtatagaaacatccaagacaaaagccaagggatgcaaaggcagagacacaggtgctttttggtgacccagtggatatggcaaccagtgtaactgccatacaagaaaccctaggagcaaacccacaccactcattctcagctaagagattttacacaggcaaacgtgtcttaaaccatctataaatcagttattttatatgacagtcaaaaccttagaaaccttaggatcattatatctattttctgcctattaattgctgtgaggtttgatttgaccaatctgggcaatttattcatcagcttcccttgaagtgcaccagaaaatagaagaaaggtgtgtggagacttagggtattttattacatgttttcatagtcttaaatagtgattaaatttctctagaaagaagttaacagctcattagaaaagttttaacctgtgaaataagtatttttctcaacattctttaaagtttttatataagttaacactaggtaaacattctgcatactagaagtcagtttattacaaatacatgtcaaaaataaagattatacaaggcaccaaactactagatttggcattaaaacaaatgtttatttctaatcacaacaaaattataatgaataaatgttcttgctttgtatggaaatacaattctttattaaagttaacagaaaggaactgatcgtttgtaccagtaaaagagagaaacacacaggttaaatatcttcttgtggggttaaggggtagaacctatcttgccttcactctcaagataacgactcaaattaagctttttgagcaccactcttgtggggacacacatacgctgatctaggaatgaaatcttcgtggtctcaattctagatctactatgccagtttctctctggctttagcctttgagaacctgtataagaatacgtaagtaatccagagctgtgaagagtttaaaggccaacttctccagtgaactcaacctctgggtcacttgcaaccagaaattggatacctcataatgatgcaggaaagacccgagttcatgatgagtttcaaaggccacgttcatttaggaaccaactctctctggatttacctgctgagttccagcagcgtgatgggctgacatcccacctacaagtatgacacctgtgtaacaccagctaggtacggctggagaaggctgaagagagaatgccattaaatggaagaatgtactgattgtagtgaccttctccacacacacacacacacacacacacacacacctacagtaatacagcaagcgtggaataatcagccaatatataacattccatcagtattttattaaggaaataacctgaatgtggttgattttgacatagctgcaattacagttttcttctatttttcaagccacaataaggaaaataaactactcatggtctaaatactagagataaagtagattcatggcttggtaaggaaattttaagcattccttcaaagattgacgtgctaaaataagcattgatgttttgagtttttttacacctaggatttttagcttgggtgtgtaggtgaaggccaagactctctgcaggaaaaagcttattttcaaactcagaaaataaaatgtcaatcataaaaatctacttcaactttagcaaaaagaaaaaaaaatcaacaaaaagtatactctgtatgctgggattccgaggttccaacacactgttacaaatctgtggggggtttctttcttctgataattctagagcctgttaccatagaaaggcatttcttcaatggctggttgtagttagttcatgtttttcaatcaaatttgcaaatgtatttgttgctgtatagtgattgttttgcaaaataaaattgcttgtcaccctaaaaaaaaaaaaatctctccaagcgttgg

SEQ ID NO: 326234 - DNA, 9959 bp, Homo sapiens
  misc_feature (9959)..(9959): n is a, c, g, or t
accgctaaatcgtaagtgagggctgcatcctattgtcagtgaatgatggcggagctgagtggcttgtcatcattctcgaaaattctgagactagtgagctctctccctctctcccactcgccttattttcctgttcgccactgcggggacttctaatttgcagcttccctttccccggcacacacagacacgagctggtggcttgcagactgcgtctgtctggagctagagagccagagagccagcctgtggggataatgctcccgagaaggattctggcagcagttctcaaaggctagacttgagtggtattgctgcatatgcgctgattcttcagcttgtctctaaccgaggaagcattgattgggagctactcattcagaaaattaaaagaaagaagccagaaaatattatcaaccctttgagaacacgacacaacgaactttatattttaccacttccttgaatagttgcaggagaaataacaaggcattgaagaatggcagatgaacggaaagacgaagcaaaggcacctcactggacctcagcaccgctaacagaggcatctgcacactcacatccacctgagattaaggatcaaggcggagcaggggaaggacttgtccgaagcgccaatggattcccatacagggaggatgaagagggtgcctttggagagcatgggtcacagggcacctattcaaataccaaagagaatgggatcaacggagagctgacctcagctgacagagaaacagcagaggaggtgtctgcaaggatagttcaagtagtcactgctgaggctgtagcagtcctgaaaggtgaacaagagaaagaagctcaacataaagaccagactgcagctctgcctttagcagctgaagaaacagctaatctgcctccttctccacccccatcacctgcctcagaacagactgtcacagtggaggaagatttacttacagcctcgaagatggagttccacgatcaacaggaattgactccctctacagctgagccttcagaccagaaggaaaaggagtcagagaagcaaagtaagcctggtgaagaccttaaacatgctgccttagtttctcagccagagacaactaaaacttaccctgataaaaaggacatgcaaggcacagaagaagaaaaagcacccctagctttgtttgggcacactcttgttgccagcctggaagacatgaaacagaagacagaaccaagccttgtagtacctggcattgacctccctaaagagcctccaactccaaaagaacaaaaggactggttcatcgaaatgccaacggaagcaaaaaaggatgagtggggtttagttgcccccatatctcctggccctctgactcccatgagggaaaaagatgtatttgatgatatcccaaaatgggaagggaaacagtttgattctcccatgccaagtccctttcaagggggaagcttcactcttcctttagatgtcatgaagaatgaaatagttacagaaacatcgccctttgcccctgcctttttacagccagatgacaaaaaatctctgcaacaaaccagtggcccagctactgccaaagatagttttaaaattgaagagccccatgaggctaaacctgacaaaatggcagaagcaccaccctcagaggcaatgaccttacccaaagatgctcacattccagttgtagaagaacatgttatggggaaagttttagaggaagaaaaggaggccataaatcaagagactgtgcagcaaagggatactttcacccccagtggacaggaacctatacttactgaaaaggaaactgagctgaagcttgaagaaaaaaccaccatttctgacaaagaagctgtgccaaaagagagtaaacccccaaaacctgcagatgaagaaataggcataattcagacctccacagagcacactttctcagaacagaaagaccaagagcctaccacagatatgttgaaacaggactcgttccctgtaagtttggagcaagcagttacagattcagccatgacctctaaaacactggagaaagccatgaccgaaccatctgcattaattgaaaagagctcaattcaggaactttttgaaatgagagttgatgacaaagataagattgaaggagttggagctgcaacatcagctgagcttgatatgccattttatgaagataaatcaggaatgtccaagtactttgaaacatctgccttgaaagaagaagcaacaaaaagcattgagccaggcagtgattactatgaactgagtgacactagagaaagtgtccatgagtctattgataccatgtctcccatgcataaaaatggtgacaaggagtttcaaacaggaaaagaatcccagcccagtcctccagcacaagaagcagggtacagcactctcgcacagagttatccatcagatttacctgaagaacccagttctcctcaagaaagaatgttcactattgatccaaaagtgtatggagagaaaagggacctccacagtaagaataaggatgatttgacccttagcaggagtttaggacttggtggtaggtctgcaatagaacaaagaagcatgtcaatcaatttgccgatgtcttgcctagattccatagcccttggatttaactttggtcggggacatgatctttctcctctggcttccgatattctaaccaacactagtggaagtatggatgaaggggatgattaccttccagccaccacacctgcactggagaaagccccttgcttccctgtagaaagcaaagaggaagaacagatagagaaagtaaaagctactggagaagaaagtactcaagcggagatatcatgtgagtctcctttcctagccaaagatttttacaaaaatggtactgtcatggcacctgaccttcctgaaatgctagatctggcaggcacaaggtcaagattggcttctgtgagtgcagatgctgaggttgccaggaggaaatcagtcccatcagagactgtggttgaggatagtcgtactggcttgcccccggtaactgatgaaaaccatgtcattgtaaaaacggacagtcagctcgaagacctgggctactgtgtgttcaataagtacacagtcccattgccatcacctgttcaagacagtgagaatttatcaggggagagtggtaccttttacgaaggcactgatgataaagttcgaagagatttggccacagacctttcactgattgaagtgaaactggcagcagccggaagagtcaaagatgagttcagtgttgacaaagaagcatccgcgcatatctctggtgacaaatcaggactgagtaaggagtttgaccaagagaagaaagctaatgataggttggatactgtactagaaaagagtgaagaacatgctgattcaaaagaacatgccaagaaaactgaagaggctggtgatgaaatagaaacattcggattaggagtaacctatgagcaagctttggccaaagatttgtcaataccaacagatgcatcctctgagaaagcagagaagggtcttagttcagttccagagatagctgaggtagaaccatccaaaaaggtggaacaaggtctggattttgctgtccagggtcaactagatgttaaaattagtgactttggacagatggcttcagggctaaacatagatgatagaagggcaacagagctaaaacttgaggctacacaggacatgaccccctcatccaaagcaccgcaggaggcagatgcatttatgggtgttgagtctggccacatgaaagaaggcactaaagttagtgagacagaagtcaaacagaaggtggccaagcctgacttggtgcaccaggaggctgtagacaaggaggagtcctatgaatctagtggtgagcatgaaagtctcaccatggagtccttgaaagctgatgagggcaagaaggaaacatctccagaatcatctctaattcaagatgagattgccgtcaaattgtcagtggaaataccttgcccacctgctgtttcagaggctgatttagccacagatgagagagctgatgtccagatggaatttattcaggggccaaaagaagaaagcaaagagaccccagatatatccatcacgccttctgatgttgcagagccattgcatgaaacgatcgtatctgaaccagcagagattcagagtgaggaagaagagatagaagcccagggagaatatgataaactgctcttccgctcagacacccttcagataactgacctgggtgtctcaggtgccagggaggaatttgtggagacctgcccaagtgaacacaaaggagtgattgagtctgttgtgaccatcgaggatgatttcatcactgtagtgcaaaccacaactgatgaaggggagtcagggtcccacagcgtgcgttttgcagccctagagcagcctgaggtggaaaggagaccatctcctcatgatgaagaagagtttgaagtagaagaggcagctgaagcccaggcagaacccaaagatggttccccagaggctccagcttcccctgagagagaagaggttgcactttctgaatataagacagaaacctatgacgattacaaagatgagaccaccattgacgactccatcatggacgctgacagcctctgggtggacactcaagatgatgataggagcatcatgacagaacagttagaaactattcctaaagaggagaaagctgaaaaggaagctcggagatcatctcttgagaaacatagaaaagaaaagccttttaaaaccgggagaggcagaatttccactcctgaaagaaaagtagctaaaaaggaacctagcacagtctccagagatgaagtgagaaggaaaaaagcagtttataagaaggctgaacttgctaaaaaaacagaagttcaggcccactctccctccaggaaattcattttaaaacctgctatcaaatatactagaccaactcatctctcctgtgttaagcggaaaaccacagcagcaggtggggaatcagctctggctcccagtgtatttaaacaggcaaaggacaaagtctctgacggagtaaccaagagcccagaaaagcgctcttctctcccaagaccttcctccattctccctcctcggcgaggtgtgtcaggagacagagatgagaattccttctctctcaacagttctatctcttcttcagcacggcggaccaccaggtcagagccaattcgcagagcagggaagagtggtacctcaacacccactacccctgggtctactgccatcactcctggcaccccaccaagttattcttcacgcacaccaggcactcctggaacccctagctatcccaggacccctcacacaccaggaacccccaagtctgccatcttggtgccgagtgagaagaaggtcgccatcatacgtactcctccaaaatctcctgcgactcccaagcagcttcggcttattaaccaaccactgccagacctgaagaatgtcaaatccaaaatcggatcaacagacaacatcaaataccagcctaaaggggggcaggtacaaattgttaccaagaaaatagacctaagccatgtgacatccaaatgtggctctctgaagaacatccgccacaggccaggtggcggacgtgtgaaaattgagagtgtaaaactagatttcaaagaaaaggcccaagctaaagttggttctcttgataatgctcatcatgtacctggaggtggtaatgtcaagattgacagccaaaagttgaacttcagagagcatgctaaagcccgtgtggaccatggggctgagatcattacacagtccccaggcagatccagcgtggcatcaccccgacgactcagcaatgtctcctcgtctggaagcatcaacctgctcgaatctcctcagcttgccactttggctgaggatgtcactgctgcactcgctaagcagggcttgtgaatatttctcatttagcattgaaataataatatttaggcatgagctcttggcaggagtgggctctgagcagttgttatattcattctttataaaccataaaataaataatctcatccccaaactgtagtaattgttacaattttctatttaaaaaatgaatagtacatgcagaaattgacctgatttccatttgcaacaggaagacactggctttacatgggttcaattggacaattatttttgctctgctctgttttgcatggagtattattattttaaaaattgcatttttacctttcatgtgcctgaaggctatccactacattctgaaggccttgttaaaatccaagctgctcatttcactattctgtttctgagtgagaagataaaaactgcccattgtaacttatttcaggttaaattaaaccaaggagtctgattgcaggaagggaagagcatgtaagaaataagtttttttaaagtgttattttgtataaatgggaagaaagattcaattaagttattaacatttgggacctggataattatatcagagtatgtcagtccaataaattatttaactaattaaaaaatagttgcaaagcatttgagctgtggttgaggaagtggtgattagaatgtcagttgatcagctagatttgtgtccacactaccagtttcacaccccctttccatctgtttgatacagtattatagatataaatatatatatatttctctgtggccatttgtgatacttcctcatatacttgaatattatacttctttattcacagtatctgtgtctcctgcaccctttggtgttgcaattttagatatgtgaaagtagatgttagcagggttctctccctatttaaaaaaaatacattaaaaaagacaaaaaattttagcatgaagttgctttctgtaacaactcaaagccgtaaccctgttttagtgccagatacaagtctctcccgtgatgctagacaaaaaattatttttctttgctttcaccaacatggagtttgtgggggtgggtccagttatacatgaaagggtttacagattgttggtttaagattatggatttatctcatttttaatcacaggatagtttggggtttattcctattattattcatgaaaccgacttaagattttttctttatttttctttttttttccatttgctaaagttgaaagttgaaactaactataatagtttgaaacatgttttctcatttttccaaatagtatctgtttattaaattctctaatagaagatgtttgtctttcttacccaaagtaaagatcccctgatcagaaagaaaaaatacaatactttgggaagctatagctataaaacacttgagacacagatatctaaatcagtttttttccaagactccaacattgcactctgtaaagtaacacactgtgatctagtattatttatcagtagataatactgttctgactgtatatacagtctagaactcacaaatcaattagttcctctcacaaatcattcatcttagacttacaaataaggaatgaaatagtcaatggcctgattaaggcaaagagctaccaggctagatggacactttttaaaaattttatctgttctttttcttgctcagggctggtaggttggatctgaaccattaaaatcaaatggtccactaggcgtatgatctctttgagccaaatcagttcctgaatataaaggaggaaatgatgaggatgtactgaggcaacggggaagtatagaaacatccaagacaaaagccaagggatgcaaaggcagagacacaggtgctttttggtgacccagtggatatggcaaccagtgtaactgccatacaagaaaccctaggagcaaacccacaccactcattctcagctaagagattttacacaggcaaacgtgtcttaaaccatctataaatcagttattttatatgacagtcaaaaccttagaaaccttaggatcattatatctattttctgcctattaattgctgtgaggtttgatttgaccaatctgggcaatttattcatcagcttcccttgaagtgcaccagaaaatagaagaaaggtgtgtggagacttagggtattttattacatgttttcatagtcttaaatagtgattaaatttctctagaaagaagttaacagctcattagaaaagttttaacctgtgaaataagtatttttctcaacattctttaaagtttttatataagttaacactaggtaaacattctgcatactagaagtcagtttattacaaatacatgtcaaaaataaagattatacaaggcaccaaactactagatttggcattaaaacaaatgtttatttctaatcacaacaaaattataatgaataaatgttcttgctttgtatggaaatacaattctttattaaagttaacagaaaggaactgatcgtttgtaccagtaaaagagagaaacacacaggttaaatatcttcttgtggggttaaggggtagaacctatcttgccttcactctcaagataacgactcaaattaagctttttgagcaccactcttgtggggacacacatacgctgatctaggaatgaaatcttcgtggtctcaattctagatctactatgccagtttctctctggctttagcctttgagaacctgtataagaatacgtaagtaatccagagctgtgaagagtttaaaggccaacttctccagtgaactcaacctctgggtcacttgcaaccagaaattggatacctcataatgatgcaggaaagacccgagttcatgatgagtttcaaaggccacgttcatttaggaaccaactctctctggatttacctgctgagttccagcagcgtgatgggctgacatcccacctacaagtatgacacctgtgtaacaccagctaggtacggctggagaaggctgaagagagaatgccattaaatggaagaatgtactgattgtagtgaccttctccacacacacacacacacacacacacacacacctacagtaatacagcaagcgtggaataatcagccaatatataacattccatcagtattttattaaggaaataacctgaatgtggttgattttgacatagctgcaattacagttttcttctatttttcaagccacaataaggaaaataaactactcatggtctaaatactagagataaagtagattcatggcttggtaaggaaattttaagcattccttcaaagattgacgtgctaaaataagcattgatgttttgagtttttttacacctaggatttttagcttgggtgtgtaggtgaaggccaagactctctgcaggaaaaagcttattttcaaactcagaaaataaaatgtcaatcataaaaatctacttcaactttagcaaaaagaaaaaaaaatcaacaaaaagtatactctgtatgctgggattccgaggttccaacacactgttacaaatctgtggggggtttctttcttctgataattctagagcctgttaccatagaaaggcatttcttcaatggctggttgtagttagttcatgtttttcaatcaaatttgcaaatgtatttgttgctgtatagtgattgttttgcaaaataaaattgcttgtcaccaaaaaaaaacaataaccagaactcagcgaacatacgaaccacaacaacacaagagggggggggcggccacaaaaaaaatctcgacgggggggcacccaaatccgcaagaacccactctcctcgaccaaagagtggcgcccaaaaaagggacataaatagaccggcggggagcgtgactacaaccagtcacgtgccggaaaccagcgacggaacattctgggaagaacctcctgtgggtcgacccgggcaacaatcagagctcactgagcaaaaataggcagtgcacagctgcgagaaatggagcaaagaatcgcgcccan

SEQ ID NO: 326235 - DNA, 9613 bp, Homo sapiens
accgctaaatcgtaagtgagggctgcatcctattgtcagtgaatgatggcggagctgagtggcttgtcatcattctcgaaaattctgagactagtgagctctctccctctctcccactcgccttattttcctgttcgccactgcggggacttctaatttgcagcttccctttccccggcacacacagacacgagctggtggcttgcagactgcgtctgtctggagctagagagccagagagccagcctgtggggataatgctcccgagaaggattctggcagcagttctcaaaggctagacttgagtggtattgctgcatatgcgctgattcttcagcttgtctctaaccgaggaagcattgattgggagctactcattcagaaaattaaaagaaagaagccagaaaatattatcaaccctttgagaacacgacacaacgaactttatattttaccacttccttgaatagttgcaggagaaataacaaggcattgaagaatggcagatgaacggaaagacgaagcaaaggcacctcactggacctcagcaccgctaacagaggcatctgcacactcacatccacctgagattaaggatcaaggcggagcaggggaaggacttgtccgaagcgccaatggattcccatacagggaggatgaagagggtgcctttggagagcatgggtcacagggcacctattcaaataccaaagagaatgggatcaacggagagctgacctcagctgacagagaaacagcagaggaggtgtctgcaaggatagttcaagtagtcactgctgaggctgtagcagtcctgaaaggtgaacaagagaaagaagctcaacataaagaccagactgcagctctgcctttagcagctgaagaaacagctaatctgcctccttctccacccccatcacctgcctcagaacagactgtcacagtggaggaagatttacttacagcctcgaagatggagttccacgatcaacaggaattgactccctctacagctgagccttcagaccagaaggaaaaggagtcagagaagcaaagtaagcctggtgaagaccttaaacatgctgccttagtttctcagccagagacaactaaaacttaccctgataaaaaggacatgcaaggcacagaagaagaaaaagcacccctagctttgtttgggcacactcttgttgccagcctggaagacatgaaacagaagacagaaccaagccttgtagtacctggcattgacctccctaaagagcctccaactccaaaagaacaaaaggactggttcatcgaaatgccaacggaagcaaaaaaggatgagtggggtttagttgcccccatatctcctggccctctgactcccatgagggaaaaagatgtatttgatgatatcccaaaatgggaagggaaacagtttgattctcccatgccaagtccctttcaagggggaagcttcactcttcctttagatgtcatgaagaatgaaatagttacagaaacatcgccctttgcccctgcctttttacagccagatgacaaaaaatctctgcaacaaaccagtggcccagctactgccaaagatagttttaaaattgaagagccccatgaggctaaacctgacaaaatggcagaagcaccaccctcagaggcaatgaccttacccaaagatgctcacattccagttgtagaagaacatgttatggggaaagttttagaggaagaaaaggaggccataaatcaagagactgtgcagcaaagggatactttcacccccagtggacaggaacctatacttactgaaaaggaaactgagctgaagcttgaagaaaaaaccaccatttctgacaaagaagctgtgccaaaagagagtaaacccccaaaacctgcagatgaagaaataggcataattcagacctccacagagcacactttctcagaacagaaagaccaagagcctaccacagatatgttgaaacaggactcgttccctgtaagtttggagcaagcagttacagattcagccatgacctctaaaacactggagaaagccatgaccgaaccatctgcattaattgaaaagagctcaattcaggaactttttgaaatgagagttgatgacaaagataagattgaaggagttggagctgcaacatcagctgagcttgatatgccattttatgaagataaatcaggaatgtccaagtactttgaaacatctgccttgaaagaagaagcaacaaaaagcattgagccaggcagtgattactatgaactgagtgacactagagaaagtgtccatgagtctattgataccatgtctcccatgcataaaaatggtgacaaggagtttcaaacaggaaaagaatcccagcccagtcctccagcacaagaagcagggtacagcactctcgcacagagttatccatcagatttacctgaagaacccagttctcctcaagaaagaatgttcactattgatccaaaagtgtatggagagaaaagggacctccacagtaagaataaggatgatttgacccttagcaggagtttaggacttggtggtaggtctgcaatagaacaaagaagcatgtcaatcaatttgccgatgtcttgcctagattccatagcccttggatttaactttggtcggggacatgatctttctcctctggcttccgatattctaaccaacactagtggaagtatggatgaaggggatgattaccttccagccaccacacctgcactggagaaagccccttgcttccctgtagaaagcaaagaggaagaacagatagagaaagtaaaagctactggagaagaaagtactcaagcggagatatcatgtgagtctcctttcctagccaaagatttttacaaaaatggtactgtcatggcacctgaccttcctgaaatgctagatctggcaggcacaaggtcaagattggcttctgtgagtgcagatgctgaggttgccaggaggaaatcagtcccatcagagactgtggttgaggatagtcgtactggcttgcccccggtaactgatgaaaaccatgtcattgtaaaaacggacagtcagctcgaagacctgggctactgtgtgttcaataagtacacagtcccattgccatcacctgttcaagacagtgagaatttatcaggggagagtggtaccttttacgaaggcactgatgataaagttcgaagagatttggccacagacctttcactgattgaagtgaaactggcagcagccggaagagtcaaagatgagttcagtgttgacaaagaagcatccgcgcatatctctggtgacaaatcaggactgagtaaggagtttgaccaagagaagaaagctaatgataggttggatactgtactagaaaagagtgaagaacatgctgattcaaaagaacatgccaagaaaactgaagaggctggtgatgaaatagaaacattcggattaggagtaacctatgagcaagctttggccaaagatttgtcaataccaacagatgcatcctctgagaaagcagagaagggtcttagttcagttccagagatagctgaggtagaaccatccaaaaaggtggaacaaggtctggattttgctgtccagggtcaactagatgttaaaattagtgactttggacagatggcttcagggctaaacatagatgatagaagggcaacagagctaaaacttgaggctacacaggacatgaccccctcatccaaagcaccgcaggaggcagatgcatttatgggtgttgagtctggccacatgaaagaaggcactaaagttagtgagacagaagtcaaacagaaggtggccaagcctgacttggtgcaccaggaggctgtagacaaggaggagtcctatgaatctagtggtgagcatgaaagtctcaccatggagtccttgaaagctgatgagggcaagaaggaaacatctccagaatcatctctaattcaagatgagattgccgtcaaattgtcagtggaaataccttgcccacctgctgtttcagaggctgatttagccacagatgagagagctgatgtccagatggaatttattcaggggccaaaagaagaaagcaaagagaccccagatatatccatcacgccttctgatgttgcagagccattgcatgaaacgatcgtatctgaaccagcagagattcagagtgaggaagaagagatagaagcccagggagaatatgataaactgctcttccgctcagacacccttcagataactgacctgggtgtctcaggtgccagggaggaatttgtggagacctgcccaagtgaacacaaaggagtgattgagtctgttgtgaccatcgaggatgatttcatcactgtagtgcaaaccacaactgatgaaggggagtcagggtcccacagcgtgcgttttgcagccctagagcagcctgaggtggaaaggagaccatctcctcatgatgaagaagagtttgaagtagaagaggcagctgaagcccaggcagaacccaaagatggttccccagaggctccagcttcccctgagagagaagaggttgcactttctgaatataagacagaaacctatgacgattacaaagatgagaccaccattgacgactccatcatggacgctgacagcctctgggtggacactcaagatgatgataggagcatcatgacagaacagttagaaactattcctaaagaggagaaagctgaaaaggaagctcggagatcatctcttgagaaacatagaaaagaaaagccttttaaaaccgggagaggcagaatttccactcctgaaagaaaagtagctaaaaaggaacctagcacagtctccagagatgaagtgagaaggaaaaaagcagtttataagaaggctgaacttgctaaaaaaacagaagttcaggcccactctccctccaggaaattcattttaaaacctgctatcaaatatactagaccaactcatctctcctgtgttaagcggaaaaccacagcagcaggtggggaatcagctctggctcccagtgtatttaaacaggcaaaggacaaagtctctgacggagtaaccaagagcccagaaaagcgctcttctctcccaagaccttcctccattctccctcctcggcgaggtgtgtcaggagacagagatgagaattccttctctctcaacagttctatctcttcttcagcacggcggaccaccaggtcagagccaattcgcagagcagggaagagtggtacctcaacacccactacccctgggtctactgccatcactcctggcaccccaccaagttattcttcacgcacaccaggcactcctggaacccctagctatcccaggacccctcacacaccaggaacccccaagtctgccatcttggtgccgagtgagaagaaggtcgccatcatacgtactcctccaaaatctcctgcgactcccaagcagcttcggcttattaaccaaccactgccagacctgaagaatgtcaaatccaaaatcggatcaacagacaacatcaaataccagcctaaaggggggcaggtacaaattgttaccaagaaaatagacctaagccatgtgacatccaaatgtggctctctgaagaacatccgccacaggccaggtggcggacgtgtgaaaattgagagtgtaaaactagatttcaaagaaaaggcccaagctaaagttggttctcttgataatgctcatcatgtacctggaggtggtaatgtcaagattgacagccaaaagttgaacttcagagagcatgctaaagcccgtgtggaccatggggctgagatcattacacagtccccaggcagatccagcgtggcatcaccccgacgactcagcaatgtctcctcgtctggaagcatcaacctgctcgaatctcctcagcttgccactttggctgaggatgtcactgctgcactcgctaagcagggcttgtgaatatttctcatttagcattgaaataataatatttaggcatgagctcttggcaggagtgggctctgagcagttgttatattcattctttataaaccataaaataaataatctcatccccaaactgtagtaattgttacaattttctatttaaaaaatgaatagtacatgcagaaattgacctgatttccatttgcaacaggaagacactggctttacatgggttcaattggacaattatttttgctctgctctgttttgcatggagtattattattttaaaaattgcatttttacctttcatgtgcctgaaggctatccactacattctgaaggccttgttaaaatccaagctgctcatttcactattctgtttctgagtgagaagataaaaactgcccattgtaacttatttcaggttaaattaaaccaaggagtctgattgcaggaagggaagagcatgtaagaaataagtttttttaaagtgttattttgtataaatgggaagaaagattcaattaagttattaacatttgggacctggataattatatcagagtatgtcagtccaataaattatttaactaattaaaaaatagttgcaaagcatttgagctgtggttgaggaagtggtgattagaatgtcagttgatcagctagatttgtgtccacactaccagtttcacaccccctttccatctgtttgatacagtattatagatataaatatatatatatttctctgtggccatttgtgatacttcctcatatacttgaatattatacttctttattcacagtatctgtgtctcctgcaccctttggtgttgcaattttagatatgtgaaagtagatgttagcagggttctctccctatttaaaaaaaatacattaaaaaagacaaaaaattttagcatgaagttgctttctgtaacaactcaaagccgtaaccctgttttagtgccagatacaagtctctcccgtgatgctagacaaaaaattatttttctttgctttcaccaacatggagtttgtgggggtgggtccagttatacatgaaagggtttacagattgttggtttaagattatggatttatctcatttttaatcacaggatagtttggggtttattcctattattattcatgaaaccgacttaagattttttctttatttttctttttttttccatttgctaaagttgaaagttgaaactaactataatagtttgaaacatgttttctcatttttccaaatagtatctgtttattaaattctctaatagaagatgtttgtctttcttacccaaagtaaagatcccctgatcagaaagaaaaaatacaatactttgggaagctatagctataaaacacttgagacacagatatctaaatcagtttttttccaagactccaacattgcactctgtaaagtaacacactgtgatctagtattatttatcagtagataatactgttctgactgtatatacagtctagaactcacaaatcaattagttcctctcacaaatcattcatcttagacttacaaataaggaatgaaatagtcaatggcctgattaaggcaaagagctaccaggctagatggacactttttaaaaattttatctgttctttttcttgctcagggctggtaggttggatctgaaccattaaaatcaaatggtccactaggcgtatgatctctttgagccaaatcagttcctgaatataaaggaggaaatgatgaggatgtactgaggcaacggggaagtatagaaacatccaagacaaaagccaagggatgcaaaggcagagacacaggtgctttttggtgacccagtggatatggcaaccagtgtaactgccatacaagaaaccctaggagcaaacccacaccactcattctcagctaagagattttacacaggcaaacgtgtcttaaaccatctataaatcagttattttatatgacagtcaaaaccttagaaaccttaggatcattatatctattttctgcctattaattgctgtgaggtttgatttgaccaatctgggcaatttattcatcagcttcccttgaagtgcaccagaaaatagaagaaaggtgtgtggagacttagggtattttattacatgttttcatagtcttaaatagtgattaaatttctctagaaagaagttaacagctcattagaaaagttttaacctgtgaaataagtatttttctcaacattctttaaagtttttatataagttaacactaggtaaacattctgcatactagaagtcagtttattacaaatacatgtcaaaaataaagattatacaaggcaccaaactactagatttggcattaaaacaaatgtttatttctaatcacaacaaaattataatgaataaatgttcttgctttgtatggaaatacaattctttattaaagttaacagaaaggaactgatcgtttgtaccagtaaaagagagaaacacacaggttaaatatcttcttgtggggttaaggggtagaacctatcttgccttcactctcaagataacgactcaaattaagctttttgagcaccactcttgtggggacacacatacgctgatctaggaatgaaatcttcgtggtctcaattctagatctactatgccagtttctctctggctttagcctttgagaacctgtataagaatacgtaagtaatccagagctgtgaagagtttaaaggccaacttctccagtgaactcaacctctgggtcacttgcaaccagaaattggatacctcataatgatgcaggaaagacccgagttcatgatgagtttcaaaggccacgttcatttaggaaccaactctctctggatttacctgctgagttccagcagcgtgatgggctgacatcccacctacaagtatgacacctgtgtaacaccagctaggtacggctggagaaggctgaagagagaatgccattaaatggaagaatgtactgattgtagtgaccttctccacacacacacacacacacacacacacacacctacagtaatacagcaagcgtggaataatcagccaatatataacattccatcagtattttattaaggaaataacctgaatgtggttgattttgacatagctgcaattacagttttcttctatttttcaagccacaataaggaaaataaactactcatgggtaagtgaattgcaggtgggggaaggaaaggaaaaaaaagagagggaagaaaaaaaaagagaagaaaaaggatttttttacacctaggatttttagcttgggtgtgtaggtgaaggccaagactctctgcaggaaaaagcttattttcaaactcagaaaataaaatgtcaatcataaaaatctacttcaactttagcaaaaagaaaaaaaaatcaacaaaaagtatactctgtatgctgggattccgaggttccaacacactgttacaaatctgtggggggtttctttcttctgataattctagagcctgttaccatagaaaggcatttcttcaatggctggttgtagttagttcatgtttttcaatcaaatttgcaaatgtatttgttgctgtatagtgattgttttgcaaaataaaattgcttgtcacc

SEQ ID NO: 326236 - DNA, 9732 bp, Homo sapiens
accgctaaatcgtaagtgagggctgcatcctattgtcagtgaatgatggcggagctgagtggcttgtcatcattctcgaaaattctgagactagtgagctctctccctctctcccactcgccttattttcctgttcgccactgcggggacttctaatttgcagcttccctttccccggcacacacagacacgagctggtggcttgcagactgcgtctgtctggagctagagagccagagagccagcctgtggggataatgctcccgagaaggattctggcagcagttctcaaaggctagacttgagtggtattgctgcatatgcgctgattcttcagcttgtctctaaccgaggaagcattgattgggagctactcattcagaaaattaaaagaaagaagccagaaaatattatcaaccctttgagaacacgacacaacgaactttatattttaccacttccttgaatagttgcaggagaaataacaaggcattgaagaatggcagatgaacggaaagacgaagcaaaggcacctcactggacctcagcaccgctaacagaggcatctgcacactcacatccacctgagattaaggatcaaggcggagcaggggaaggacttgtccgaagcgccaatggattcccatacagggaggatgaagagggtgcctttggagagcatgggtcacagggcacctattcaaataccaaagagaatgggatcaacggagagctgacctcagctgacagagaaacagcagaggaggtgtctgcaaggatagttcaagtagtcactgctgaggctgtagcagtcctgaaaggtgaacaagagaaagaagctcaacataaagaccagactgcagctctgcctttagcagctgaagaaacagctaatctgcctccttctccacccccatcacctgcctcagaacagactgtcacagtggaggaagatttacttacagcctcgaagatggagttccacgatcaacaggaattgactccctctacagctgagccttcagaccagaaggaaaaggagtcagagaagcaaagtaagcctggtgaagaccttaaacatgctgccttagtttctcagccagagacaactaaaacttaccctgataaaaaggacatgcaaggcacagaagaagaaaaagcacccctagctttgtttgggcacactcttgttgccagcctggaagacatgaaacagaagacagaaccaagccttgtagtacctggcattgacctccctaaagagcctccaactccaaaagaacaaaaggactggttcatcgaaatgccaacggaagcaaaaaaggatgagtggggtttagttgcccccatatctcctggccctctgactcccatgagggaaaaagatgtatttgatgatatcccaaaatgggaagggaaacagtttgattctcccatgccaagtccctttcaagggggaagcttcactcttcctttagatgtcatgaagaatgaaatagttacagaaacatcgccctttgcccctgcctttttacagccagatgacaaaaaatctctgcaacaaaccagtggcccagctactgccaaagatagttttaaaattgaagagccccatgaggctaaacctgacaaaatggcagaagcaccaccctcagaggcaatgaccttacccaaagatgctcacattccagttgtagaagaacatgttatggggaaagttttagaggaagaaaaggaggccataaatcaagagactgtgcagcaaagggatactttcacccccagtggacaggaacctatacttactgaaaaggaaactgagctgaagcttgaagaaaaaaccaccatttctgacaaagaagctgtgccaaaagagagtaaacccccaaaacctgcagatgaagaaataggcataattcagacctccacagagcacactttctcagaacagaaagaccaagagcctaccacagatatgttgaaacaggactcgttccctgtaagtttggagcaagcagttacagattcagccatgacctctaaaacactggagaaagccatgaccgaaccatctgcattaattgaaaagagctcaattcaggaactttttgaaatgagagttgatgacaaagataagattgaaggagttggagctgcaacatcagctgagcttgatatgccattttatgaagataaatcaggaatgtccaagtactttgaaacatctgccttgaaagaagaagcaacaaaaagcattgagccaggcagtgattactatgaactgagtgacactagagaaagtgtccatgagtctattgataccatgtctcccatgcataaaaatggtgacaaggagtttcaaacaggaaaagaatcccagcccagtcctccagcacaagaagcagggtacagcactctcgcacagagttatccatcagatttacctgaagaacccagttctcctcaagaaagaatgttcactattgatccaaaagtgtatggagagaaaagggacctccacagtaagaataaggatgatttgacccttagcaggagtttaggacttggtggtaggtctgcaatagaacaaagaagcatgtcaatcaatttgccgatgtcttgcctagattccatagcccttggatttaactttggtcggggacatgatctttctcctctggcttccgatattctaaccaacactagtggaagtatggatgaaggggatgattaccttccagccaccacacctgcactggagaaagccccttgcttccctgtagaaagcaaagaggaagaacagatagagaaagtaaaagctactggagaagaaagtactcaagcggagatatcatgtgagtctcctttcctagccaaagatttttacaaaaatggtactgtcatggcacctgaccttcctgaaatgctagatctggcaggcacaaggtcaagattggcttctgtgagtgcagatgctgaggttgccaggaggaaatcagtcccatcagagactgtggttgaggatagtcgtactggcttgcccccggtaactgatgaaaaccatgtcattgtaaaaacggacagtcagctcgaagacctgggctactgtgtgttcaataagtacacagtcccattgccatcacctgttcaagacagtgagaatttatcaggggagagtggtaccttttacgaaggcactgatgataaagttcgaagagatttggccacagacctttcactgattgaagtgaaactggcagcagccggaagagtcaaagatgagttcagtgttgacaaagaagcatccgcgcatatctctggtgacaaatcaggactgagtaaggagtttgaccaagagaagaaagctaatgataggttggatactgtactagaaaagagtgaagaacatgctgattcaaaagaacatgccaagaaaactgaagaggctggtgatgaaatagaaacattcggattaggagtaacctatgagcaagctttggccaaagatttgtcaataccaacagatgcatcctctgagaaagcagagaagggtcttagttcagttccagagatagctgaggtagaaccatccaaaaaggtggaacaaggtctggattttgctgtccagggtcaactagatgttaaaattagtgactttggacagatggcttcagggctaaacatagatgatagaagggcaacagagctaaaacttgaggctacacaggacatgaccccctcatccaaagcaccgcaggaggcagatgcatttatgggtgttgagtctggccacatgaaagaaggcactaaagttagtgagacagaagtcaaacagaaggtggccaagcctgacttggtgcaccaggaggctgtagacaaggaggagtcctatgaatctagtggtgagcatgaaagtctcaccatggagtccttgaaagctgatgagggcaagaaggaaacatctccagaatcatctctaattcaagatgagattgccgtcaaattgtcagtggaaataccttgcccacctgctgtttcagaggctgatttagccacagatgagagagctgatgtccagatggaatttattcaggggccaaaagaagaaagcaaagagaccccagatatatccatcacgccttctgatgttgcagagccattgcatgaaacgatcgtatctgaaccagcagagattcagagtgaggaagaagagatagaagcccagggagaatatgataaactgctcttccgctcagacacccttcagataactgacctgggtgtctcaggtgccagggaggaatttgtggagacctgcccaagtgaacacaaaggagtgattgagtctgttgtgaccatcgaggatgatttcatcactgtagtgcaaaccacaactgatgaaggggagtcagggtcccacagcgtgcgttttgcagccctagagcagcctgaggtggaaaggagaccatctcctcatgatgaagaagagtttgaagtagaagaggcagctgaagcccaggcagaacccaaagatggttccccagaggctccagcttcccctgagagagaagaggttgcactttctgaatataagacagaaacctatgacgattacaaagatgagaccaccattgacgactccatcatggacgctgacagcctctgggtggacactcaagatgatgataggagcatcatgacagaacagttagaaactattcctaaagaggagaaagctgaaaaggaagctcggagatcatctcttgagaaacatagaaaagaaaagccttttaaaaccgggagaggcagaatttccactcctgaaagaaaagtagctaaaaaggaacctagcacagtctccagagatgaagtgagaaggaaaaaagcagtttataagaaggctgaacttgctaaaaaaacagaagttcaggcccactctccctccaggaaattcattttaaaacctgctatcaaatatactagaccaactcatctctcctgtgttaagcggaaaaccacagcagcaggtggggaatcagctctggctcccagtgtatttaaacaggcaaaggacaaagtctctgacggagtaaccaagagcccagaaaagcgctcttctctcccaagaccttcctccattctccctcctcggcgaggtgtgtcaggagacagagatgagaattccttctctctcaacagttctatctcttcttcagcacggcggaccaccaggtcagagccaattcgcagagcagggaagagtggtacctcaacacccactacccctgggtctactgccatcactcctggcaccccaccaagttattcttcacgcacaccaggcactcctggaacccctagctatcccaggacccctcacacaccaggaacccccaagtctgccatcttggtgccgagtgagaagaaggtcgccatcatacgtactcctccaaaatctcctgcgactcccaagcagcttcggcttattaaccaaccactgccagacctgaagaatgtcaaatccaaaatcggatcaacagacaacatcaaataccagcctaaaggggggcaggttaggattttaaacaagaagatcgattttagcaaagttcagtccagatgtggttccaaggataacatcaaacattcggctgggggcggaaatgtacaaattgttaccaagaaaatagacctaagccatgtgacatccaaatgtggctctctgaagaacatccgccacaggccaggtggcggacgtgtgaaaattgagagtgtaaaactagatttcaaagaaaaggcccaagctaaagttggttctcttgataatgctcatcatgtacctggaggtggtaatgtcaagattgacagccaaaagttgaacttcagagagcatgctaaagcccgtgtggaccatggggctgagatcattacacagtccccaggcagatccagcgtggcatcaccccgacgactcagcaatgtctcctcgtctggaagcatcaacctgctcgaatctcctcagcttgccactttggctgaggatgtcactgctgcactcgctaagcagggcttgtgaatatttctcatttagcattgaaataataatatttaggcatgagctcttggcaggagtgggctctgagcagttgttatattcattctttataaaccataaaataaataatctcatccccaaactgtagtaattgttacaattttctatttaaaaaatgaatagtacatgcagaaattgacctgatttccatttgcaacaggaagacactggctttacatgggttcaattggacaattatttttgctctgctctgttttgcatggagtattattattttaaaaattgcatttttacctttcatgtgcctgaaggctatccactacattctgaaggccttgttaaaatccaagctgctcatttcactattctgtttctgagtgagaagataaaaactgcccattgtaacttatttcaggttaaattaaaccaaggagtctgattgcaggaagggaagagcatgtaagaaataagtttttttaaagtgttattttgtataaatgggaagaaagattcaattaagttattaacatttgggacctggataattatatcagagtatgtcagtccaataaattatttaactaattaaaaaatagttgcaaagcatttgagctgtggttgaggaagtggtgattagaatgtcagttgatcagctagatttgtgtccacactaccagtttcacaccccctttccatctgtttgatacagtattatagatataaatatatatatatttctctgtggccatttgtgatacttcctcatatacttgaatattatacttctttattcacagtatctgtgtctcctgcaccctttggtgttgcaattttagatatgtgaaagtagatgttagcagggttctctccctatttaaaaaaaatacattaaaaaagacaaaaaattttagcatgaagttgctttctgtaacaactcaaagccgtaaccctgttttagtgccagatacaagtctctcccgtgatgctagacaaaaaattatttttctttgctttcaccaacatggagtttgtgggggtgggtccagttatacatgaaagggtttacagattgttggtttaagattatggatttatctcatttttaatcacaggatagtttggggtttattcctattattattcatgaaaccgacttaagattttttctttatttttctttttttttccatttgctaaagttgaaagttgaaactaactataatagtttgaaacatgttttctcatttttccaaatagtatctgtttattaaattctctaatagaagatgtttgtctttcttacccaaagtaaagatcccctgatcagaaagaaaaaatacaatactttgggaagctatagctataaaacacttgagacacagatatctaaatcagtttttttccaagactccaacattgcactctgtaaagtaacacactgtgatctagtattatttatcagtagataatactgttctgactgtatatacagtctagaactcacaaatcaattagttcctctcacaaatcattcatcttagacttacaaataaggaatgaaatagtcaatggcctgattaaggcaaagagctaccaggctagatggacactttttaaaaattttatctgttctttttcttgctcagggctggtaggttggatctgaaccattaaaatcaaatggtccactaggcgtatgatctctttgagccaaatcagttcctgaatataaaggaggaaatgatgaggatgtactgaggcaacggggaagtatagaaacatccaagacaaaagccaagggatgcaaaggcagagacacaggtgctttttggtgacccagtggatatggcaaccagtgtaactgccatacaagaaaccctaggagcaaacccacaccactcattctcagctaagagattttacacaggcaaacgtgtcttaaaccatctataaatcagttattttatatgacagtcaaaaccttagaaaccttaggatcattatatctattttctgcctattaattgctgtgaggtttgatttgaccaatctgggcaatttattcatcagcttcccttgaagtgcaccagaaaatagaagaaaggtgtgtggagacttagggtattttattacatgttttcatagtcttaaatagtgattaaatttctctagaaagaagttaacagctcattagaaaagttttaacctgtgaaataagtatttttctcaacattctttaaagtttttatataagttaacactaggtaaacattctgcatactagaagtcagtttattacaaatacatgtcaaaaataaagattatacaaggcaccaaactactagatttggcattaaaacaaatgtttatttctaatcacaacaaaattataatgaataaatgttcttgctttgtatggaaatacaattctttattaaagttaacagaaaggaactgatcgtttgtaccagtaaaagagagaaacacacaggttaaatatcttcttgtggggttaaggggtagaacctatcttgccttcactctcaagataacgactcaaattaagctttttgagcaccactcttgtggggacacacatacgctgatctaggaatgaaatcttcgtggtctcaattctagatctactatgccagtttctctctggctttagcctttgagaacctgtataagaatacgtaagtaatccagagctgtgaagagtttaaaggccaacttctccagtgaactcaacctctgggtcacttgcaaccagaaattggatacctcataatgatgcaggaaagacccgagttcatgatgagtttcaaaggccacgttcatttaggaaccaactctctctggatttacctgctgagttccagcagcgtgatgggctgacatcccacctacaagtatgacacctgtgtaacaccagctaggtacggctggagaaggctgaagagagaatgccattaaatggaagaatgtactgattgtagtgaccttctccacacacacacacacacacacacacacacacctacagtaatacagcaagcgtggaataatcagccaatatataacattccatcagtattttattaaggaaataacctgaatgtggttgattttgacatagctgcaattacagttttcttctatttttcaagccacaataaggaaaataaactactcatggtctaaatactagagataaagtagattcatggcttggtaaggaaattttaagcattccttcaaagattgacgtgctaaaataagcattgatgttttgagtttttttacacctaggatttttagcttgggtgtgtaggtgaaggccaagactctctgcaggaaaaagcttattttcaaactcagaaaataaaatgtcaatcataaaaatctacttcaactttagcaaaaagaaaaaaaaatcaacaaaaagtatactctgtatgctgggattccgaggttccaacacactgttacaaatctgtggggggtttctttcttctgataattctagagcctgttaccatagaaaggcatttcttcaatggctggttgtagttagttcatgtttttcaatcaaatttgcaaatgtatttgttgctgtatagtgattgttttgcaaaataaaattgcttgtcacc

SEQ ID NO: 326237 - DNA, 9595 bp, Homo sapiens
agtctggggcgggcgctcgggctgcgcgggctctgggcagcagcagcagcagcagcagcatcctctcttcctttacttcccttccgcttctttctcttccttctccttctttttcccccccctccccttcttcccctaacccttctacccctctcctttttctccggagggcgctaagtccgtgagcggtggcagtcgcgaccgcgggtgcatccagtttctgcgcccagattcttcagcttgtctctaaccgaggaagcattgattgggagctactcattcagaaaattaaaagaaagaagccagaaaatattatcaaccctttgagaacacgacacaacgaactttatattttaccacttccttgaatagttgcaggagaaataacaaggcattgaagaatggcagatgaacggaaagacgaagcaaaggcacctcactggacctcagcaccgctaacagaggcatctgcacactcacatccacctgagattaaggatcaaggcggagcaggggaaggacttgtccgaagcgccaatggattcccatacagggaggatgaagagggtgcctttggagagcatgggtcacagggcacctattcaaataccaaagagaatgggatcaacggagagctgacctcagctgacagagaaacagcagaggaggtgtctgcaaggatagttcaagtagtcactgctgaggctgtagcagtcctgaaaggtgaacaagagaaagaagctcaacataaagaccagactgcagctctgcctttagcagctgaagaaacagctaatctgcctccttctccacccccatcacctgcctcagaacagactgtcacagtggaggaagatttacttacagcctcgaagatggagttccacgatcaacaggaattgactccctctacagctgagccttcagaccagaaggaaaaggagtcagagaagcaaagtaagcctggtgaagaccttaaacatgctgccttagtttctcagccagagacaactaaaacttaccctgataaaaaggacatgcaaggcacagaagaagaaaaagcacccctagctttgtttgggcacactcttgttgccagcctggaagacatgaaacagaagacagaaccaagccttgtagtacctggcattgacctccctaaagagcctccaactccaaaagaacaaaaggactggttcatcgaaatgccaacggaagcaaaaaaggatgagtggggtttagttgcccccatatctcctggccctctgactcccatgagggaaaaagatgtatttgatgatatcccaaaatgggaagggaaacagtttgattctcccatgccaagtccctttcaagggggaagcttcactcttcctttagatgtcatgaagaatgaaatagttacagaaacatcgccctttgcccctgcctttttacagccagatgacaaaaaatctctgcaacaaaccagtggcccagctactgccaaagatagttttaaaattgaagagccccatgaggctaaacctgacaaaatggcagaagcaccaccctcagaggcaatgaccttacccaaagatgctcacattccagttgtagaagaacatgttatggggaaagttttagaggaagaaaaggaggccataaatcaagagactgtgcagcaaagggatactttcacccccagtggacaggaacctatacttactgaaaaggaaactgagctgaagcttgaagaaaaaaccaccatttctgacaaagaagctgtgccaaaagagagtaaacccccaaaacctgcagatgaagaaataggcataattcagacctccacagagcacactttctcagaacagaaagaccaagagcctaccacagatatgttgaaacaggactcgttccctgtaagtttggagcaagcagttacagattcagccatgacctctaaaacactggagaaagccatgaccgaaccatctgcattaattgaaaagagctcaattcaggaactttttgaaatgagagttgatgacaaagataagattgaaggagttggagctgcaacatcagctgagcttgatatgccattttatgaagataaatcaggaatgtccaagtactttgaaacatctgccttgaaagaagaagcaacaaaaagcattgagccaggcagtgattactatgaactgagtgacactagagaaagtgtccatgagtctattgataccatgtctcccatgcataaaaatggtgacaaggagtttcaaacaggaaaagaatcccagcccagtcctccagcacaagaagcagggtacagcactctcgcacagagttatccatcagatttacctgaagaacccagttctcctcaagaaagaatgttcactattgatccaaaagtgtatggagagaaaagggacctccacagtaagaataaggatgatttgacccttagcaggagtttaggacttggtggtaggtctgcaatagaacaaagaagcatgtcaatcaatttgccgatgtcttgcctagattccatagcccttggatttaactttggtcggggacatgatctttctcctctggcttccgatattctaaccaacactagtggaagtatggatgaaggggatgattaccttccagccaccacacctgcactggagaaagccccttgcttccctgtagaaagcaaagaggaagaacagatagagaaagtaaaagctactggagaagaaagtactcaagcggagatatcatgtgagtctcctttcctagccaaagatttttacaaaaatggtactgtcatggcacctgaccttcctgaaatgctagatctggcaggcacaaggtcaagattggcttctgtgagtgcagatgctgaggttgccaggaggaaatcagtcccatcagagactgtggttgaggatagtcgtactggcttgcccccggtaactgatgaaaaccatgtcattgtaaaaacggacagtcagctcgaagacctgggctactgtgtgttcaataagtacacagtcccattgccatcacctgttcaagacagtgagaatttatcaggggagagtggtaccttttacgaaggcactgatgataaagttcgaagagatttggccacagacctttcactgattgaagtgaaactggcagcagccggaagagtcaaagatgagttcagtgttgacaaagaagcatccgcgcatatctctggtgacaaatcaggactgagtaaggagtttgaccaagagaagaaagctaatgataggttggatactgtactagaaaagagtgaagaacatgctgattcaaaagaacatgccaagaaaactgaagaggctggtgatgaaatagaaacattcggattaggagtaacctatgagcaagctttggccaaagatttgtcaataccaacagatgcatcctctgagaaagcagagaagggtcttagttcagttccagagatagctgaggtagaaccatccaaaaaggtggaacaaggtctggattttgctgtccagggtcaactagatgttaaaattagtgactttggacagatggcttcagggctaaacatagatgatagaagggcaacagagctaaaacttgaggctacacaggacatgaccccctcatccaaagcaccgcaggaggcagatgcatttatgggtgttgagtctggccacatgaaagaaggcactaaagttagtgagacagaagtcaaacagaaggtggccaagcctgacttggtgcaccaggaggctgtagacaaggaggagtcctatgaatctagtggtgagcatgaaagtctcaccatggagtccttgaaagctgatgagggcaagaaggaaacatctccagaatcatctctaattcaagatgagattgccgtcaaattgtcagtggaaataccttgcccacctgctgtttcagaggctgatttagccacagatgagagagctgatgtccagatggaatttattcaggggccaaaagaagaaagcaaagagaccccagatatatccatcacgccttctgatgttgcagagccattgcatgaaacgatcgtatctgaaccagcagagattcagagtgaggaagaagagatagaagcccagggagaatatgataaactgctcttccgctcagacacccttcagataactgacctgggtgtctcaggtgccagggaggaatttgtggagacctgcccaagtgaacacaaaggagtgattgagtctgttgtgaccatcgaggatgatttcatcactgtagtgcaaaccacaactgatgaaggggagtcagggtcccacagcgtgcgttttgcagccctagagcagcctgaggtggaaaggagaccatctcctcatgatgaagaagagtttgaagtagaagaggcagctgaagcccaggcagaacccaaagatggttccccagaggctccagcttcccctgagagagaagaggttgcactttctgaatataagacagaaacctatgacgattacaaagatgagaccaccattgacgactccatcatggacgctgacagcctctgggtggacactcaagatgatgataggagcatcatgacagaacagttagaaactattcctaaagaggagaaagctgaaaaggaagctcggagatcatctcttgagaaacatagaaaagaaaagccttttaaaaccgggagaggcagaatttccactcctgaaagaaaagtagctaaaaaggaacctagcacagtctccagagatgaagtgagaaggaaaaaagcagtttataagaaggctgaacttgctaaaaaaacagaagttcaggcccactctccctccaggaaattcattttaaaacctgctatcaaatatactagaccaactcatctctcctgtgttaagcggaaaaccacagcagcaggtggggaatcagctctggctcccagtgtatttaaacaggcaaaggacaaagtctctgacggagtaaccaagagcccagaaaagcgctcttctctcccaagaccttcctccattctccctcctcggcgaggtgtgtcaggagacagagatgagaattccttctctctcaacagttctatctcttcttcagcacggcggaccaccaggtcagagccaattcgcagagcagggaagagtggtacctcaacacccactacccctgggtctactgccatcactcctggcaccccaccaagttattcttcacgcacaccaggcactcctggaacccctagctatcccaggacccctcacacaccaggaacccccaagtctgccatcttggtgccgagtgagaagaaggtcgccatcatacgtactcctccaaaatctcctgcgactcccaagcagcttcggcttattaaccaaccactgccagacctgaagaatgtcaaatccaaaatcggatcaacagacaacatcaaataccagcctaaaggggggcaggtacaaattgttaccaagaaaatagacctaagccatgtgacatccaaatgtggctctctgaagaacatccgccacaggccaggtggcggacgtgtgaaaattgagagtgtaaaactagatttcaaagaaaaggcccaagctaaagttggttctcttgataatgctcatcatgtacctggaggtggtaatgtcaagattgacagccaaaagttgaacttcagagagcatgctaaagcccgtgtggaccatggggctgagatcattacacagtccccaggcagatccagcgtggcatcaccccgacgactcagcaatgtctcctcgtctggaagcatcaacctgctcgaatctcctcagcttgccactttggctgaggatgtcactgctgcactcgctaagcagggcttgtgaatatttctcatttagcattgaaataataatatttaggcatgagctcttggcaggagtgggctctgagcagttgttatattcattctttataaaccataaaataaataatctcatccccaaactgtagtaattgttacaattttctatttaaaaaatgaatagtacatgcagaaattgacctgatttccatttgcaacaggaagacactggctttacatgggttcaattggacaattatttttgctctgctctgttttgcatggagtattattattttaaaaattgcatttttacctttcatgtgcctgaaggctatccactacattctgaaggccttgttaaaatccaagctgctcatttcactattctgtttctgagtgagaagataaaaactgcccattgtaacttatttcaggttaaattaaaccaaggagtctgattgcaggaagggaagagcatgtaagaaataagtttttttaaagtgttattttgtataaatgggaagaaagattcaattaagttattaacatttgggacctggataattatatcagagtatgtcagtccaataaattatttaactaattaaaaaatagttgcaaagcatttgagctgtggttgaggaagtggtgtaaaagtgcatccattaggaatgatgcactttcattaggatggactcgtgtctgattagaatgtcagttgatcagctagatttgtgtccacactaccagtttcacaccccctttccatctgtttgatacagtattatagatataaatatatatatatttctctgtggccatttgtgatacttcctcatatacttgaatattatacttctttattcacagtatctgtgtctcctgcaccctttggtgttgcaattttagatatgtgaaagtagatgttagcagggttctctccctatttaaaaaaaatacattaaaaaagacaaaaaattttagcatgaagttgctttctgtaacaactcaaagccgtaaccctgttttagtgccagatacaagtctctcccgtgatgctagacaaaaaattatttttctttgctttcaccaacatggagtttgtgggggtgggtccagttatacatgaaagggtttacagattgttggtttaagattatggatttatctcatttttaatcacaggatagtttggggtttattcctattattattcatgaaaccgacttaagattttttctttatttttctttttttttccatttgctaaagttgaaagttgaaactaactataatagtttgaaacatgttttctcatttttccaaatagtatctgtttattaaattctctaatagaagatgtttgtctttcttacccaaagtaaagatcccctgatcagaaagaaaaaatacaatactttgggaagctatagctataaaacacttgagacacagatatctaaatcagtttttttccaagactccaacattgcactctgtaaagtaacacactgtgatctagtattatttatcagtagataatactgttctgactgtatatacagtctagaactcacaaatcaattagttcctctcacaaatcattcatcttagacttacaaataaggaatgaaatagtcaatggcctgattaaggcaaagagctaccaggctagatggacactttttaaaaattttatctgttctttttcttgctcagggctggtaggttggatctgaaccattaaaatcaaatggtccactaggcgtatgatctctttgagccaaatcagttcctgaatataaaggaggaaatgatgaggatgtactgaggcaacggggaagtatagaaacatccaagacaaaagccaagggatgcaaaggcagagacacaggtgctttttggtgacccagtggatatggcaaccagtgtaactgccatacaagaaaccctaggagcaaacccacaccactcattctcagctaagagattttacacaggcaaacgtgtcttaaaccatctataaatcagttattttatatgacagtcaaaaccttagaaaccttaggatcattatatctattttctgcctattaattgctgtgaggtttgatttgaccaatctgggcaatttattcatcagcttcccttgaagtgcaccagaaaatagaagaaaggtgtgtggagacttagggtattttattacatgttttcatagtcttaaatagtgattaaatttctctagaaagaagttaacagctcattagaaaagttttaacctgtgaaataagtatttttctcaacattctttaaagtttttatataagttaacactaggtaaacattctgcatactagaagtcagtttattacaaatacatgtcaaaaataaagattatacaaggcaccaaactactagatttggcattaaaacaaatgtttatttctaatcacaacaaaattataatgaataaatgttcttgctttgtatggaaatacaattctttattaaagttaacagaaaggaactgatcgtttgtaccagtaaaagagagaaacacacaggttaaatatcttcttgtggggttaaggggtagaacctatcttgccttcactctcaagataacgactcaaattaagctttttgagcaccactcttgtggggacacacatacgctgatctaggaatgaaatcttcgtggtctcaattctagatctactatgccagtttctctctggctttagcctttgagaacctgtataagaatacgtaagtaatccagagctgtgaagagtttaaaggccaacttctccagtgaactcaacctctgggtcacttgcaaccagaaattggatacctcataatgatgcaggaaagacccgagttcatgatgagtttcaaaggccacgttcatttaggaaccaactctctctggatttacctgctgagttccagcagcgtgatgggctgacatcccacctacaagtatgacacctgtgtaacaccagctaggtacggctggagaaggctgaagagagaatgccattaaatggaagaatgtactgattgtagtgaccttctccacacacacacacacacacacacacacacacctacagtaatacagcaagcgtggaataatcagccaatatataacattccatcagtattttattaaggaaataacctgaatgtggttgattttgacatagctgcaattacagttttcttctatttttcaagccacaataaggaaaataaactactcatggtctaaatactagagataaagtagattcatggcttggtaaggaaattttaagcattccttcaaagattgacgtgctaaaataagcattgatgttttgagtttttttacacctaggatttttagcttgggtgtgtaggtgaaggccaagactctctgcaggaaaaagcttattttcaaactcagaaaataaaatgtcaatcataaaaatctacttcaactttagcaaaaagaaaaaaaaatcaacaaaaagtatactctgtatgctgggattccgaggttccaacacactgttacaaatctgtggggggtttctttcttctgataattctagagcctgttaccatagaaaggcatttcttcaatggctggttgtagttagttcatgtttttcaatcaaatttgcaaatgtatttgttgctgtatagtgattgttttgcaaaataaaattgcttgtcacc

SEQ ID NO: 326238 - DNA, 9984 bp, Homo sapiens
agtctggggcgggcgctcgggctgcgcgggctctgggcagcagcagcagcagcagcagcatcctctcttcctttacttcccttccgcttctttctcttccttctccttctttttcccccccctccccttcttcccctaacccttctacccctctcctttttctccggagggcgctaagtccgtgagcggtggcagtcgcgaccgcgggtgcatccagtttctgcgcccagattttattgatctaatccaaagtatcttataacttctggctggaattaagattcttcagcttgtctctaaccgaggaagcattgattgggagctactcattcagaaaattaaaagaaagaagccagaaaatattatcaaccctttgagaacacgacacaacgaactttatattttaccacttccttgaatagttgcaggagaaataacaaggcattgaagaatggcagatgaacggaaagacgaagcaaaggcacctcactggacctcagcaccgctaacagaggcatctgcacactcacatccacctgagattaaggatcaaggcggagcaggggaaggacttgtccgaagcgccaatggattcccatacagggaggatgaagagggtgcctttggagagcatgggtcacagggcacctattcaaataccaaagagaatgggatcaacggagagctgacctcagctgacagagaaacagcagaggaggtgtctgcaaggatagttcaagtagtcactgctgaggctgtagcagtcctgaaaggtgaacaagagaaagaagctcaacataaagaccagactgcagctctgcctttagcagctgaagaaacagctaatctgcctccttctccacccccatcacctgcctcagaacagactgtcacagtggaggaagaagaagaaacgctagagagtcggatggctgaggaagagaaacctgctgctcttcctgagaaagagtgtggggctgctaagtcctcagaccaacccaagggcctcagtaagggccaaatggagtctagtgcggaggcccaaatagttcccgaagagagtgccccagcaggggccccacatgagaaaagtgtaaaagaggtcaaggaggtgtctccagaagtaaaaaccccttcctctgctggggaagatttacttacagcctcgaagatggagttccacgatcaacaggaattgactccctctacagctgagccttcagaccagaaggaaaaggagtcagagaagcaaagtaagcctggtgaagaccttaaacatgctgccttagtttctcagccagagacaactaaaacttaccctgataaaaaggacatgcaaggcacagaagaagaaaaagcacccctagctttgtttgggcacactcttgttgccagcctggaagacatgaaacagaagacagaaccaagccttgtagtacctggcattgacctccctaaagagcctccaactccaaaagaacaaaaggactggttcatcgaaatgccaacggaagcaaaaaaggatgagtggggtttagttgcccccatatctcctggccctctgactcccatgagggaaaaagatgtatttgatgatatcccaaaatgggaagggaaacagtttgattctcccatgccaagtccctttcaagggggaagcttcactcttcctttagatgtcatgaagaatgaaatagttacagaaacatcgccctttgcccctgcctttttacagccagatgacaaaaaatctctgcaacaaaccagtggcccagctactgccaaagatagttttaaaattgaagagccccatgaggctaaacctgacaaaatggcagaagcaccaccctcagaggcaatgaccttacccaaagatgctcacattccagttgtagaagaacatgttatggggaaagttttagaggaagaaaaggaggccataaatcaagagactgtgcagcaaagggatactttcacccccagtggacaggaacctatacttactgaaaaggaaactgagctgaagcttgaagaaaaaaccaccatttctgacaaagaagctgtgccaaaagagagtaaacccccaaaacctgcagatgaagaaataggcataattcagacctccacagagcacactttctcagaacagaaagaccaagagcctaccacagatatgttgaaacaggactcgttccctgtaagtttggagcaagcagttacagattcagccatgacctctaaaacactggagaaagccatgaccgaaccatctgcattaattgaaaagagctcaattcaggaactttttgaaatgagagttgatgacaaagataagattgaaggagttggagctgcaacatcagctgagcttgatatgccattttatgaagataaatcaggaatgtccaagtactttgaaacatctgccttgaaagaagaagcaacaaaaagcattgagccaggcagtgattactatgaactgagtgacactagagaaagtgtccatgagtctattgataccatgtctcccatgcataaaaatggtgacaaggagtttcaaacaggaaaagaatcccagcccagtcctccagcacaagaagcagggtacagcactctcgcacagagttatccatcagatttacctgaagaacccagttctcctcaagaaagaatgttcactattgatccaaaagtgtatggagagaaaagggacctccacagtaagaataaggatgatttgacccttagcaggagtttaggacttggtggtaggtctgcaatagaacaaagaagcatgtcaatcaatttgccgatgtcttgcctagattccatagcccttggatttaactttggtcggggacatgatctttctcctctggcttccgatattctaaccaacactagtggaagtatggatgaaggggatgattaccttccagccaccacacctgcactggagaaagccccttgcttccctgtagaaagcaaagaggaagaacagatagagaaagtaaaagctactggagaagaaagtactcaagcggagatatcatgtgagtctcctttcctagccaaagatttttacaaaaatggtactgtcatggcacctgaccttcctgaaatgctagatctggcaggcacaaggtcaagattggcttctgtgagtgcagatgctgaggttgccaggaggaaatcagtcccatcagagactgtggttgaggatagtcgtactggcttgcccccggtaactgatgaaaaccatgtcattgtaaaaacggacagtcagctcgaagacctgggctactgtgtgttcaataagtacacagtcccattgccatcacctgttcaagacagtgagaatttatcaggggagagtggtaccttttacgaaggcactgatgataaagttcgaagagatttggccacagacctttcactgattgaagtgaaactggcagcagccggaagagtcaaagatgagttcagtgttgacaaagaagcatccgcgcatatctctggtgacaaatcaggactgagtaaggagtttgaccaagagaagaaagctaatgataggttggatactgtactagaaaagagtgaagaacatgctgattcaaaagaacatgccaagaaaactgaagaggctggtgatgaaatagaaacattcggattaggagtaacctatgagcaagctttggccaaagatttgtcaataccaacagatgcatcctctgagaaagcagagaagggtcttagttcagttccagagatagctgaggtagaaccatccaaaaaggtggaacaaggtctggattttgctgtccagggtcaactagatgttaaaattagtgactttggacagatggcttcagggctaaacatagatgatagaagggcaacagagctaaaacttgaggctacacaggacatgaccccctcatccaaagcaccgcaggaggcagatgcatttatgggtgttgagtctggccacatgaaagaaggcactaaagttagtgagacagaagtcaaacagaaggtggccaagcctgacttggtgcaccaggaggctgtagacaaggaggagtcctatgaatctagtggtgagcatgaaagtctcaccatggagtccttgaaagctgatgagggcaagaaggaaacatctccagaatcatctctaattcaagatgagattgccgtcaaattgtcagtggaaataccttgcccacctgctgtttcagaggctgatttagccacagatgagagagctgatgtccagatggaatttattcaggggccaaaagaagaaagcaaagagaccccagatatatccatcacgccttctgatgttgcagagccattgcatgaaacgatcgtatctgaaccagcagagattcagagtgaggaagaagagatagaagcccagggagaatatgataaactgctcttccgctcagacacccttcagataactgacctgggtgtctcaggtgccagggaggaatttgtggagacctgcccaagtgaacacaaaggagtgattgagtctgttgtgaccatcgaggatgatttcatcactgtagtgcaaaccacaactgatgaaggggagtcagggtcccacagcgtgcgttttgcagccctagagcagcctgaggtggaaaggagaccatctcctcatgatgaagaagagtttgaagtagaagaggcagctgaagcccaggcagaacccaaagatggttccccagaggctccagcttcccctgagagagaagaggttgcactttctgaatataagacagaaacctatgacgattacaaagatgagaccaccattgacgactccatcatggacgctgacagcctctgggtggacactcaagatgatgataggagcatcatgacagaacagttagaaactattcctaaagaggagaaagctgaaaaggaagctcggagatcatctcttgagaaacatagaaaagaaaagccttttaaaaccgggagaggcagaatttccactcctgaaagaaaagtagctaaaaaggaacctagcacagtctccagagatgaagtgagaaggaaaaaagcagtttataagaaggctgaacttgctaaaaaaacagaagttcaggcccactctccctccaggaaattcattttaaaacctgctatcaaatatactagaccaactcatctctcctgtgttaagcggaaaaccacagcagcaggtggggaatcagctctggctcccagtgtatttaaacaggcaaaggacaaagtctctgacggagtaaccaagagcccagaaaagcgctcttctctcccaagaccttcctccattctccctcctcggcgaggtgtgtcaggagacagagatgagaattccttctctctcaacagttctatctcttcttcagcacggcggaccaccaggtcagagccaattcgcagagcagggaagagtggtacctcaacacccactacccctgggtctactgccatcactcctggcaccccaccaagttattcttcacgcacaccaggcactcctggaacccctagctatcccaggacccctcacacaccaggaacccccaagtctgccatcttggtgccgagtgagaagaaggtcgccatcatacgtactcctccaaaatctcctgcgactcccaagcagcttcggcttattaaccaaccactgccagacctgaagaatgtcaaatccaaaatcggatcaacagacaacatcaaataccagcctaaaggggggcaggttaggattttaaacaagaagatcgattttagcaaagttcagtccagatgtggttccaaggataacatcaaacattcggctgggggcggaaatgtacaaattgttaccaagaaaatagacctaagccatgtgacatccaaatgtggctctctgaagaacatccgccacaggccaggtggcggacgtgtgaaaattgagagtgtaaaactagatttcaaagaaaaggcccaagctaaagttggttctcttgataatgctcatcatgtacctggaggtggtaatgtcaagattgacagccaaaagttgaacttcagagagcatgctaaagcccgtgtggaccatggggctgagatcattacacagtccccaggcagatccagcgtggcatcaccccgacgactcagcaatgtctcctcgtctggaagcatcaacctgctcgaatctcctcagcttgccactttggctgaggatgtcactgctgcactcgctaagcagggcttgtgaatatttctcatttagcattgaaataataatatttaggcatgagctcttggcaggagtgggctctgagcagttgttatattcattctttataaaccataaaataaataatctcatccccaaactgtagtaattgttacaattttctatttaaaaaatgaatagtacatgcagaaattgacctgatttccatttgcaacaggaagacactggctttacatgggttcaattggacaattatttttgctctgctctgttttgcatggagtattattattttaaaaattgcatttttacctttcatgtgcctgaaggctatccactacattctgaaggccttgttaaaatccaagctgctcatttcactattctgtttctgagtgagaagataaaaactgcccattgtaacttatttcaggttaaattaaaccaaggagtctgattgcaggaagggaagagcatgtaagaaataagtttttttaaagtgttattttgtataaatgggaagaaagattcaattaagttattaacatttgggacctggataattatatcagagtatgtcagtccaataaattatttaactaattaaaaaatagttgcaaagcatttgagctgtggttgaggaagtggtgtaaaagtgcatccattaggaatgatgcactttcattaggatggactcgtgtctgattagaatgtcagttgatcagctagatttgtgtccacactaccagtttcacaccccctttccatctgtttgatacagtattatagatataaatatatatatatttctctgtggccatttgtgatacttcctcatatacttgaatattatacttctttattcacagtatctgtgtctcctgcaccctttggtgttgcaattttagatatgtgaaagtagatgttagcagggttctctccctatttaaaaaaaatacattaaaaaagacaaaaaattttagcatgaagttgctttctgtaacaactcaaagccgtaaccctgttttagtgccagatacaagtctctcccgtgatgctagacaaaaaattatttttctttgctttcaccaacatggagtttgtgggggtgggtccagttatacatgaaagggtttacagattgttggtttaagattatggatttatctcatttttaatcacaggatagtttggggtttattcctattattattcatgaaaccgacttaagattttttctttatttttctttttttttccatttgctaaagttgaaagttgaaactaactataatagtttgaaacatgttttctcatttttccaaatagtatctgtttattaaattctctaatagaagatgtttgtctttcttacccaaagtaaagatcccctgatcagaaagaaaaaatacaatactttgggaagctatagctataaaacacttgagacacagatatctaaatcagtttttttccaagactccaacattgcactctgtaaagtaacacactgtgatctagtattatttatcagtagataatactgttctgactgtatatacagtctagaactcacaaatcaattagttcctctcacaaatcattcatcttagacttacaaataaggaatgaaatagtcaatggcctgattaaggcaaagagctaccaggctagatggacactttttaaaaattttatctgttctttttcttgctcagggctggtaggttggatctgaaccattaaaatcaaatggtccactaggcgtatgatctctttgagccaaatcagttcctgaatataaaggaggaaatgatgaggatgtactgaggcaacggggaagtatagaaacatccaagacaaaagccaagggatgcaaaggcagagacacaggtgctttttggtgacccagtggatatggcaaccagtgtaactgccatacaagaaaccctaggagcaaacccacaccactcattctcagctaagagattttacacaggcaaacgtgtcttaaaccatctataaatcagttattttatatgacagtcaaaaccttagaaaccttaggatcattatatctattttctgcctattaattgctgtgaggtttgatttgaccaatctgggcaatttattcatcagcttcccttgaagtgcaccagaaaatagaagaaaggtgtgtggagacttagggtattttattacatgttttcatagtcttaaatagtgattaaatttctctagaaagaagttaacagctcattagaaaagttttaacctgtgaaataagtatttttctcaacattctttaaagtttttatataagttaacactaggtaaacattctgcatactagaagtcagtttattacaaatacatgtcaaaaataaagattatacaaggcaccaaactactagatttggcattaaaacaaatgtttatttctaatcacaacaaaattataatgaataaatgttcttgctttgtatggaaatacaattctttattaaagttaacagaaaggaactgatcgtttgtaccagtaaaagagagaaacacacaggttaaatatcttcttgtggggttaaggggtagaacctatcttgccttcactctcaagataacgactcaaattaagctttttgagcaccactcttgtggggacacacatacgctgatctaggaatgaaatcttcgtggtctcaattctagatctactatgccagtttctctctggctttagcctttgagaacctgtataagaatacgtaagtaatccagagctgtgaagagtttaaaggccaacttctccagtgaactcaacctctgggtcacttgcaaccagaaattggatacctcataatgatgcaggaaagacccgagttcatgatgagtttcaaaggccacgttcatttaggaaccaactctctctggatttacctgctgagttccagcagcgtgatgggctgacatcccacctacaagtatgacacctgtgtaacaccagctaggtacggctggagaaggctgaagagagaatgccattaaatggaagaatgtactgattgtagtgaccttctccacacacacacacacacacacacacacacacctacagtaatacagcaagcgtggaataatcagccaatatataacattccatcagtattttattaaggaaataacctgaatgtggttgattttgacatagctgcaattacagttttcttctatttttcaagccacaataaggaaaataaactactcatggtctaaatactagagataaagtagattcatggcttggtaaggaaattttaagcattccttcaaagattgacgtgctaaaataagcattgatgttttgagtttttttacacctaggatttttagcttgggtgtgtaggtgaaggccaagactctctgcaggaaaaagcttattttcaaactcagaaaataaaatgtcaatcataaaaatctacttcaactttagcaaaaagaaaaaaaaatcaacaaaaagtatactctgtatgctgggattccgaggttccaacacactgttacaaatctgtggggggtttctttcttctgataattctagagcctgttaccatagaaaggcatttcttcaatggctggttgtagttagttcatgtttttcaatcaaatttgcaaatgtatttgttgctgtatagtgattgttttgcaaaataaaattgcttgtcacc

SEQ ID NO: 326239 - DNA, 9239 bp, Homo sapiens
agagagaggagtgtgcagagcagagttatttagcattcaagggtggatctgcagaaaatcacacagcctcactgcgaagcatctgggcctggtggcaccgatggatgaggacagaaaatggggatcttttcagtgttttccttctaaaggttaggcatccggggctagaaagagtgagaaagacaaggattgatagaaaaggcagttccacgagaggaggtgtctgcaaggatagttcaagtagtcactgctgaggctgtagcagtcctgaaaggtgaacaagagaaagaagctcaacataaagaccagactgcagctctgcctttagcagctgaagaaacagctaatctgcctccttctccacccccatcacctgcctcagaacagactgtcacagtggaggaagatttacttacagcctcgaagatggagttccacgatcaacaggaattgactccctctacagctgagccttcagaccagaaggaaaaggagtcagagaagcaaagtaagcctggtgaagaccttaaacatgctgccttagtttctcagccagagacaactaaaacttaccctgataaaaaggacatgcaaggcacagaagaagaaaaagcacccctagctttgtttgggcacactcttgttgccagcctggaagacatgaaacagaagacagaaccaagccttgtagtacctggcattgacctccctaaagagcctccaactccaaaagaacaaaaggactggttcatcgaaatgccaacggaagcaaaaaaggatgagtggggtttagttgcccccatatctcctggccctctgactcccatgagggaaaaagatgtatttgatgatatcccaaaatgggaagggaaacagtttgattctcccatgccaagtccctttcaagggggaagcttcactcttcctttagatgtcatgaagaatgaaatagttacagaaacatcgccctttgcccctgcctttttacagccagatgacaaaaaatctctgcaacaaaccagtggcccagctactgccaaagatagttttaaaattgaagagccccatgaggctaaacctgacaaaatggcagaagcaccaccctcagaggcaatgaccttacccaaagatgctcacattccagttgtagaagaacatgttatggggaaagttttagaggaagaaaaggaggccataaatcaagagactgtgcagcaaagggatactttcacccccagtggacaggaacctatacttactgaaaaggaaactgagctgaagcttgaagaaaaaaccaccatttctgacaaagaagctgtgccaaaagagagtaaacccccaaaacctgcagatgaagaaataggcataattcagacctccacagagcacactttctcagaacagaaagaccaagagcctaccacagatatgttgaaacaggactcgttccctgtaagtttggagcaagcagttacagattcagccatgacctctaaaacactggagaaagccatgaccgaaccatctgcattaattgaaaagagctcaattcaggaactttttgaaatgagagttgatgacaaagataagattgaaggagttggagctgcaacatcagctgagcttgatatgccattttatgaagataaatcaggaatgtccaagtactttgaaacatctgccttgaaagaagaagcaacaaaaagcattgagccaggcagtgattactatgaactgagtgacactagagaaagtgtccatgagtctattgataccatgtctcccatgcataaaaatggtgacaaggagtttcaaacaggaaaagaatcccagcccagtcctccagcacaagaagcagggtacagcactctcgcacagagttatccatcagatttacctgaagaacccagttctcctcaagaaagaatgttcactattgatccaaaagtgtatggagagaaaagggacctccacagtaagaataaggatgatttgacccttagcaggagtttaggacttggtggtaggtctgcaatagaacaaagaagcatgtcaatcaatttgccgatgtcttgcctagattccatagcccttggatttaactttggtcggggacatgatctttctcctctggcttccgatattctaaccaacactagtggaagtatggatgaaggggatgattaccttccagccaccacacctgcactggagaaagccccttgcttccctgtagaaagcaaagaggaagaacagatagagaaagtaaaagctactggagaagaaagtactcaagcggagatatcatgtgagtctcctttcctagccaaagatttttacaaaaatggtactgtcatggcacctgaccttcctgaaatgctagatctggcaggcacaaggtcaagattggcttctgtgagtgcagatgctgaggttgccaggaggaaatcagtcccatcagagactgtggttgaggatagtcgtactggcttgcccccggtaactgatgaaaaccatgtcattgtaaaaacggacagtcagctcgaagacctgggctactgtgtgttcaataagtacacagtcccattgccatcacctgttcaagacagtgagaatttatcaggggagagtggtaccttttacgaaggcactgatgataaagttcgaagagatttggccacagacctttcactgattgaagtgaaactggcagcagccggaagagtcaaagatgagttcagtgttgacaaagaagcatccgcgcatatctctggtgacaaatcaggactgagtaaggagtttgaccaagagaagaaagctaatgataggttggatactgtactagaaaagagtgaagaacatgctgattcaaaagaacatgccaagaaaactgaagaggctggtgatgaaatagaaacattcggattaggagtaacctatgagcaagctttggccaaagatttgtcaataccaacagatgcatcctctgagaaagcagagaagggtcttagttcagttccagagatagctgaggtagaaccatccaaaaaggtggaacaaggtctggattttgctgtccagggtcaactagatgttaaaattagtgactttggacagatggcttcagggctaaacatagatgatagaagggcaacagagctaaaacttgaggctacacaggacatgaccccctcatccaaagcaccgcaggaggcagatgcatttatgggtgttgagtctggccacatgaaagaaggcactaaagttagtgagacagaagtcaaacagaaggtggccaagcctgacttggtgcaccaggaggctgtagacaaggaggagtcctatgaatctagtggtgagcatgaaagtctcaccatggagtccttgaaagctgatgagggcaagaaggaaacatctccagaatcatctctaattcaagatgagattgccgtcaaattgtcagtggaaataccttgcccacctgctgtttcagaggctgatttagccacagatgagagagctgatgtccagatggaatttattcaggggccaaaagaagaaagcaaagagaccccagatatatccatcacgccttctgatgttgcagagccattgcatgaaacgatcgtatctgaaccagcagagattcagagtgaggaagaagagatagaagcccagggagaatatgataaactgctcttccgctcagacacccttcagataactgacctgggtgtctcaggtgccagggaggaatttgtggagacctgcccaagtgaacacaaaggagtgattgagtctgttgtgaccatcgaggatgatttcatcactgtagtgcaaaccacaactgatgaaggggagtcagggtcccacagcgtgcgttttgcagccctagagcagcctgaggtggaaaggagaccatctcctcatgatgaagaagagtttgaagtagaagaggcagctgaagcccaggcagaacccaaagatggttccccagaggctccagcttcccctgagagagaagaggttgcactttctgaatataagacagaaacctatgacgattacaaagatgagaccaccattgacgactccatcatggacgctgacagcctctgggtggacactcaagatgatgataggagcatcatgacagaacagttagaaactattcctaaagaggagaaagctgaaaaggaagctcggagatcatctcttgagaaacatagaaaagaaaagccttttaaaaccgggagaggcagaatttccactcctgaaagaaaagtagctaaaaaggaacctagcacagtctccagagatgaagtgagaaggaaaaaagcagtttataagaaggctgaacttgctaaaaaaacagaagttcaggcccactctccctccaggaaattcattttaaaacctgctatcaaatatactagaccaactcatctctcctgtgttaagcggaaaaccacagcagcaggtggggaatcagctctggctcccagtgtatttaaacaggcaaaggacaaagtctctgacggagtaaccaagagcccagaaaagcgctcttctctcccaagaccttcctccattctccctcctcggcgaggtgtgtcaggagacagagatgagaattccttctctctcaacagttctatctcttcttcagcacggcggaccaccaggtcagagccaattcgcagagcagggaagagtggtacctcaacacccactacccctgggtctactgccatcactcctggcaccccaccaagttattcttcacgcacaccaggcactcctggaacccctagctatcccaggacccctcacacaccaggaacccccaagtctgccatcttggtgccgagtgagaagaaggtcgccatcatacgtactcctccaaaatctcctgcgactcccaagcagcttcggcttattaaccaaccactgccagacctgaagaatgtcaaatccaaaatcggatcaacagacaacatcaaataccagcctaaaggggggcaggttaggattttaaacaagaagatcgattttagcaaagttcagtccagatgtggttccaaggataacatcaaacattcggctgggggcggaaatgtacaaattgttaccaagaaaatagacctaagccatgtgacatccaaatgtggctctctgaagaacatccgccacaggccaggtggcggacgtgtgaaaattgagagtgtaaaactagatttcaaagaaaaggcccaagctaaagttggttctcttgataatgctcatcatgtacctggaggtggtaatgtcaagattgacagccaaaagttgaacttcagagagcatgctaaagcccgtgtggaccatggggctgagatcattacacagtccccaggcagatccagcgtggcatcaccccgacgactcagcaatgtctcctcgtctggaagcatcaacctgctcgaatctcctcagcttgccactttggctgaggatgtcactgctgcactcgctaagcagggcttgtgaatatttctcatttagcattgaaataataatatttaggcatgagctcttggcaggagtgggctctgagcagttgttatattcattctttataaaccataaaataaataatctcatccccaaactgtagtaattgttacaattttctatttaaaaaatgaatagtacatgcagaaattgacctgatttccatttgcaacaggaagacactggctttacatgggttcaattggacaattatttttgctctgctctgttttgcatggagtattattattttaaaaattgcatttttacctttcatgtgcctgaaggctatccactacattctgaaggccttgttaaaatccaagctgctcatttcactattctgtttctgagtgagaagataaaaactgcccattgtaacttatttcaggttaaattaaaccaaggagtctgattgcaggaagggaagagcatgtaagaaataagtttttttaaagtgttattttgtataaatgggaagaaagattcaattaagttattaacatttgggacctggataattatatcagagtatgtcagtccaataaattatttaactaattaaaaaatagttgcaaagcatttgagctgtggttgaggaagtggtgtaaaagtgcatccattaggaatgatgcactttcattaggatggactcgtgtctgattagaatgtcagttgatcagctagatttgtgtccacactaccagtttcacaccccctttccatctgtttgatacagtattatagatataaatatatatatatttctctgtggccatttgtgatacttcctcatatacttgaatattatacttctttattcacagtatctgtgtctcctgcaccctttggtgttgcaattttagatatgtgaaagtagatgttagcagggttctctccctatttaaaaaaaatacattaaaaaagacaaaaaattttagcatgaagttgctttctgtaacaactcaaagccgtaaccctgttttagtgccagatacaagtctctcccgtgatgctagacaaaaaattatttttctttgctttcaccaacatggagtttgtgggggtgggtccagttatacatgaaagggtttacagattgttggtttaagattatggatttatctcatttttaatcacaggatagtttggggtttattcctattattattcatgaaaccgacttaagattttttctttatttttctttttttttccatttgctaaagttgaaagttgaaactaactataatagtttgaaacatgttttctcatttttccaaatagtatctgtttattaaattctctaatagaagatgtttgtctttcttacccaaagtaaagatcccctgatcagaaagaaaaaatacaatactttgggaagctatagctataaaacacttgagacacagatatctaaatcagtttttttccaagactccaacattgcactctgtaaagtaacacactgtgatctagtattatttatcagtagataatactgttctgactgtatatacagtctagaactcacaaatcaattagttcctctcacaaatcattcatcttagacttacaaataaggaatgaaatagtcaatggcctgattaaggcaaagagctaccaggctagatggacactttttaaaaattttatctgttctttttcttgctcagggctggtaggttggatctgaaccattaaaatcaaatggtccactaggcgtatgatctctttgagccaaatcagttcctgaatataaaggaggaaatgatgaggatgtactgaggcaacggggaagtatagaaacatccaagacaaaagccaagggatgcaaaggcagagacacaggtgctttttggtgacccagtggatatggcaaccagtgtaactgccatacaagaaaccctaggagcaaacccacaccactcattctcagctaagagattttacacaggcaaacgtgtcttaaaccatctataaatcagttattttatatgacagtcaaaaccttagaaaccttaggatcattatatctattttctgcctattaattgctgtgaggtttgatttgaccaatctgggcaatttattcatcagcttcccttgaagtgcaccagaaaatagaagaaaggtgtgtggagacttagggtattttattacatgttttcatagtcttaaatagtgattaaatttctctagaaagaagttaacagctcattagaaaagttttaacctgtgaaataagtatttttctcaacattctttaaagtttttatataagttaacactaggtaaacattctgcatactagaagtcagtttattacaaatacatgtcaaaaataaagattatacaaggcaccaaactactagatttggcattaaaacaaatgtttatttctaatcacaacaaaattataatgaataaatgttcttgctttgtatggaaatacaattctttattaaagttaacagaaaggaactgatcgtttgtaccagtaaaagagagaaacacacaggttaaatatcttcttgtggggttaaggggtagaacctatcttgccttcactctcaagataacgactcaaattaagctttttgagcaccactcttgtggggacacacatacgctgatctaggaatgaaatcttcgtggtctcaattctagatctactatgccagtttctctctggctttagcctttgagaacctgtataagaatacgtaagtaatccagagctgtgaagagtttaaaggccaacttctccagtgaactcaacctctgggtcacttgcaaccagaaattggatacctcataatgatgcaggaaagacccgagttcatgatgagtttcaaaggccacgttcatttaggaaccaactctctctggatttacctgctgagttccagcagcgtgatgggctgacatcccacctacaagtatgacacctgtgtaacaccagctaggtacggctggagaaggctgaagagagaatgccattaaatggaagaatgtactgattgtagtgaccttctccacacacacacacacacacacacacacacacctacagtaatacagcaagcgtggaataatcagccaatatataacattccatcagtattttattaaggaaataacctgaatgtggttgattttgacatagctgcaattacagttttcttctatttttcaagccacaataaggaaaataaactactcatggtctaaatactagagataaagtagattcatggcttggtaaggaaattttaagcattccttcaaagattgacgtgctaaaataagcattgatgttttgagtttttttacacctaggatttttagcttgggtgtgtaggtgaaggccaagactctctgcaggaaaaagcttattttcaaactcagaaaataaaatgtcaatcataaaaatctacttcaactttagcaaaaagaaaaaaaaatcaacaaaaagtatactctgtatgctgggattccgaggttccaacacactgttacaaatctgtggggggtttctttcttctgataattctagagcctgttaccatagaaaggcatttcttcaatggctggttgtagttagttcatgtttttcaatcaaatttgcaaatgtatttgttgctgtatagtgattgttttgcaaaataaaattgcttgtcacc

SEQ ID NO: 326240 - DNA, 5571 bp, Homo sapiens
accgctaaatcgtaagtgagggctgcatcctattgtcagtgaatgatggcggagctgagtggcttgtcatcattctcgaaaattctgagactagtgagctctctccctctctcccactcgccttattttcctgttcgccactgcggggacttctaatttgcagcttccctttccccggcacacacagacacgagctggtggcttgcagactgcgtctgtctggagctagagagccagagagccagcctgtggggataatgctcccgagaaggattctggcagcagttctcaaaggctagacttgagtggtattgctgcatatgcgctgattcttcagcttgtctctaaccgaggaagcattgattgggagctactcattcagaaaattaaaagaaagaagccagaaaatattatcaaccctttgagaacacgacacaacgaactttatattttaccacttccttgaatagttgcaggagaaataacaaggcattgaagaatggcagatgaacggaaagacgaagcaaaggcacctcactggacctcagcaccgctaacagaggcatctgcacactcacatccacctgagattaaggatcaaggcggagcaggggaaggacttgtccgaagcgccaatggattcccatacagggaggatgaagagggtgcctttggagagcatgggtcacagggcacctattcaaataccaaagagaatgggatcaacggagagctgacctcagctgacagagaaacagcagaggaggtgtctgcaaggatagttcaagtagtcactgctgaggctgtagcagtcctgaaaggtgaacaagagaaagaagctcaacataaagaccagactgcagctctgcctttagcagctgaagaaacagctaatctgcctccttctccacccccatcacctgcctcagaacagactgtcacagtggaggaagcagcaggtggggaatcagctctggctcccagtgtatttaaacaggcaaaggacaaagtctctgacggagtaaccaagagcccagaaaagcgctcttctctcccaagaccttcctccattctccctcctcggcgaggtgtgtcaggagacagagatgagaattccttctctctcaacagttctatctcttcttcagcacggcggaccaccaggtcagagccaattcgcagagcagggaagagtggtacctcaacacccactacccctgggtctactgccatcactcctggcaccccaccaagttattcttcacgcacaccaggcactcctggaacccctagctatcccaggacccctcacacaccaggaacccccaagtctgccatcttggtgccgagtgagaagaaggtcgccatcatacgtactcctccaaaatctcctgcgactcccaagcagcttcggcttattaaccaaccactgccagacctgaagaatgtcaaatccaaaatcggatcaacagacaacatcaaataccagcctaaaggggggcaggtacaaattgttaccaagaaaatagacctaagccatgtgacatccaaatgtggctctctgaagaacatccgccacaggccaggtggcggacgtgtgaaaattgagagtgtaaaactagatttcaaagaaaaggcccaagctaaagttggttctcttgataatgctcatcatgtacctggaggtggtaatgtcaagattgacagccaaaagttgaacttcagagagcatgctaaagcccgtgtggaccatggggctgagatcattacacagtccccaggcagatccagcgtggcatcaccccgacgactcagcaatgtctcctcgtctggaagcatcaacctgctcgaatctcctcagcttgccactttggctgaggatgtcactgctgcactcgctaagcagggcttgtgaatatttctcatttagcattgaaataataatatttaggcatgagctcttggcaggagtgggctctgagcagttgttatattcattctttataaaccataaaataaataatctcatccccaaactgtagtaattgttacaattttctatttaaaaaatgaatagtacatgcagaaattgacctgatttccatttgcaacaggaagacactggctttacatgggttcaattggacaattatttttgctctgctctgttttgcatggagtattattattttaaaaattgcatttttacctttcatgtgcctgaaggctatccactacattctgaaggccttgttaaaatccaagctgctcatttcactattctgtttctgagtgagaagataaaaactgcccattgtaacttatttcaggttaaattaaaccaaggagtctgattgcaggaagggaagagcatgtaagaaataagtttttttaaagtgttattttgtataaatgggaagaaagattcaattaagttattaacatttgggacctggataattatatcagagtatgtcagtccaataaattatttaactaattaaaaaatagttgcaaagcatttgagctgtggttgaggaagtggtgattagaatgtcagttgatcagctagatttgtgtccacactaccagtttcacaccccctttccatctgtttgatacagtattatagatataaatatatatatatttctctgtggccatttgtgatacttcctcatatacttgaatattatacttctttattcacagtatctgtgtctcctgcaccctttggtgttgcaattttagatatgtgaaagtagatgttagcagggttctctccctatttaaaaaaaatacattaaaaaagacaaaaaattttagcatgaagttgctttctgtaacaactcaaagccgtaaccctgttttagtgccagatacaagtctctcccgtgatgctagacaaaaaattatttttctttgctttcaccaacatggagtttgtgggggtgggtccagttatacatgaaagggtttacagattgttggtttaagattatggatttatctcatttttaatcacaggatagtttggggtttattcctattattattcatgaaaccgacttaagattttttctttatttttctttttttttccatttgctaaagttgaaagttgaaactaactataatagtttgaaacatgttttctcatttttccaaatagtatctgtttattaaattctctaatagaagatgtttgtctttcttacccaaagtaaagatcccctgatcagaaagaaaaaatacaatactttgggaagctatagctataaaacacttgagacacagatatctaaatcagtttttttccaagactccaacattgcactctgtaaagtaacacactgtgatctagtattatttatcagtagataatactgttctgactgtatatacagtctagaactcacaaatcaattagttcctctcacaaatcattcatcttagacttacaaataaggaatgaaatagtcaatggcctgattaaggcaaagagctaccaggctagatggacactttttaaaaattttatctgttctttttcttgctcagggctggtaggttggatctgaaccattaaaatcaaatggtccactaggcgtatgatctctttgagccaaatcagttcctgaatataaaggaggaaatgatgaggatgtactgaggcaacggggaagtatagaaacatccaagacaaaagccaagggatgcaaaggcagagacacaggtgctttttggtgacccagtggatatggcaaccagtgtaactgccatacaagaaaccctaggagcaaacccacaccactcattctcagctaagagattttacacaggcaaacgtgtcttaaaccatctataaatcagttattttatatgacagtcaaaaccttagaaaccttaggatcattatatctattttctgcctattaattgctgtgaggtttgatttgaccaatctgggcaatttattcatcagcttcccttgaagtgcaccagaaaatagaagaaaggtgtgtggagacttagggtattttattacatgttttcatagtcttaaatagtgattaaatttctctagaaagaagttaacagctcattagaaaagttttaacctgtgaaataagtatttttctcaacattctttaaagtttttatataagttaacactaggtaaacattctgcatactagaagtcagtttattacaaatacatgtcaaaaataaagattatacaaggcaccaaactactagatttggcattaaaacaaatgtttatttctaatcacaacaaaattataatgaataaatgttcttgctttgtatggaaatacaattctttattaaagttaacagaaaggaactgatcgtttgtaccagtaaaagagagaaacacacaggttaaatatcttcttgtggggttaaggggtagaacctatcttgccttcactctcaagataacgactcaaattaagctttttgagcaccactcttgtggggacacacatacgctgatctaggaatgaaatcttcgtggtctcaattctagatctactatgccagtttctctctggctttagcctttgagaacctgtataagaatacgtaagtaatccagagctgtgaagagtttaaaggccaacttctccagtgaactcaacctctgggtcacttgcaaccagaaattggatacctcataatgatgcaggaaagacccgagttcatgatgagtttcaaaggccacgttcatttaggaaccaactctctctggatttacctgctgagttccagcagcgtgatgggctgacatcccacctacaagtatgacacctgtgtaacaccagctaggtacggctggagaaggctgaagagagaatgccattaaatggaagaatgtactgattgtagtgaccttctccacacacacacacacacacacacacacacacctacagtaatacagcaagcgtggaataatcagccaatatataacattccatcagtattttattaaggaaataacctgaatgtggttgattttgacatagctgcaattacagttttcttctatttttcaagccacaataaggaaaataaactactcatggtctaaatactagagataaagtagattcatggcttggtaaggaaattttaagcattccttcaaagattgacgtgctaaaataagcattgatgttttgagtttttttacacctaggatttttagcttgggtgtgtaggtgaaggccaagactctctgcaggaaaaagcttattttcaaactcagaaaataaaatgtcaatcataaaaatctacttcaactttagcaaaaagaaaaaaaaatcaacaaaaagtatactctgtatgctgggattccgaggttccaacacactgttacaaatctgtggggggtttctttcttctgataattctagagcctgttaccatagaaaggcatttcttcaatggctggttgtagttagttcatgtttttcaatcaaatttgcaaatgtatttgttgctgtatagtgattgttttgcaaaataaaattgcttgtcacc

SEQ ID NO: 326241 - DNA, 5664 bp, Homo sapiens
accgctaaatcgtaagtgagggctgcatcctattgtcagtgaatgatggcggagctgagtggcttgtcatcattctcgaaaattctgagactagtgagctctctccctctctcccactcgccttattttcctgttcgccactgcggggacttctaatttgcagcttccctttccccggcacacacagacacgagctggtggcttgcagactgcgtctgtctggagctagagagccagagagccagcctgtggggataatgctcccgagaaggattctggcagcagttctcaaaggctagacttgagtggtattgctgcatatgcgctgattcttcagcttgtctctaaccgaggaagcattgattgggagctactcattcagaaaattaaaagaaagaagccagaaaatattatcaaccctttgagaacacgacacaacgaactttatattttaccacttccttgaatagttgcaggagaaataacaaggcattgaagaatggcagatgaacggaaagacgaagcaaaggcacctcactggacctcagcaccgctaacagaggcatctgcacactcacatccacctgagattaaggatcaaggcggagcaggggaaggacttgtccgaagcgccaatggattcccatacagggaggatgaagagggtgcctttggagagcatgggtcacagggcacctattcaaataccaaagagaatgggatcaacggagagctgacctcagctgacagagaaacagcagaggaggtgtctgcaaggatagttcaagtagtcactgctgaggctgtagcagtcctgaaaggtgaacaagagaaagaagctcaacataaagaccagactgcagctctgcctttagcagctgaagaaacagctaatctgcctccttctccacccccatcacctgcctcagaacagactgtcacagtggaggaagcagcaggtggggaatcagctctggctcccagtgtatttaaacaggcaaaggacaaagtctctgacggagtaaccaagagcccagaaaagcgctcttctctcccaagaccttcctccattctccctcctcggcgaggtgtgtcaggagacagagatgagaattccttctctctcaacagttctatctcttcttcagcacggcggaccaccaggtcagagccaattcgcagagcagggaagagtggtacctcaacacccactacccctgggtctactgccatcactcctggcaccccaccaagttattcttcacgcacaccaggcactcctggaacccctagctatcccaggacccctcacacaccaggaacccccaagtctgccatcttggtgccgagtgagaagaaggtcgccatcatacgtactcctccaaaatctcctgcgactcccaagcagcttcggcttattaaccaaccactgccagacctgaagaatgtcaaatccaaaatcggatcaacagacaacatcaaataccagcctaaaggggggcaggttaggattttaaacaagaagatcgattttagcaaagttcagtccagatgtggttccaaggataacatcaaacattcggctgggggcggaaatgtacaaattgttaccaagaaaatagacctaagccatgtgacatccaaatgtggctctctgaagaacatccgccacaggccaggtggcggacgtgtgaaaattgagagtgtaaaactagatttcaaagaaaaggcccaagctaaagttggttctcttgataatgctcatcatgtacctggaggtggtaatgtcaagattgacagccaaaagttgaacttcagagagcatgctaaagcccgtgtggaccatggggctgagatcattacacagtccccaggcagatccagcgtggcatcaccccgacgactcagcaatgtctcctcgtctggaagcatcaacctgctcgaatctcctcagcttgccactttggctgaggatgtcactgctgcactcgctaagcagggcttgtgaatatttctcatttagcattgaaataataatatttaggcatgagctcttggcaggagtgggctctgagcagttgttatattcattctttataaaccataaaataaataatctcatccccaaactgtagtaattgttacaattttctatttaaaaaatgaatagtacatgcagaaattgacctgatttccatttgcaacaggaagacactggctttacatgggttcaattggacaattatttttgctctgctctgttttgcatggagtattattattttaaaaattgcatttttacctttcatgtgcctgaaggctatccactacattctgaaggccttgttaaaatccaagctgctcatttcactattctgtttctgagtgagaagataaaaactgcccattgtaacttatttcaggttaaattaaaccaaggagtctgattgcaggaagggaagagcatgtaagaaataagtttttttaaagtgttattttgtataaatgggaagaaagattcaattaagttattaacatttgggacctggataattatatcagagtatgtcagtccaataaattatttaactaattaaaaaatagttgcaaagcatttgagctgtggttgaggaagtggtgattagaatgtcagttgatcagctagatttgtgtccacactaccagtttcacaccccctttccatctgtttgatacagtattatagatataaatatatatatatttctctgtggccatttgtgatacttcctcatatacttgaatattatacttctttattcacagtatctgtgtctcctgcaccctttggtgttgcaattttagatatgtgaaagtagatgttagcagggttctctccctatttaaaaaaaatacattaaaaaagacaaaaaattttagcatgaagttgctttctgtaacaactcaaagccgtaaccctgttttagtgccagatacaagtctctcccgtgatgctagacaaaaaattatttttctttgctttcaccaacatggagtttgtgggggtgggtccagttatacatgaaagggtttacagattgttggtttaagattatggatttatctcatttttaatcacaggatagtttggggtttattcctattattattcatgaaaccgacttaagattttttctttatttttctttttttttccatttgctaaagttgaaagttgaaactaactataatagtttgaaacatgttttctcatttttccaaatagtatctgtttattaaattctctaatagaagatgtttgtctttcttacccaaagtaaagatcccctgatcagaaagaaaaaatacaatactttgggaagctatagctataaaacacttgagacacagatatctaaatcagtttttttccaagactccaacattgcactctgtaaagtaacacactgtgatctagtattatttatcagtagataatactgttctgactgtatatacagtctagaactcacaaatcaattagttcctctcacaaatcattcatcttagacttacaaataaggaatgaaatagtcaatggcctgattaaggcaaagagctaccaggctagatggacactttttaaaaattttatctgttctttttcttgctcagggctggtaggttggatctgaaccattaaaatcaaatggtccactaggcgtatgatctctttgagccaaatcagttcctgaatataaaggaggaaatgatgaggatgtactgaggcaacggggaagtatagaaacatccaagacaaaagccaagggatgcaaaggcagagacacaggtgctttttggtgacccagtggatatggcaaccagtgtaactgccatacaagaaaccctaggagcaaacccacaccactcattctcagctaagagattttacacaggcaaacgtgtcttaaaccatctataaatcagttattttatatgacagtcaaaaccttagaaaccttaggatcattatatctattttctgcctattaattgctgtgaggtttgatttgaccaatctgggcaatttattcatcagcttcccttgaagtgcaccagaaaatagaagaaaggtgtgtggagacttagggtattttattacatgttttcatagtcttaaatagtgattaaatttctctagaaagaagttaacagctcattagaaaagttttaacctgtgaaataagtatttttctcaacattctttaaagtttttatataagttaacactaggtaaacattctgcatactagaagtcagtttattacaaatacatgtcaaaaataaagattatacaaggcaccaaactactagatttggcattaaaacaaatgtttatttctaatcacaacaaaattataatgaataaatgttcttgctttgtatggaaatacaattctttattaaagttaacagaaaggaactgatcgtttgtaccagtaaaagagagaaacacacaggttaaatatcttcttgtggggttaaggggtagaacctatcttgccttcactctcaagataacgactcaaattaagctttttgagcaccactcttgtggggacacacatacgctgatctaggaatgaaatcttcgtggtctcaattctagatctactatgccagtttctctctggctttagcctttgagaacctgtataagaatacgtaagtaatccagagctgtgaagagtttaaaggccaacttctccagtgaactcaacctctgggtcacttgcaaccagaaattggatacctcataatgatgcaggaaagacccgagttcatgatgagtttcaaaggccacgttcatttaggaaccaactctctctggatttacctgctgagttccagcagcgtgatgggctgacatcccacctacaagtatgacacctgtgtaacaccagctaggtacggctggagaaggctgaagagagaatgccattaaatggaagaatgtactgattgtagtgaccttctccacacacacacacacacacacacacacacacctacagtaatacagcaagcgtggaataatcagccaatatataacattccatcagtattttattaaggaaataacctgaatgtggttgattttgacatagctgcaattacagttttcttctatttttcaagccacaataaggaaaataaactactcatggtctaaatactagagataaagtagattcatggcttggtaaggaaattttaagcattccttcaaagattgacgtgctaaaataagcattgatgttttgagtttttttacacctaggatttttagcttgggtgtgtaggtgaaggccaagactctctgcaggaaaaagcttattttcaaactcagaaaataaaatgtcaatcataaaaatctacttcaactttagcaaaaagaaaaaaaaatcaacaaaaagtatactctgtatgctgggattccgaggttccaacacactgttacaaatctgtggggggtttctttcttctgataattctagagcctgttaccatagaaaggcatttcttcaatggctggttgtagttagttcatgtttttcaatcaaatttgcaaatgtatttgttgctgtatagtgattgttttgcaaaataaaattgcttgtcacc

SEQ ID NO: 326242 - DNA, 5101 bp, Homo sapiens
agagagaggagtgtgcagagcagagttatttagcattcaagggtggatctgcagaaaatcacacagcctcactgcgaagcatctgggcctggtggcaccgatggatgaggacagaaaatggggatcttttcagtgttttccttctaaaggttaggcatccggggctagaaagagtgagaaagacaaggattgatagaaaaggcagttccacgagaggaggtgtctgcaaggatagttcaagtagtcactgctgaggctgtagcagtcctgaaaggtgaacaagagaaagaagctcaacataaagaccagactgcagctctgcctttagcagctgaagaaacagctaatctgcctccttctccacccccatcacctgcctcagaacagactgtcacagtggaggaagcagcaggtggggaatcagctctggctcccagtgtatttaaacaggcaaaggacaaagtctctgaggtgtgtcaggagacagagatgagaattccttctctctcaacagttctatctcttcttcagcacggcggaccaccaggtcagagccaattcgcagagcagggaagagtggtacctcaacacccactacccctgggtctactgccatcactcctggcaccccaccaagttattcttcacgcacaccaggcactcctggaacccctagctatcccaggacccctcacacaccaggaacccccaagtctgccatcttggtgccgagtgagaagaaggtcgccatcatacgtactcctccaaaatctcctgcgactcccaagcagcttcggcttattaaccaaccactgccagacctgaagaatgtcaaatccaaaatcggatcaacagacaacatcaaataccagcctaaaggggggcaggttaggattttaaacaagaagatcgattttagcaaagttcagtccagatgtggttccaaggataacatcaaacattcggctgggggcggaaatgtacaaattgttaccaagaaaatagacctaagccatgtgacatccaaatgtggctctctgaagaacatccgccacaggccaggtggcggacgtgtgaaaattgagagtgtaaaactagatttcaaagaaaaggcccaagctaaagttggttctcttgataatgctcatcatgtacctggaggtggtaatgtcaagattgacagccaaaagttgaacttcagagagcatgctaaagcccgtgtggaccatggggctgagatcattacacagtccccaggcagatccagcgtggcatcaccccgacgactcagcaatgtctcctcgtctggaagcatcaacctgctcgaatctcctcagcttgccactttggctgaggatgtcactgctgcactcgctaagcagggcttgtgaatatttctcatttagcattgaaataataatatttaggcatgagctcttggcaggagtgggctctgagcagttgttatattcattctttataaaccataaaataaataatctcatccccaaactgtagtaattgttacaattttctatttaaaaaatgaatagtacatgcagaaattgacctgatttccatttgcaacaggaagacactggctttacatgggttcaattggacaattatttttgctctgctctgttttgcatggagtattattattttaaaaattgcatttttacctttcatgtgcctgaaggctatccactacattctgaaggccttgttaaaatccaagctgctcatttcactattctgtttctgagtgagaagataaaaactgcccattgtaacttatttcaggttaaattaaaccaaggagtctgattgcaggaagggaagagcatgtaagaaataagtttttttaaagtgttattttgtataaatgggaagaaagattcaattaagttattaacatttgggacctggataattatatcagagtatgtcagtccaataaattatttaactaattaaaaaatagttgcaaagcatttgagctgtggttgaggaagtggtgtaaaagtgcatccattaggaatgatgcactttcattaggatggactcgtgtctgattagaatgtcagttgatcagctagatttgtgtccacactaccagtttcacaccccctttccatctgtttgatacagtattatagatataaatatatatatatttctctgtggccatttgtgatacttcctcatatacttgaatattatacttctttattcacagtatctgtgtctcctgcaccctttggtgttgcaattttagatatgtgaaagtagatgttagcagggttctctccctatttaaaaaaaatacattaaaaaagacaaaaaattttagcatgaagttgctttctgtaacaactcaaagccgtaaccctgttttagtgccagatacaagtctctcccgtgatgctagacaaaaaattatttttctttgctttcaccaacatggagtttgtgggggtgggtccagttatacatgaaagggtttacagattgttggtttaagattatggatttatctcatttttaatcacaggatagtttggggtttattcctattattattcatgaaaccgacttaagattttttctttatttttctttttttttccatttgctaaagttgaaagttgaaactaactataatagtttgaaacatgttttctcatttttccaaatagtatctgtttattaaattctctaatagaagatgtttgtctttcttacccaaagtaaagatcccctgatcagaaagaaaaaatacaatactttgggaagctatagctataaaacacttgagacacagatatctaaatcagtttttttccaagactccaacattgcactctgtaaagtaacacactgtgatctagtattatttatcagtagataatactgttctgactgtatatacagtctagaactcacaaatcaattagttcctctcacaaatcattcatcttagacttacaaataaggaatgaaatagtcaatggcctgattaaggcaaagagctaccaggctagatggacactttttaaaaattttatctgttctttttcttgctcagggctggtaggttggatctgaaccattaaaatcaaatggtccactaggcgtatgatctctttgagccaaatcagttcctgaatataaaggaggaaatgatgaggatgtactgaggcaacggggaagtatagaaacatccaagacaaaagccaagggatgcaaaggcagagacacaggtgctttttggtgacccagtggatatggcaaccagtgtaactgccatacaagaaaccctaggagcaaacccacaccactcattctcagctaagagattttacacaggcaaacgtgtcttaaaccatctataaatcagttattttatatgacagtcaaaaccttagaaaccttaggatcattatatctattttctgcctattaattgctgtgaggtttgatttgaccaatctgggcaatttattcatcagcttcccttgaagtgcaccagaaaatagaagaaaggtgtgtggagacttagggtattttattacatgttttcatagtcttaaatagtgattaaatttctctagaaagaagttaacagctcattagaaaagttttaacctgtgaaataagtatttttctcaacattctttaaagtttttatataagttaacactaggtaaacattctgcatactagaagtcagtttattacaaatacatgtcaaaaataaagattatacaaggcaccaaactactagatttggcattaaaacaaatgtttatttctaatcacaacaaaattataatgaataaatgttcttgctttgtatggaaatacaattctttattaaagttaacagaaaggaactgatcgtttgtaccagtaaaagagagaaacacacaggttaaatatcttcttgtggggttaaggggtagaacctatcttgccttcactctcaagataacgactcaaattaagctttttgagcaccactcttgtggggacacacatacgctgatctaggaatgaaatcttcgtggtctcaattctagatctactatgccagtttctctctggctttagcctttgagaacctgtataagaatacgtaagtaatccagagctgtgaagagtttaaaggccaacttctccagtgaactcaacctctgggtcacttgcaaccagaaattggatacctcataatgatgcaggaaagacccgagttcatgatgagtttcaaaggccacgttcatttaggaaccaactctctctggatttacctgctgagttccagcagcgtgatgggctgacatcccacctacaagtatgacacctgtgtaacaccagctaggtacggctggagaaggctgaagagagaatgccattaaatggaagaatgtactgattgtagtgaccttctccacacacacacacacacacacacacacacacctacagtaatacagcaagcgtggaataatcagccaatatataacattccatcagtattttattaaggaaataacctgaatgtggttgattttgacatagctgcaattacagttttcttctatttttcaagccacaataaggaaaataaactactcatggtctaaatactagagataaagtagattcatggcttggtaaggaaattttaagcattccttcaaagattgacgtgctaaaataagcattgatgttttgagtttttttacacctaggatttttagcttgggtgtgtaggtgaaggccaagactctctgcaggaaaaagcttattttcaaactcagaaaataaaatgtcaatcataaaaatctacttcaactttagcaaaaagaaaaaaaaatcaacaaaaagtatactctgtatgctgggattccgaggttccaacacactgttacaaatctgtggggggtttctttcttctgataattctagagcctgttaccatagaaaggcatttcttcaatggctggttgtagttagttcatgtttttcaatcaaatttgcaaatgtatttgttgctgtatagtgattgttttgcaaaataaaattgcttgtcacc

SEQ ID NO: 326243 - DNA, 5849 bp, Homo sapiens
  misc_feature (5823)..(5823): n is a, c, g, or t
  misc_feature (5849)..(5849): n is a, c, g, or t
agtctggggcgggcgctcgggctgcgcgggctctgggcagcagcagcagcagcagcagcatcctctcttcctttacttcccttccgcttctttctcttccttctccttctttttcccccccctccccttcttcccctaacccttctacccctctcctttttctccggagggcgctaagtccgtgagcggtggcagtcgcgaccgcgggtgcatccagtttctgcgcccagattttattgatctaatccaaagtatcttataacttctggctggaattaagattcttcagcttgtctctaaccgaggaagcattgattgggagctactcattcagaaaattaaaagaaagaagccagaaaatattatcaaccctttgagaacacgacacaacgaactttatattttaccacttccttgaatagttgcaggagaaataacaaggcattgaagaatggcagatgaacggaaagacgaagcaaaggcacctcactggacctcagcaccgctaacagaggcatctgcacactcacatccacctgagattaaggatcaaggcggagcaggggaaggacttgtccgaagcgccaatggattcccatacagggaggatgaagagggtgcctttggagagcatgggtcacagggcacctattcaaataccaaagagaatgggatcaacggagagctgacctcagctgacagagaaacagcagaggaggtgtctgcaaggatagttcaagtagtcactgctgaggctgtagcagtcctgaaaggtgaacaagagaaagaagctcaacataaagaccagactgcagctctgcctttagcagctgaagaaacagctaatctgcctccttctccacccccatcacctgcctcagaacagactgtcacagtggaggaagatttacttacagcctcgaagatggagttccacgatcaacaggaattgactccctctacagctgagccttcagaccagaaggaaaaggagtcagagaagcaaagtaagcctggtgaagaccttaaacatgctgccttagtttctcagccagagacaactaaaacttaccctgataaaaaggacatgcaaggcacagaagaagaaaaagcacccctagctttgtttgggcacactcttgttgccagcctggaagacatgaaacagaagacagaaccaagccttgtagtacctggcattgacctccctaaagagcctccaactccaaaagaacaaaaggactggttcatcgaaatgccaacggaagcaaaaaaggatgagtggggtttagttgcccccatatctcctggccctctgactcccatgagggaaaaagatgtatttgatgatatcccaaaatgggaagggaaacagtttgattctcccatgccaagtccctttcaagggggaagcttcactcttcctttagatgtcatgaagaatgaaatagttacagaaacatcgccctttgcccctgcctttttacagccagatgacaaaaaatctctgcaacaaaccagtggcccagctactgccaaagatagttttaaaattgaagagccccatgaggctaaacctgacaaaatggcagaagcaccaccctcagaggcaatgaccttacccaaagatgctcacattccagttgtagaagaacatgttatggggaaagttttagaggaagaaaaggaggccataaatcaagagactgtgcagcaaagggatactttcacccccagtggacaggaacctatacttactgaaaaggaaactgagctgaagcttgaagaaaaaaccaccatttctgacaaagaagctgtgccaaaagagagtaaacccccaaaacctgcagatgaagaaataggcataattcagacctccacagagcacactttctcagaacagaaagaccaagagcctaccacagatatgttgaaacaggactcgttccctgtaagtttggagcaagcagttacagattcagccatgacctctaaaacactggagaaagccatgaccgaaccatctgcattaattgaaaagagctcaattcaggaactttttgaaatgagagttgatgacaaagataagattgaaggagttggagctgcaacatcagctgagcttgatatgccattttatgaagataaatcaggaatgtccaagtactttgaaacatctgccttgaaagaagaagcaacaaaaagcattgagccaggcagtgattactatgaactgagtgacactagagaaagtgtccatgagtctattgataccatgtctcccatgcataaaaatggtgacaaggagtttcaaacaggaaaagaatcccagcccagtcctccagcacaagaagcagggtacagcactctcgcacagagttatccatcagatttacctgaagaacccagttctcctcaagaaagaatgttcactattgatccaaaagtgtatggagagaaaagggacctccacagtaagaataaggatgatttgacccttagcaggagtttaggacttggtggtaggtctgcaatagaacaaagaagcatgtcaatcaatttgccgatgtcttgcctagattccatagcccttggatttaactttggtcggggacatgatctttctcctctggcttccgatattctaaccaacactagtggaagtatggatgaaggggatgattaccttccagccaccacacctgcactggagaaagccccttgcttccctgtagaaagcaaagaggaagaacagatagagaaagtaaaagctactggagaagaaagtactcaagcggagatatcatgtgagtctcctttcctagccaaagatttttacaaaaatggtactgtcatggcacctgaccttcctgaaatgctagatctggcaggcacaaggtcaagattggcttctgtgagtgcagatgctgaggttgccaggaggaaatcagtcccatcagagactgtggttgaggatagtcgtactggcttgcccccggtaactgatgaaaaccatgtcattgtaaaaacggacagtcagctcgaagacctgggctactgtgtgttcaataagtacacagtcccattgccatcacctgttcaagacagtgagaatttatcaggggagagtggtaccttttacgaaggcactgatgataaagttcgaagagatttggccacagacctttcactgattgaagtgaaactggcagcagccggaagagtcaaagatgagttcagtgttgacaaagaagcatccgcgcatatctctggtgacaaatcaggactgagtaaggagtttgaccaagagaagaaagctaatgataggttggatactgtactagaaaagagtgaagaacatgctgattcaaaagaacatgccaagaaaactgaagaggctggtgatgaaatagaaacattcggattaggagtaacctatgagcaagctttggccaaagatttgtcaataccaacagatgcatcctctgagaaagcagagaagggtcttagttcagttccagagatagctgaggtagaaccatccaaaaaggtggaacaaggtctggattttgctgtccagggtcaactagatgttaaaattagtgactttggacagatggcttcagggctaaacatagatgatagaagggcaacagagctaaaacttgaggctacacaggacatgaccccctcatccaaagcaccgcaggaggcagatgcatttatgggtgttgagtctggccacatgaaagaaggcactaaagttagtgagacagaagtcaaacagaaggtggccaagcctgacttggtgcaccaggaggctgtagacaaggaggagtcctatgaatctagtggtgagcatgaaagtctcaccatggagtccttgaaagctgatgagggcaagaaggaaacatctccagaatcatctctaattcaagatgagattgccgtcaaattgtcagtggaaataccttgcccacctgctgtttcagaggctgatttagccacagatgagagagctgatgtccagatggaatttattcaggggccaaaagaagaaagcaaagagaccccagatatatccatcacgccttctgatgttgcagagccattgcatgaaacgatcgtatctgaaccagcagagattcagagtgaggaagaagagatagaagcccagggagaatatgataaactgctcttccgctcagacacccttcagataactgacctgggtgtctcaggtgccagggaggaatttgtggagacctgcccaagtgaacacaaaggagtgattgagtctgttgtgaccatcgaggatgatttcatcactgtagtgcaaaccacaactgatgaaggggagtcagggtcccacagcgtgcgttttgcagccctagagcagcctgaggtggaaaggagaccatctcctcatgatgaagaagagtttgaagtagaagaggcagctgaagcccaggcagaacccaaagatggttccccagaggctccagcttcccctgagagagaagaggttgcactttctgaatataagacagaaacctatgacgattacaaagatgagaccaccattgacgactccatcatggacgctgacagcctctgggtggacactcaagatgatgataggagcatcatgacagaacagttagaaactattcctaaagaggagaaagctgaaaaggaagctcggagatcatctcttgagaaacatagaaaagaaaagccttttaaaaccgggagaggcagaatttccactcctgaaagaaaagtagctaaaaaggaacctagcacagtctccagagatgaagtgagaaggaaaaaagcagtttataagaaggctgaacttgctaaaaaaacagaagttcaggcccactctccctccaggaaattcattttaaaacctgctatcaaatatactagaccaactcatctctcctgtgttaagcggaaaaccacagcagcaggtggggaatcagctctggctcccagtgtatttaaacaggcaaaggacaaagtctctgacggagtaaccaagagcccagaaaagcgctcttctctcccaagaccttcctccattctccctcctcggcgaggtgtgtcaggagacagagatgagaattccttctctctcaacagttctatctcttcttcagcacggcggaccaccaggtcagagccaattcgcagagcagggaagagtggtacctcaacacccactacccctgggtctactgccatcactcctggcaccccaccaagttattcttcacgcacaccaggcactcctggaacccctagctatcccaggacccctcacacaccaggaacccccaagtctgccatcttggtgccgagtgagaagaaggtcgccatcatacgtactcctccaaaatctcctgcgactcccaagcagcttcggcttattaaccaaccactgccagacctgaagaatgtcaaatccaaaatcggatcaacagacaacatcaaataccagcctaaaggggggcaggttaggattttaaacaagaagatcgattttagcaaagttcagtccagatgtggttccaaggataacatcaaacattcggctgggggcggaaatgtacaaattgttaccaagaaaatagacctaagccatgtgacatccaaatgtggctctctgaagaacatccgccacaggccaggtggcggacgtgtgaaaattgagagtgtaaaactagatttcaaagaaaaggcccaagctaaagttggttctcttgataatgctcatcatgtacctggaggtggtaatgtcaagattgacagccnaaaggtggcctttaaaaaagctgctn

SEQ ID NO: 326244 - DNA, 5846 bp, Homo sapiens
agtctggggcgggcgctcgggctgcgcgggctctgggcagcagcagcagcagcagcagcatcctctcttcctttacttcccttccgcttctttctcttccttctccttctttttcccccccctccccttcttcccctaacccttctacccctctcctttttctccggagggcgctaagtccgtgagcggtggcagtcgcgaccgcgggtgcatccagtttctgcgcccagattttattgatctaatccaaagtatcttataacttctggctggaattaagattcttcagcttgtctctaaccgaggaagcattgattgggagctactcattcagaaaattaaaagaaagaagccagaaaatattatcaaccctttgagaacacgacacaacgaactttatattttaccacttccttgaatagttgcaggagaaataacaaggcattgaagaatggcagatgaacggaaagacgaagcaaaggcacctcactggacctcagcaccgctaacagaggcatctgcacactcacatccacctgagattaaggatcaaggcggagcaggggaaggacttgtccgaagcgccaatggattcccatacagggaggatgaagagggtgcctttggagagcatgggtcacagggcacctattcaaataccaaagagaatgggatcaacggagagctgacctcagctgacagagaaacagcagaggaggtgtctgcaaggatagttcaagtagtcactgctgaggctgtagcagtcctgaaaggtgaacaagagaaagaagctcaacataaagaccagactgcagctctgcctttagcagctgaagaaacagctaatctgcctccttctccacccccatcacctgcctcagaacagactgtcacagtggaggaagatttacttacagcctcgaagatggagttccacgatcaacaggaattgactccctctacagctgagccttcagaccagaaggaaaaggagtcagagaagcaaagtaagcctggtgaagaccttaaacatgctgccttagtttctcagccagagacaactaaaacttaccctgataaaaaggacatgcaaggcacagaagaagaaaaagcacccctagctttgtttgggcacactcttgttgccagcctggaagacatgaaacagaagacagaaccaagccttgtagtacctggcattgacctccctaaagagcctccaactccaaaagaacaaaaggactggttcatcgaaatgccaacggaagcaaaaaaggatgagtggggtttagttgcccccatatctcctggccctctgactcccatgagggaaaaagatgtatttgatgatatcccaaaatgggaagggaaacagtttgattctcccatgccaagtccctttcaagggggaagcttcactcttcctttagatgtcatgaagaatgaaatagttacagaaacatcgccctttgcccctgcctttttacagccagatgacaaaaaatctctgcaacaaaccagtggcccagctactgccaaagatagttttaaaattgaagagccccatgaggctaaacctgacaaaatggcagaagcaccaccctcagaggcaatgaccttacccaaagatgctcacattccagttgtagaagaacatgttatggggaaagttttagaggaagaaaaggaggccataaatcaagagactgtgcagcaaagggatactttcacccccagtggacaggaacctatacttactgaaaaggaaactgagctgaagcttgaagaaaaaaccaccatttctgacaaagaagctgtgccaaaagagagtaaacccccaaaacctgcagatgaagaaataggcataattcagacctccacagagcacactttctcagaacagaaagaccaagagcctaccacagatatgttgaaacaggactcgttccctgtaagtttggagcaagcagttacagattcagccatgacctctaaaacactggagaaagccatgaccgaaccatctgcattaattgaaaagagctcaattcaggaactttttgaaatgagagttgatgacaaagataagattgaaggagttggagctgcaacatcagctgagcttgatatgccattttatgaagataaatcaggaatgtccaagtactttgaaacatctgccttgaaagaagaagcaacaaaaagcattgagccaggcagtgattactatgaactgagtgacactagagaaagtgtccatgagtctattgataccatgtctcccatgcataaaaatggtgacaaggagtttcaaacaggaaaagaatcccagcccagtcctccagcacaagaagcagggtacagcactctcgcacagagttatccatcagatttacctgaagaacccagttctcctcaagaaagaatgttcactattgatccaaaagtgtatggagagaaaagggacctccacagtaagaataaggatgatttgacccttagcaggagtttaggacttggtggtaggtctgcaatagaacaaagaagcatgtcaatcaatttgccgatgtcttgcctagattccatagcccttggatttaactttggtcggggacatgatctttctcctctggcttccgatattctaaccaacactagtggaagtatggatgaaggggatgattaccttccagccaccacacctgcactggagaaagccccttgcttccctgtagaaagcaaagaggaagaacagatagagaaagtaaaagctactggagaagaaagtactcaagcggagatatcatgtgagtctcctttcctagccaaagatttttacaaaaatggtactgtcatggcacctgaccttcctgaaatgctagatctggcaggcacaaggtcaagattggcttctgtgagtgcagatgctgaggttgccaggaggaaatcagtcccatcagagactgtggttgaggatagtcgtactggcttgcccccggtaactgatgaaaaccatgtcattgtaaaaacggacagtcagctcgaagacctgggctactgtgtgttcaataagtacacagtcccattgccatcacctgttcaagacagtgagaatttatcaggggagagtggtaccttttacgaaggcactgatgataaagttcgaagagatttggccacagacctttcactgattgaagtgaaactggcagcagccggaagagtcaaagatgagttcagtgttgacaaagaagcatccgcgcatatctctggtgacaaatcaggactgagtaaggagtttgaccaagagaagaaagctaatgataggttggatactgtactagaaaagagtgaagaacatgctgattcaaaagaacatgccaagaaaactgaagaggctggtgatgaaatagaaacattcggattaggagtaacctatgagcaagctttggccaaagatttgtcaataccaacagatgcatcctctgagaaagcagagaagggtcttagttcagttccagagatagctgaggtagaaccatccaaaaaggtggaacaaggtctggattttgctgtccagggtcaactagatgttaaaattagtgactttggacagatggcttcagggctaaacatagatgatagaagggcaacagagctaaaacttgaggctacacaggacatgaccccctcatccaaagcaccgcaggaggcagatgcatttatgggtgttgagtctggccacatgaaagaaggcactaaagttagtgagacagaagtcaaacagaaggtggccaagcctgacttggtgcaccaggaggctgtagacaaggaggagtcctatgaatctagtggtgagcatgaaagtctcaccatggagtccttgaaagctgatgagggcaagaaggaaacatctccagaatcatctctaattcaagatgagattgccgtcaaattgtcagtggaaataccttgcccacctgctgtttcagaggctgatttagccacagatgagagagctgatgtccagatggaatttattcaggggccaaaagaagaaagcaaagagaccccagatatatccatcacgccttctgatgttgcagagccattgcatgaaacgatcgtatctgaaccagcagagattcagagtgaggaagaagagatagaagcccagggagaatatgataaactgctcttccgctcagacacccttcagataactgacctgggtgtctcaggtgccagggaggaatttgtggagacctgcccaagtgaacacaaaggagtgattgagtctgttgtgaccatcgaggatgatttcatcactgtagtgcaaaccacaactgatgaaggggagtcagggtcccacagcgtgcgttttgcagccctagagcagcctgaggtggaaaggagaccatctcctcatgatgaagaagagtttgaagtagaagaggcagctgaagcccaggcagaacccaaagatggttccccagaggctccagcttcccctgagagagaagaggttgcactttctgaatataagacagaaacctatgacgattacaaagatgagaccaccattgacgactccatcatggacgctgacagcctctgggtggacactcaagatgatgataggagcatcatgacagaacagttagaaactattcctaaagaggagaaagctgaaaaggaagctcggagatcatctcttgagaaacatagaaaagaaaagccttttaaaaccgggagaggcagaatttccactcctgaaagaaaagtagctaaaaaggaacctagcacagtctccagagatgaagtgagaaggaaaaaagcagtttataagaaggctgaacttgctaaaaaaacagaagttcaggcccactctccctccaggaaattcattttaaaacctgctatcaaatatactagaccaactcatctctcctgtgttaagcggaaaaccacagcagcaggtggggaatcagctctggctcccagtgtatttaaacaggcaaaggacaaagtctctgacggagtaaccaagagcccagaaaagcgctcttctctcccaagaccttcctccattctccctcctcggcgaggtgtgtcaggagacagagatgagaattccttctctctcaacagttctatctcttcttcagcacggcggaccaccaggtcagagccaattcgcagagcagggaagagtggtacctcaacacccactacccctgggtctactgccatcactcctggcaccccaccaagttattcttcacgcacaccaggcactcctggaacccctagctatcccaggacccctcacacaccaggaacccccaagtctgccatcttggtgccgagtgagaagaaggtcgccatcatacgtactcctccaaaatctcctgcgactcccaagcagcttcggcttattaaccaaccactgccagacctgaagaatgtcaaatccaaaatcggatcaacagacaacatcaaataccagcctaaaggggggcaggtaagaattgcatgaacacatatttgctgccagaaataattattacattgccttcttcatattgaaaactaacagttcttaaaagggaagcagaggtgttaaagagcttggttacaatttattgctaagagtttggactttacattaggaagatagcctctgaaatacaacgaaaatcacatgacatgcccattccttctgtttgttactgggtaaaaatttttaccaacttttagttgattgactaactttttttttttctgaatgtatctctattgctttgtgttttttaacttgagattaaagttatatttctgatata

SEQ ID NO: 326245 - DNA, 1345 bp, Homo sapiens
  misc_feature (15)..(15): n is a, c, g, or t
cgcgcggtgactctngaggatcccaaactactagatttggcattaaaacaaatgtttatttctaatcacaacaaaattataatgaataaatgttcttgctttgtatggaaatacaattctttattaaagttaacagaaaggaactgatcgtttgtaccagtaaaagagagaaacacacaggttaaatatcttcttgtggggttaaggggtagaacctatcttgccttcactctcaagataacgactcaaattaagctttttgagcaccactcttgtggggacacacatacgctgatctaggaatgaaatcttcgtggtctcaattctagatctactatgccagtttctctctggctttagcctttgagaacctgtataagaatacgtaagtaatccagagctgtgaagagtttaaaggccaacttctccagtgaactcaacctctgggtcacttgcaaccagaaattggatacctcataatgatgcaggaaagacccgagttcatgatgagtttcaaaggccacgttcatttaggaaccaactctctctggatttacctgctgagttccagcagcgtgatgggctgacatcccacctacaagtatgacacctgtgtaacaccagctaggtacggctggagaaggctgaagagagaatgccattaaatggaagaatgtactgattgtagtgaccttctccacacacacacacacacacacacacacacacctacagtaatacagcaagcgtggaataatcagccaatatataacattccatcagtattttattaaggaaataacctgaatgtggttgattttgacatagctgcaattacagttttcttctatttttcaagccacaataaggaaaataaactactcatggtctaaatactagagataaagtagattcatggcttggtaaggaaattttaagcattccttcaaagattgacgtgctaaaataagcattgatgttttgagtttttttacacctaggatttttagcttgggtgtgtaggtgaaggccaagactctctgcaggaaaaagcttattttcaaactcagaaaataaaatgtcaatcataaaaatctacttcaactttagcaaaaagaaaaaaaaatcaacaaaaagtatactctgtatgctgggattccgaggttccaacacactgttacaaatctgtggggggtttctttcttctgataattctagagcctgttaccatagaaaggcatttcttcaatggctggttgtagttagttcatgtttttcaatcaaatttgcaaatgtatttgttgctgtatagtgattgttttgcaaaataaaattgcttgtcacc

SEQ ID NO: 326246 - DNA, 983 bp, Homo sapiens
cggacgcgtgggtcgacccacgcgtccgggaaagacccgagttcatgatgaggtagccaacttctccagtgaactcaacctctgggtcacttgcaaccagaaattggatacctcataatgatgcaggaaagacccgagttcatgatgagtttcaaaggccacgttcatttaggaaccaactctctctggatttacctgctgagttccagcagcgtgatgggctgacatcccacctacaagtatgacacctgtgtaacaccagctaggtacggctggagaaggctgaagagagaatgccattaaatggaagaatgtactgattgtagtgaccttctccacacacacacacacacacacacacacacacctacagtaatacagcaagcgtggaataatcagccaatatataacattccatcagtattttattaaggaaataacctgaatgtggttgattttgacatagctgcaattacagttttcttctatttttcaagccacaataaggaaaataaactactcatggtctaaatactagagataaagtagattcatggcttggtaaggaaattttaagcattccttcaaagattgacgtgctaaaataagcattgatgttttgagtttttttacacctaggatttttagcttgggtgtgtaggtgaaggccaagactctctgcaggaaaaagcttattttcaaactcagaaaataaaatgtcaatcataaaaatctacttcaactttagcaaaaagaaaaaaaaatcaacaaaaagtatactctgtatgctgggattccgaggttccaacacactgttacaaatctgtggggggtttctttcttctgataattctagagcctgttaccatagaaaggcatttcttcaatggctggttgtagttagttcatgtttttcaatcaaatttgcaaatgtatttgttgctgtatagtgattgttttgcaaaataaaattgcttgtcacc

SEQ ID NO: 326247 - DNA, 1571 bp, Homo sapiens
agtctggggcgggcgctcgggctgcgcgggctctgggcagcagcagcagcagcagcagcatcctctcttcctttacttcccttccgcttctttctcttccttctccttctttttcccccccctccccttcttcccctaacccttctacccctctcctttttctccggagggcgctaagtccgtgagcggtggcagtcgcgaccgcgggtgcatccagtttctgcgcccagattttattgatctaatccaaagtatcttataacttctggctggaattaagattcttcagcttgtctctaaccgaggaagcattgattgggagctactcattcagaaaattaaaagaaagaagccagaaaatattatcaaccctttgagaacacgacacaacgaactttatattttaccacttccttgaatagttgcaggagaaataacaaggcattgaagaatggcagatgaacggaaagacgaagcaaaggcacctcactggacctcagcaccgctaacagaggcatctgcacactcacatccacctgagattaaggatcaaggcggagcaggggaaggacttgtccgaagcgccaatggattcccatacagggaggatgaagagggtgcctttggagagcatgggtcacagggcacctattcaaataccaaagagaatgggatcaacggagagctgacctcagctgacagagaaacagcagaggaggtgtctgcaaggatagttcaagtagtcactgctgaggctgtagcagtcctgaaaggtgaacaagagaaagaagctcaacataaagaccagactgcagctctgcctttagcagctgaagaaacagctaatctgcctccttctccacccccatcacctgcctcagaacagactgtcacagtggaggaagaagaagaaacgctagagagtcggatggctgaggaagagaaacctgctgctcttcctgagaaagagtgtggggctgctaagtcctcagaccaacccaagggcctcagtaagggccaaatggagtctagtgcggaggcccaaatagttcccgaagagagtgccccagcaggggccccacatgagaaaagtgtaaaagaggtcaaggaggtgtctccagaagtaaaaaccccttcctctgctggggaaggtgtgtctttctcaggatttgcatgtgttttgttgcaaatgatctctccagtggcttaccaacctgatgcctttccaacgctatttcgctatttcatcgctgggtcttatgataacaagtccactgttgtaggcttaatgtgcagagagtgtggcttgcgcaagtgctgtgtggcagctggttttccagtgctgcagctgattcctggttttcctttgccatgatacaatacgctttgcagccaggctgatgatgctatgtgagcttctttttttattttatttttttacccgccccccctcatctcaaatgtttgccagtcacattgctaatacatgtatatttttgtttttattttggggacagcaattcatatgcttttatttcaaatcgtacagttggattttggcacatagaggc

SEQ ID NO: 326248 - DNA, 601 bp, Homo sapiens
gatgatctgtcactccatatatgaaacgggaggcttttaaagcttactagtcataaacaacttacctcccgactcatttcatcagtgaagctttcaatgttgaacattcataaatgaatatattgcccacatgtgcaccacttccagcctaaatcttctttggataagtaacctgttaccatgaatataaagaagagtttcatttaaatttaatttggtcccttagaaataagagactaaatgttccaacttttagaaaggattcaaataagatattttcattttgctaatttttagagttcttgttataccaaaaagaaaagcccctctgatttcttaggttagacatgggtaaaggagaaaggtattaatacgtgaagcaatccatataatagtataagaagggtgttatggtcttgcatcatatgaggaaatgatatgggctagaaattctaaaagactctttttacatatatggttggagggatggtaaagttaataaatttgtggtttgccgtagtctatctactgcagtcatttttgggaaatagttaccacgaatgcaagatatagttaaatcaaggtatttcttccctcatag

SEQ ID NO: 326249 - DNA, 368 bp, Homo sapiens
aaagagtgagaaagacaaggattgatagaaaaggcagttccacgaggtttgtattgtcacgtttgctttgtcctatgtggtctctctactaggtgaagctggttgtggggattagcttcaatcataatatttggcttggcttgttgatgaataggatttgaacctaatttagggctagcttatatggatattataataaagaattgtgtcttttattcttgatacaatatgaggttgtatatagcaggtattgccagccacagcgtttgatattttacaaattagaggaaaaaaaccaacatcagataaagttttgtttcattgtacagctataaggtagtttgtcccataaaaatctgtctttgctc

SEQ ID NO: 326250 - DNA, 724 bp, Homo sapiens
agcggaggatcccaggtgattttggtgtcaacacatgttggaaagaaagaagccagaaaatattatcaaccctttgagaacacgacacaacgaactttatattttaccacttccttgaatagttgcaggagaaataacaaggcattgaagaatggcagatgaacggaaagacgaagcaaaggcacctcactggacctcagcaccgctaacagaggcatctgcacactcacatccacctgagattaaggatcaaggcggagcaggggaaggacttgtccgaagcgccaatggattcccatacagggaggatgaagagggtgcctttggagagcatgggtcacagggcacctattcaaataccaaagagaatgggatcaacggagagctgacctcagctgacagagaaacagcagaggaggtgtctgcaaggatagttcaagtagtcactgctgaggctgtagcagtcctgaaaggtgaacaagagaaagaagctcaacataaagaccagactgcagctctgcctttagcagctgaagaaacagctaatctgcctccttctccacccccatcacctgcctcagaacagactgtcacagtggaggaagcagcaggtggggaatcagctctggctcccagtgtatttaaacaggcaaaggacaaagtctctaattctaccttgtcaaagattcctgctttacagggtagcacaaagtccccaagatac

SEQ ID NO: 326251 - DNA, 9639 bp, Homo sapiens
accgctaaatcgtaagtgagggctgcatcctattgtcagtgaatgatggcggagctgagtggcttgtcatcattctcgaaaattctgagactagtgagctctctccctctctcccactcgccttattttcctgttcgccactgcggggacttctaatttgcagcttccctttccccggcacacacagacacgagctggtggcttgcagactgcgtctgtctggagctagagagccagagagccagcctgtggggataatgctcccgagaaggattctggcagcagttctcaaaggctagacttgagtggtattgctgcatatgcgctgattcttcagcttgtctctaaccgaggaagcattgattgggagctactcattcagaaaattaaaagaaagaagccagaaaatattatcaaccctttgagaacacgacacaacgaactttatattttaccacttccttgaatagttgcaggagaaataacaaggcattgaagaatggcagatgaacggaaagacgaagcaaaggcacctcactggacctcagcaccgctaacagaggcatctgcacactcacatccacctgagattaaggatcaaggcggagcaggggaaggacttgtccgaagcgccaatggattcccatacagggaggatgaagagggtgcctttggagagcatgggtcacagggcacctattcaaataccaaagagaatgggatcaacggagagctgacctcagctgacagagaaacagcagaggaggtgtctgcaaggatagttcaagtagtcactgctgaggctgtagcagtcctgaaaggtgaacaagagaaagaagctcaacataaagaccagactgcagctctgcctttagcagctgaagaaacagctaatctgcctccttctccacccccatcacctgcctcagaacagactgtcacagtggaggaagatttacttacagcctcgaagatggagttccacgatcaacaggaattgactccctctacagctgagccttcagaccagaaggaaaaggagtcagagaagcaaagtaagcctggtgaagaccttaaacatgctgccttagtttctcagccagagacaactaaaacttaccctgataaaaaggacatgcaaggcacagaagaagaaaaagcacccctagctttgtttgggcacactcttgttgccagcctggaagacatgaaacagaagacagaaccaagccttgtagtacctggcattgacctccctaaagagcctccaactccaaaagaacaaaaggactggttcatcgaaatgccaacggaagcaaaaaaggatgagtggggtttagttgcccccatatctcctggccctctgactcccatgagggaaaaagatgtatttgatgatatcccaaaatgggaagggaaacagtttgattctcccatgccaagtccctttcaagggggaagcttcactcttcctttagatgtcatgaagaatgaaatagttacagaaacatcgccctttgcccctgcctttttacagccagatgacaaaaaatctctgcaacaaaccagtggcccagctactgccaaagatagttttaaaattgaagagccccatgaggctaaacctgacaaaatggcagaagcaccaccctcagaggcaatgaccttacccaaagatgctcacattccagttgtagaagaacatgttatggggaaagttttagaggaagaaaaggaggccataaatcaagagactgtgcagcaaagggatactttcacccccagtggacaggaacctatacttactgaaaaggaaactgagctgaagcttgaagaaaaaaccaccatttctgacaaagaagctgtgccaaaagagagtaaacccccaaaacctgcagatgaagaaataggcataattcagacctccacagagcacactttctcagaacagaaagaccaagagcctaccacagatatgttgaaacaggactcgttccctgtaagtttggagcaagcagttacagattcagccatgacctctaaaacactggagaaagccatgaccgaaccatctgcattaattgaaaagagctcaattcaggaactttttgaaatgagagttgatgacaaagataagattgaaggagttggagctgcaacatcagctgagcttgatatgccattttatgaagataaatcaggaatgtccaagtactttgaaacatctgccttgaaagaagaagcaacaaaaagcattgagccaggcagtgattactatgaactgagtgacactagagaaagtgtccatgagtctattgataccatgtctcccatgcataaaaatggtgacaaggagtttcaaacaggaaaagaatcccagcccagtcctccagcacaagaagcagggtacagcactctcgcacagagttatccatcagatttacctgaagaacccagttctcctcaagaaagaatgttcactattgatccaaaagtgtatggagagaaaagggacctccacagtaagaataaggatgatttgacccttagcaggagtttaggacttggtggtaggtctgcaatagaacaaagaagcatgtcaatcaatttgccgatgtcttgcctagattccatagcccttggatttaactttggtcggggacatgatctttctcctctggcttccgatattctaaccaacactagtggaagtatggatgaaggggatgattaccttccagccaccacacctgcactggagaaagccccttgcttccctgtagaaagcaaagaggaagaacagatagagaaagtaaaagctactggagaagaaagtactcaagcggagatatcatgtgagtctcctttcctagccaaagatttttacaaaaatggtactgtcatggcacctgaccttcctgaaatgctagatctggcaggcacaaggtcaagattggcttctgtgagtgcagatgctgaggttgccaggaggaaatcagtcccatcagagactgtggttgaggatagtcgtactggcttgcccccggtaactgatgaaaaccatgtcattgtaaaaacggacagtcagctcgaagacctgggctactgtgtgttcaataagtacacagtcccattgccatcacctgttcaagacagtgagaatttatcaggggagagtggtaccttttacgaaggcactgatgataaagttcgaagagatttggccacagacctttcactgattgaagtgaaactggcagcagccggaagagtcaaagatgagttcagtgttgacaaagaagcatccgcgcatatctctggtgacaaatcaggactgagtaaggagtttgaccaagagaagaaagctaatgataggttggatactgtactagaaaagagtgaagaacatgctgattcaaaagaacatgccaagaaaactgaagaggctggtgatgaaatagaaacattcggattaggagtaacctatgagcaagctttggccaaagatttgtcaataccaacagatgcatcctctgagaaagcagagaagggtcttagttcagttccagagatagctgaggtagaaccatccaaaaaggtggaacaaggtctggattttgctgtccagggtcaactagatgttaaaattagtgactttggacagatggcttcagggctaaacatagatgatagaagggcaacagagctaaaacttgaggctacacaggacatgaccccctcatccaaagcaccgcaggaggcagatgcatttatgggtgttgagtctggccacatgaaagaaggcactaaagttagtgagacagaagtcaaacagaaggtggccaagcctgacttggtgcaccaggaggctgtagacaaggaggagtcctatgaatctagtggtgagcatgaaagtctcaccatggagtccttgaaagctgatgagggcaagaaggaaacatctccagaatcatctctaattcaagatgagattgccgtcaaattgtcagtggaaataccttgcccacctgctgtttcagaggctgatttagccacagatgagagagctgatgtccagatggaatttattcaggggccaaaagaagaaagcaaagagaccccagatatatccatcacgccttctgatgttgcagagccattgcatgaaacgatcgtatctgaaccagcagagattcagagtgaggaagaagagatagaagcccagggagaatatgataaactgctcttccgctcagacacccttcagataactgacctgggtgtctcaggtgccagggaggaatttgtggagacctgcccaagtgaacacaaaggagtgattgagtctgttgtgaccatcgaggatgatttcatcactgtagtgcaaaccacaactgatgaaggggagtcagggtcccacagcgtgcgttttgcagccctagagcagcctgaggtggaaaggagaccatctcctcatgatgaagaagagtttgaagtagaagaggcagctgaagcccaggcagaacccaaagatggttccccagaggctccagcttcccctgagagagaagaggttgcactttctgaatataagacagaaacctatgacgattacaaagatgagaccaccattgacgactccatcatggacgctgacagcctctgggtggacactcaagatgatgataggagcatcatgacagaacagttagaaactattcctaaagaggagaaagctgaaaaggaagctcggagatcatctcttgagaaacatagaaaagaaaagccttttaaaaccgggagaggcagaatttccactcctgaaagaaaagtagctaaaaaggaacctagcacagtctccagagatgaagtgagaaggaaaaaagcagtttataagaaggctgaacttgctaaaaaaacagaagttcaggcccactctccctccaggaaattcattttaaaacctgctatcaaatatactagaccaactcatctctcctgtgttaagcggaaaaccacagcagcaggtggggaatcagctctggctcccagtgtatttaaacaggcaaaggacaaagtctctgacggagtaaccaagagcccagaaaagcgctcttctctcccaagaccttcctccattctccctcctcggcgaggtgtgtcaggagacagagatgagaattccttctctctcaacagttctatctcttcttcagcacggcggaccaccaggtcagagccaattcgcagagcagggaagagtggtacctcaacacccactacccctgggtctactgccatcactcctggcaccccaccaagttattcttcacgcacaccaggcactcctggaacccctagctatcccaggacccctcacacaccaggaacccccaagtctgccatcttggtgccgagtgagaagaaggtcgccatcatacgtactcctccaaaatctcctgcgactcccaagcagcttcggcttattaaccaaccactgccagacctgaagaatgtcaaatccaaaatcggatcaacagacaacatcaaataccagcctaaaggggggcaggtacaaattgttaccaagaaaatagacctaagccatgtgacatccaaatgtggctctctgaagaacatccgccacaggccaggtggcggacgtgtgaaaattgagagtgtaaaactagatttcaaagaaaaggcccaagctaaagttggttctcttgataatgctcatcatgtacctggaggtggtaatgtcaagattgacagccaaaagttgaacttcagagagcatgctaaagcccgtgtggaccatggggctgagatcattacacagtccccaggcagatccagcgtggcatcaccccgacgactcagcaatgtctcctcgtctggaagcatcaacctgctcgaatctcctcagcttgccactttggctgaggatgtcactgctgcactcgctaagcagggcttgtgaatatttctcatttagcattgaaataataatatttaggcatgagctcttggcaggagtgggctctgagcagttgttatattcattctttataaaccataaaataaataatctcatccccaaactgtagtaattgttacaattttctatttaaaaaatgaatagtacatgcagaaattgacctgatttccatttgcaacaggaagacactggctttacatgggttcaattggacaattatttttgctctgctctgttttgcatggagtattattattttaaaaattgcatttttacctttcatgtgcctgaaggctatccactacattctgaaggccttgttaaaatccaagctgctcatttcactattctgtttctgagtgagaagataaaaactgcccattgtaacttatttcaggttaaattaaaccaaggagtctgattgcaggaagggaagagcatgtaagaaataagtttttttaaagtgttattttgtataaatgggaagaaagattcaattaagttattaacatttgggacctggataattatatcagagtatgtcagtccaataaattatttaactaattaaaaaatagttgcaaagcatttgagctgtggttgaggaagtggtgattagaatgtcagttgatcagctagatttgtgtccacactaccagtttcacaccccctttccatctgtttgatacagtattatagatataaatatatatatatttctctgtggccatttgtgatacttcctcatatacttgaatattatacttctttattcacagtatctgtgtctcctgcaccctttggtgttgcaattttagatatgtgaaagtagatgttagcagggttctctccctatttaaaaaaaatacattaaaaaagacaaaaaattttagcatgaagttgctttctgtaacaactcaaagccgtaaccctgttttagtgccagatacaagtctctcccgtgatgctagacaaaaaattatttttctttgctttcaccaacatggagtttgtgggggtgggtccagttatacatgaaagggtttacagattgttggtttaagattatggatttatctcatttttaatcacaggatagtttggggtttattcctattattattcatgaaaccgacttaagattttttctttatttttctttttttttccatttgctaaagttgaaagttgaaactaactataatagtttgaaacatgttttctcatttttccaaatagtatctgtttattaaattctctaatagaagatgtttgtctttcttacccaaagtaaagatcccctgatcagaaagaaaaaatacaatactttgggaagctatagctataaaacacttgagacacagatatctaaatcagtttttttccaagactccaacattgcactctgtaaagtaacacactgtgatctagtattatttatcagtagataatactgttctgactgtatatacagtctagaactcacaaatcaattagttcctctcacaaatcattcatcttagacttacaaataaggaatgaaatagtcaatggcctgattaaggcaaagagctaccaggctagatggacactttttaaaaattttatctgttctttttcttgctcagggctggtaggttggatctgaaccattaaaatcaaatggtccactaggcgtatgatctctttgagccaaatcagttcctgaatataaaggaggaaatgatgaggatgtactgaggcaacggggaagtatagaaacatccaagacaaaagccaagggatgcaaaggcagagacacaggtgctttttggtgacccagtggatatggcaaccagtgtaactgccatacaagaaaccctaggagcaaacccacaccactcattctcagctaagagattttacacaggcaaacgtgtcttaaaccatctataaatcagttattttatatgacagtcaaaaccttagaaaccttaggatcattatatctattttctgcctattaattgctgtgaggtttgatttgaccaatctgggcaatttattcatcagcttcccttgaagtgcaccagaaaatagaagaaaggtgtgtggagacttagggtattttattacatgttttcatagtcttaaatagtgattaaatttctctagaaagaagttaacagctcattagaaaagttttaacctgtgaaataagtatttttctcaacattctttaaagtttttatataagttaacactaggtaaacattctgcatactagaagtcagtttattacaaatacatgtcaaaaataaagattatacaaggcaccaaactactagatttggcattaaaacaaatgtttatttctaatcacaacaaaattataatgaataaatgttcttgctttgtatggaaatacaattctttattaaagttaacagaaaggaactgatcgtttgtaccagtaaaagagagaaacacacaggttaaatatcttcttgtggggttaaggggtagaacctatcttgccttcactctcaagataacgactcaaattaagctttttgagcaccactcttgtggggacacacatacgctgatctaggaatgaaatcttcgtggtctcaattctagatctactatgccagtttctctctggctttagcctttgagaacctgtataagaatacgtaagtaatccagagctgtgaagagtttaaaggccaacttctccagtgaactcaacctctgggtcacttgcaaccagaaattggatacctcataatgatgcaggaaagacccgagttcatgatgagtttcaaaggccacgttcatttaggaaccaactctctctggatttacctgctgagttccagcagcgtgatgggctgacatcccacctacaagtatgacacctgtgtaacaccagctaggtacggctggagaaggctgaagagagaatgccattaaatggaagaatgtactgattgtagtgaccttctccacacacacacacacacacacacacacacacctacagtaatacagcaagcgtggaataatcagccaatatataacattccatcagtattttattaaggaaataacctgaatgtggttgattttgacatagctgcaattacagttttcttctatttttcaagccacaataaggaaaataaactactcatggtctaaatactagagataaagtagattcatggcttggtaaggaaattttaagcattccttcaaagattgacgtgctaaaataagcattgatgttttgagtttttttacacctaggatttttagcttgggtgtgtaggtgaaggccaagactctctgcaggaaaaagcttattttcaaactcagaaaataaaatgtcaatcataaaaatctacttcaactttagcaaaaagaaaaaaaaatcaacaaaaagtatactctgtatgctgggattccgaggttccaacacactgttacaaatctgtggggggtttctttcttctgataattctagagcctgttaccatagaaaggcatttcttcaatggctggttgtagttagttcatgtttttcaatcaaatttgcaaatgtatttgttgctgtatagtgattgttttgcaaaataaaattgcttgtcacc

SEQ ID NO: 326252 - DNA, 9453 bp, Homo sapiens
accgctaaatcgtaagtgagggctgcatcctattgtcagtgaatgatggcggagctgagtggcttgtcatcattctcgaaaattctgagactagtgagctctctccctctctcccactcgccttattttcctgttcgccactgcggggacttctaatttgcagcttccctttccccggcacacacagacacgagctggtggcttgcagactgcgtctgtctggagctagagagccagagagccagcctgtggggataatgctcccgagaaggattctggcagcagttctcaaaggctagacttgagtggtattgctgcatatgcgctgattcttcagcttgtctctaaccgaggaagcattgattgggagctactcattcagaaaattaaaagaaagaagccagaaaatattatcaaccctttgagaacacgacacaacgaactttatattttaccacttccttgaatagttgcaggagaaataacaaggcattgaagaatggcagatgaacggaaagacgaagcaaaggcacctcactggacctcagcaccgctaacagaggcatctgcacactcacatccacctgagattaaggatcaaggcggagcaggggaaggacttgtccgaagcgccaatggattcccatacagggaggatgaagagggtgcctttggagagcatgggtcacagggcacctattcaaataccaaagagaatgggatcaacggagagctgacctcagctgacagagaaacagcagaggaggtgtctgcaaggatagttcaagtagtcactgctgaggctgtagcagtcctgaaaggtgaacaagagaaagaagctcaacataaagaccagactgcagctctgcctttagcagctgaagaaacagctaatctgcctccttctccacccccatcacctgcctcagaacagactgtcacagtggaggaagatttacttacagcctcgaagatggagttccacgatcaacaggaattgactccctctacagctgagccttcagaccagaaggaaaaggagtcagagaagcaaagtaagcctggtgaagaccttaaacatgctgccttagtttctcagccagagacaactaaaacttaccctgataaaaaggacatgcaaggcacagaagaagaaaaagcacccctagctttgtttgggcacactcttgttgccagcctggaagacatgaaacagaagacagaaccaagccttgtagtacctggcattgacctccctaaagagcctccaactccaaaagaacaaaaggactggttcatcgaaatgccaacggaagcaaaaaaggatgagtggggtttagttgcccccatatctcctggccctctgactcccatgagggaaaaagatgtatttgatgatatcccaaaatgggaagggaaacagtttgattctcccatgccaagtccctttcaagggggaagcttcactcttcctttagatgtcatgaagaatgaaatagttacagaaacatcgccctttgcccctgcctttttacagccagatgacaaaaaatctctgcaacaaaccagtggcccagctactgccaaagatagttttaaaattgaagagccccatgaggctaaacctgacaaaatggcagaagcaccaccctcagaggcaatgaccttacccaaagatgctcacattccagttgtagaagaacatgttatggggaaagttttagaggaagaaaaggaggccataaatcaagagactgtgcagcaaagggatactttcacccccagtggacaggaacctatacttactgaaaaggaaactgagctgaagcttgaagaaaaaaccaccatttctgacaaagaagctgtgccaaaagagagtaaacccccaaaacctgcagatgaagaaataggcataattcagacctccacagagcacactttctcagaacagaaagaccaagagcctaccacagatatgttgaaacaggactcgttccctgtaagtttggagcaagcagttacagattcagccatgacctctaaaacactggagaaagccatgaccgaaccatctgcattaattgaaaagagctcaattcaggaactttttgaaatgagagttgatgacaaagataagattgaaggagttggagctgcaacatcagctgagcttgatatgccattttatgaagataaatcaggaatgtccaagtactttgaaacatctgccttgaaagaagaagcaacaaaaagcattgagccaggcagtgattactatgaactgagtgacactagagaaagtgtccatgagtctattgataccatgtctcccatgcataaaaatggtgacaaggagtttcaaacaggaaaagaatcccagcccagtcctccagcacaagaagcagggtacagcactctcgcacagagttatccatcagatttacctgaagaacccagttctcctcaagaaagaatgttcactattgatccaaaagtgtatggagagaaaagggacctccacagtaagaataaggatgatttgacccttagcaggagtttaggacttggtggtaggtctgcaatagaacaaagaagcatgtcaatcaatttgccgatgtcttgcctagattccatagcccttggatttaactttggtcggggacatgatctttctcctctggcttccgatattctaaccaacactagtggaagtatggatgaaggggatgattaccttccagccaccacacctgcactggagaaagccccttgcttccctgtagaaagcaaagaggaagaacagatagagaaagtaaaagctactggagaagaaagtactcaagcggagatatcatgtgagtctcctttcctagccaaagatttttacaaaaatggtactgtcatggcacctgaccttcctgaaatgctagatctggcaggcacaaggtcaagattggcttctgtgagtgcagatgctgaggttgccaggaggaaatcagtcccatcagagactgtggttgaggatagtcgtactggcttgcccccggtaactgatgaaaaccatgtcattgtaaaaacggacagtcagctcgaagacctgggctactgtgtgttcaataagtacacagtcccattgccatcacctgttcaagacagtgagaatttatcaggggagagtggtaccttttacgaaggcactgatgataaagttcgaagagatttggccacagacctttcactgattgaagtgaaactggcagcagccggaagagtcaaagatgagttcagtgttgacaaagaagcatccgcgcatatctctggtgacaaatcaggactgagtaaggagtttgaccaagagaagaaagctaatgataggttggatactgtactagaaaagagtgaagaacatgctgattcaaaagaacatgccaagaaaactgaagaggctggtgatgaaatagaaacattcggattaggagtaacctatgagcaagctttggccaaagatttgtcaataccaacagatgcatcctctgagaaagcagagaagggtcttagttcagttccagagatagctgaggtagaaccatccaaaaaggtggaacaaggtctggattttgctgtccagggtcaactagatgttaaaattagtgactttggacagatggcttcagggctaaacatagatgatagaagggcaacagagctaaaacttgaggctacacaggacatgaccccctcatccaaagcaccgcaggaggcagatgcatttatgggtgttgagtctggccacatgaaagaaggcactaaagttagtgagacagaagtcaaacagaaggtggccaagcctgacttggtgcaccaggaggctgtagacaaggaggagtcctatgaatctagtggtgagcatgaaagtctcaccatggagtccttgaaagctgatgagggcaagaaggaaacatctccagaatcatctctaattcaagatgagattgccgtcaaattgtcagtggaaataccttgcccacctgctgtttcagaggctgatttagccacagatgagagagctgatgtccagatggaatttattcaggggccaaaagaagaaagcaaagagaccccagatatatccatcacgccttctgatgttgcagagccattgcatgaaacgatcgtatctgaaccagcagagattcagagtgaggaagaagagatagaagcccagggagaatatgataaactgctcttccgctcagacacccttcagataactgacctgggtgtctcaggtgccagggaggaatttgtggagacctgcccaagtgaacacaaaggagtgattgagtctgttgtgaccatcgaggatgatttcatcactgtagtgcaaaccacaactgatgaaggggagtcagggtcccacagcgtgcgttttgcagccctagagcagcctgaggtggaaaggagaccatctcctcatgatgaagaagagtttgaagtagaagaggcagctgaagcccaggcagaacccaaagatggttccccagaggctccagcttcccctgagagagaagaggttgcactttctgaatataagacagaaacctatgacgattacaaagatgagaccaccattgacgactccatcatggacgctgacagcctctgggtggacactcaagatgatgataggagcatcatgacagaacagttagaaactattcctaaagaggagaaagctgaaaaggaagctcggagatcatctcttgagaaacatagaaaagaaaagccttttaaaaccgggagaggcagaatttccactcctgaaagaaaagtagctaaaaaggaacctagcacagtctccagagatgaagtgagaaggaaaaaagcagtttataagaaggctgaacttgctaaaaaaacagaagttcaggcccactctccctccaggaaattcattttaaaacctgctatcaaatatactagaccaactcatctctcctgtgttaagcggaaaaccacagcagcaggtggggaatcagctctggctcccagtgtatttaaacaggcaaaggacaaagtctctgacggagtaaccaagagcccagaaaagcgctcttctctcccaagaccttcctccattctccctcctcggcgaggtgtgtcaggagacagagatgagaattccttctctctcaacagttctatctcttcttcagcacggcggaccaccaggtcagagccaattcgcagagcagggaagagtggtacctcaacacccactacccctgggtctactgccatcactcctggcaccccaccaagttattcttcacgcacaccaggcactcctggaacccctagctatcccaggacccctcacacaccaggaacccccaagtctgccatcttggtgccgagtgagaagaaggtcgccatcatacgtactcctccaaaatctcctgcgactcccaagcagcttcggcttattaaccaaccactgccagacctgaagaatgtcaaatccaaaatcggatcaacagacaacatcaaataccagcctaaaggggggcaggtacaaattgttaccaagaaaatagacctaagccatgtgacatccaaatgtggctctctgaagaacatccgccacaggccaggtggcggacgtgtgaaaattgagagtgtaaaactagatttcaaagaaaaggcccaagctaaagttggttctcttgataatgctcatcatgtacctggaggtggtaatgtcaagattgacagccaaaagttgaacttcagagagcatgctaaagcccgtgtggaccatggggctgagatcattacacagtccccaggcagatccagcgtggcatcaccccgacgactcagcaatgtctcctcgtctggaagcatcaacctgctcgaatctcctcagcttgccactttggctgaggatgtcactgctgcactcgctaagcagggcttgtgaatatttctcatttagcattgaaataataatatttaggcatgagctcttggcaggagtgggctctgagcagttgttatattcattctttataaaccataaaataaataatctcatccccaaactgtagtaattgttacaattttctatttaaaaaatgaatagtacatgcagaaattgacctgatttccatttgcaacaggaagacactggctttacatgggttcaattggacaattatttttgctctgctctgttttgcatggagtattattattttaaaaattgcatttttacctttcatgtgcctgaaggctatccactacattctgaaggccttgttaaaatccaagctgctcatttcactattctgtttctgagtgagaagataaaaactgcccattgtaacttatttcaggttaaattaaaccaaggagtctgattgcaggaagggaagagcatgtaagaaataagtttttttaaagtgttattttgtataaatgggaagaaagattcaattaagttattaacatttgggacctggataattatatcagagtatgtcagtccaataaattatttaactaattaaaaaatagttgcaaagcatttgagctgtggttgaggaagtggtgattagaatgtcagttgatcagctagatttgtgtccacactaccagtttcacaccccctttccatctgtttgatacagtattatagatataaatatatatatatttctctgtggccatttgtgatacttcctcatatacttgaatattatacttctttattcacagtatctgtgtctcctgcaccctttggtgttgcaattttagatatgtgaaagtagatgttagcagggttctctccctatttaaaaaaaatacattaaaaaagacaaaaaattttagcatgaagttgctttctgtaacaactcaaagccgtaaccctgttttagtgccagatacaagtctctcccgtgatgctagacaaaaaattatttttctttgctttcaccaacatggagtttgtgggggtgggtccagttatacatgaaagggtttacagattgttggtttaagattatggatttatctcatttttaatcacaggatagtttggggtttattcctattattattcatgaaaccgacttaagattttttctttatttttctttttttttccatttgctaaagttgaaagttgaaactaactataatagtttgaaacatgttttctcatttttccaaatagtatctgtttattaaattctctaatagaagatgtttgtctttcttacccaaagtaaagatcccctgatcagaaagaaaaaatacaatactttgggaagctatagctataaaacacttgagacacagatatctaaatcagtttttttccaagactccaacattgcactctgtaaagtaacacactgtgatctagtattatttatcagtagataatactgttctgactgtatatacagtctagaactcacaaatcaattagttcctctcacaaatcattcatcttagacttacaaataaggaatgaaatagtcaatggcctgattaaggcaaagagctaccaggctagatggacactttttaaaaattttatctgttctttttcttgctcagggctggtaggttggatctgaaccattaaaatcaaatggtccactaggcgtatgatctctttgagccaaatcagttcctgaatataaaggaggaaatgatgaggatgtactgaggcaacggggaagtatagaaacatccaagacaaaagccaagggatgcaaaggcagagacacaggtgctttttggtgacccagtggatatggcaaccagtgtaactgccatacaagaaaccctaggagcaaacccacaccactcattctcagctaagagattttacacaggcaaacgtgtcttaaaccatctataaatcagttattttatatgacagtcaaaaccttagaaaccttaggatcattatatctattttctgcctattaattgctgtgaggtttgatttgaccaatctgggcaatttattcatcagcttcccttgaagtgcaccagaaaatagaagaaaggtgtgtggagacttagggtattttattacatgttttcatagtcttaaatagtgattaaatttctctagaaagaagttaacagctcattagaaaagttttaacctgtgaaataagtatttttctcaacattctttaaagtttttatataagttaacactaggtaaacattctgcatactagaagtcagtttattacaaatacatgtcaaaaataaagattatacaaggcaccaaactactagatttggcattaaaacaaatgtttatttctaatcacaacaaaattataatgaataaatgttcttgctttgtatggaaatacaattctttattaaagttaacagaaaggaactgatcgtttgtaccagtaaaagagagaaacacacaggttaaatatcttcttgtggggttaaggggtagaacctatcttgccttcactctcaagataacgactcaaattaagctttttgagcaccactcttgtggggacacacatacgctgatctaggaatgaaatcttcgtggtctcaattctagatctactatgccagtttctctctggctttagcctttgagaacctgtataagaatacgtaagtaatccagagctgtgaagagtttaaaggccaacttctccagtgaactcaacctctgggtcacttgcaaccagaaattggatacctcataatgatgcaggaaagacccgagttcatgatgagtttcaaaggccacgttcatttaggaaccaactctctctggatttacctgctgagttccagcagcgtgatgggctgacatcccacctacaagtatgacacctgtgtaacaccagctaggtacggctggagaaggctgaagagagaatgccattaaatggaagaatgtactgattgtagtgaccttctccacacacacacacacacacacacacacacacctacagtaatacagcaagcgtggaataatcagccaatatataacattccatcagtattttattaaggaaataacctgaatgtggttgattttgacatagctgcaattacagttttcttctatttttcaagccacaataaggaaaataaactactcatggtctaaatactagagataaagtagattcatggcttggtaaggaaattttaagcattccttcaaagattgacgtgctaaaataagcattgatgttttgagtttttttacacctaggatttttagcttgggtgtgtaggtgaaggccaagactctctgcaggaaaaagcttattttcaaactcagccatcagatgtcctatcagtaggatactcctaccttcaactatgtagcctagaatagaagtaaaaaatcagactaagatagtatagcat
